United States Patent Application Publication US 2007/0054278 A1 - sequence listing, part 81

SEQ ID NO: 96470 - DNA, 73651 bp, Homo sapiens
ctgtgtttgggcttatcacagtattccacacacctagcacagtgcctgtccacaagagatgtacacatttattttctgaatgaatgaaacagcaaatgttggactggcgtggcctagtcctaaaaggtgacatttcacttcagatgagactggtttttaatactttccattttggaaagagaatcttggattcctaatcctaagtaagataggaagtgatgaagagaaattgttttcctttattagttactcatatgctcactgttgcaatcatagctaagatgacatccagaacattttaggtttgctgcatacttacttgtatgtttacttttttaaggagcttactctttctgacaataaaactggcctggtgtggtggctcatgcctgtaatcccagtacattgagaggccaaggagggcggatcacctgaggtcaggagttcgagaccagcctgaccaacatggcaaaaccgcatctctactaaaaatacaaaaaaaaaaaaaaaaaaccagccaggcacgatggcggatgcctataatctcagctgctcaggaggctgaggcaggagaatcgcttgaaaccaggaggtggaggttgcagtgagccgagatcaccccactgcactccagcctgggcaacagagtgagactccttctcaaaaaaaaaaaaaaaagtgatacatgccttctgtgaggagtatgaaaaatgctgaaaaattaaaaagaaaatgaaaattccctaaaatcccattgcccaactgccgttgagctcttccttcttggagttcctgctttccacacatttcattccattgttttggccccaacaacataaagggcatgaagacagaagatgcacaaaaggagtcaggtgggtcccttggggatggagggatccccatgtggaattccccagtgggcagttgaaatgcagttctaaaccaggagagagttcagtcacatccctaagtggggaggaagaagaatcacagaggtgtcagggaaagcttcagagagaggaggaggcaagataatgaaaaggtaagccacagactgggaggaagtatttacgatacacatatctgacaaatgacttgaatccaggaggctggccagagaaggaaagcagaccaaggagaaagaagtctcatataatacagccagtttatactctctccagaaagtatatggcataaagcattagaaagaactcattttcaaggctgggtgcagtggctcatattcccacccatattcccaacactttgggaggccgaggcaggaggattgcttaagaacaggagttgaagaccagcctggacaacataggaagaccctgtccacaaacaaatttaaaattaggccaggtttggtggctcatgcctgtaatcctagaactctgcgaggctgagatggaagaattgcctgagcccaggagttcaagaccagcctgggcaacacagggagattagctgggcatggaggcttgtacctgtagtctcagctatttgggaggctgatgtggaaggatcgtatgagcccaggaggtcgaggctgcagtgagccatgatcacaccagtgcattccagcctgggcgacagagcaagaccctgtctcaaaaacaaacaaacaaacaaacaaaaaacagaaagaacccatattctcttaaattcttatctataaatgttttattggactcttcaggcgtgagatgctttctctccatattctctatacctgtggattgtggccagcattcttttcaagaaaatgagctggcttttgaagaacacagaattaaccagaacattgcttcctgaatgtcatcttttccttcctccgcaaacagatttcatctactctttttaaaaacataagtttgtttagaatggcttttcagaactattttcacacccacattatgaacaaacgaatctgtttcaatcaatgttctttgaaagaaggcaagtttgcagatgtattaaatgtcttgctgatttttatccgtcacgcttatttctgaacctctggccatcttttcaataggctacattcctactgcttcaaagtctgctcacaaaggacaaccctcataagtttttgtcatttacccaaaatttcctattggaaggttcgactcgtctgcctggagagataaagatggaagtccagcagtagctgtgcaaatggccaccagatgttccagaacagatacaggtgctgctgtcttcagaacaggaaaatgctagaaaatgctgccaaggcacccaaagtctagctgataccaactacttgctaaaagacctctcaaacactgtcaacataaaaaccaaataatcctatccaggaaagaacctccaaaatccgttaactatctcaagcacatggatcttagaagccaaatcttgtttcttgtgcattcaaatctcagtaggatggtacacagaaaataccccctttggactatcacttcctcattcaacaaccattataggccccaatagctgtaaagcaccgagtcccaaggcaacctgtccaaagctcaactcactactctcctcccaagtccccctttccaaccccagcttaagacttcatccttccttagccagatctatttccctgactcacaagaggaaagcagactgtatgaattggggaagggggatctcatttggctttgtggacccatttttaagttctgccactcttcacagaaacaggtagagatacagcgggggcacatcatgtcagaataatgcagactttttttttttttttttttttttttttttttttttttttttcagataacagcaatacaaggtaagaggtgctatggtggagtcatagaagcatatggtggaagatgccaagactggctgaaaggagagtggggaagcttttccgcacagtgcctggcacaaagtacatgctcaatacatgattaatgaatgaaaaggcagtgacatctcaatatcaactagatgttaaatgggcctgcctatatagaggagcagagaggggttttctatgagagcaaaggcccagccatgtcaattcccagatgtgtccagggaatgacaaaacctgggttgtgccctggcaacaggctggaaacatggtgtggggatcttggacagaatttggtagacagtagatctccagaaatgccaaatgccaaatgccaaagggtaggaaacagagatctactcacatctgtacttttttttttttttttgagatggagtcttgctctcttgcccaggctaaagtgcagtggcatgatgtcggctcactgcaacctctgcctcccgggttcaagcgattctcctgcctcagcctccagagtagctgggattacaggcacgtgccaccacacctggttaattttttatatttttggtagagaccaggtttcaccattttggcgaggctggtctcgaactcctgacctcaagtgatctgcctgcctcagcctccaaaaattctgggattacaggcatgagccaccgcgcgagcctcatgtctgtactttctaatgcaatgttagtggtcttgcggatgacagctgttacagaaacaagatggatttggaaaatataatggtagttcagttggaagattaaaaagtagtgataggaagtggtaatgaagtagaagatgagtggacccgaaaataaaatttgaaaactactttctttgttcctttaacaagtaattaagagtacattactctgggggagggatagcatttggagatatacgtaatgctaaatgacgagttaatgggtgcagcacaccaacatggcacatgtatacatatgtaacaaacctgcacattgtgcacatgtaccctaaaacttaaagtataataataataaaataaaataattttaaaaaagagtacattactctcatctcaaaacaaaacaacacacaagcaaacactctcacttcctcctgcaggttttttctgttgtcttcacaacttgccttcacagccaagtttctataaactttctcctgcctgccttcccctctttgatacacatcagtctagcttttgccctcaccacgccagcctacacgcaggacaagctccctgcatgtagcacccgtcaggcactttccaattcttatcttgctggacttctactccaagcaccagacagagctgatcacttcagagctctctcttcacctcttcttgcctccaacttatcccttacatacccgtgttcctgggctttttccccctatctatttcagctccttccaccactagctgtgcactaatgactcccagatttctatcatctcagccatcgctcctgactctgcaagtgtttacccaactgcctcctagacatcctcacttacttgtcccaggcgcagctcaaactccacaggcaccaaagggaaatgatccagctgtgtgaccttgggcacattaattaactcactccctgaattataaaatgagggcattactaatggacacctcacccagaagcctgttacggagagtacagaatagcatgtcagcagacgttggcacatggtaagcgacaagtgttaaccatcattctgtcttccctcaaacccacgccttcttccccataaatcccctacgttgactcataaacccaccacccaggtcattcatcaagtcaggctgtgggcatcctccttgacaccccctttattaacctcacagttactctgcctcagcccttccactccacttcctaaacatctgttcttccttctctatcgccaccaccttcagccctcattttcccagggggctggggtcattctttccctgtctcctcttactactttgcaccatccttctgagagaacactgcatccatcactccaccttcccctttcaagggctcccctctgccttatgggggcaaaatccaaactctggaagagcaaagcctctttatggtctcactctcctctctcagtccaccttgctcctcagctccagctggtcctccttcgggggaggtgatggtggcagtcctcatcaggctctgcaggcctctcctccctccagatgtagcctggacttcctgtcggaggcgcatctttctcgtttcccagggcctgtgccctaacactaagcatgctttggtaagtatctgctcagttgtctgtcctctccactaaactgtgctgttttcaggcaaaacaattatcgtttatttccatgtctccaacactaggcagacagtaggtactcaaggaaagtgatcaacataaagagttttggccaaaaatgaaacaacttggtttgaggaatcagcgtgaaagttagtgaatccactcctctcgtggcacaaggctgcacaggggttccttaaggcctgcgtggatatccagtgcctgaacgtctttctcggtgttttcgctcgcgcagaattaacctgcacaactacagcggacacacagctgcactggcattggcagaagctttttttcttttccccagcagagcgcacgagggcctgcaaaggcacgcccagagagccgaggttaaatcctgcgccctttgttcgcggcagccgagagccagcggctcagtgcccgccgcccccgccgggtgcagggccggttagggccgagcgtttcgcagagacgcaccccgggagcaccgcgtcgagcggagcgcgcgtgcgccagggcttgctctgggtcaccctcgcagccctgggatcccgcgctctgcaaggccgtctccccggcccgcggccgcggccgccgccgccgccggcgggaaagcgcccagcgtcccggcgtcacgcgccagcagccctgcacgcggggcggtgcagggcggcgcagggcgggacgaggcggggagggggcggggccagcgcgacggggcggggcgaacgccgggcacaggaagcgccgggaggcctgagccgtcccagggtgccccgcgcggcgtggactcgggccgctgccgccatcccgctggagagagggagagagaggcccgcccgctcgccggccgggccagtgtgagccagtgcgtgagggcgcggggggccgtgtcagcgagacgcagagcgcagccgccaccaccaaacggacatgttgaagaccagcgctgccgccgcctccttttcctcatcctgcgaacgggactgagagggggcccgccacctctccgcctctgcctcggccgcccgcctcgccgcttcgggcgcagcctcttcctgcccgggcctcggactccgccgctcgtcgcctccccccggccaccaggcccggctggtttcccagccccgctccgccgcggcgcgaggtctatgtgaccggcgggcccggagcagccgccgccgcagcgcgaacatggacgccgtcaacgccttcaaccaggaggtaaggggtgtttggggcaggggggtgccgggcctgctgygggagccggggctcgtttctcccgccgccggaggtttaaagctttggtccgggtggggacgcttcctgccccggttccggggcggcggggcctgcgcggagcggggcctgtggcccgggagaggtcgcggcgaccacgggaactgaccccgcacccctccccccactgcccacccccggaccgcgacctcgggcttctcccctcgcccccttgcggcctcccatagcccaagtctgtgcctgttcctctaacttggccctttttcgggtctgggcgccctcgctctctgctccgcgagccccgttgtcgggttcgcagtgccgggagcccgcaaagggctaagaaagaagcgcgggcgggcgtgtggggttgggggcgggggagcgggagcatctgccggtcgtggggctggcggagaggtggcttcagctctcctgttgctcaggccgcggcgcgtcgacggctggactctgatcccgggtctgggaggagttgaagagggtgttcatcccccttctccgggattcacgcacttgggaaatagggctaataaacggagagggggtggctcgttataatttaaagtcgtgaacataaccctcttataggctctatggccccaacgtgacgcctaaaaagttgaatgggagagaagagtattcgctccgccttagtccgctagaaagctggcgttgtcctccagttccctaccctcgcaccccctcccgaggtagttaatcctcggctcccttctacgaggacatttacatgtgaaaayctctccaaactgggaacaaagctgcctgcggccttaaagttctctagttgtttctctgatcattccaggtgttgcttttggagtgtagagtccatacatcctatttgtcagaatcgatttgggaggaggagacttgaccattgatgatttaaaatgcagttacagaatgggaactattgtcatgggttgagttgtattgtcttccctttccaaataccaaagataaagcaacattgaaaaatcaaatgttgtagttcgagatgtgtggatgtggcgttaaaaacgtgctgcatctcacagattttgtaggtttacttgtaacaattatggtgcaataactttcctttagatttgcagtgccataatatatgggactttccaattacactgcagttgagacaatttattgccatataaattatcctaaaagtgattttcttcaattgatgggtacataaaatgccctaactgcagaagttgcaactggtattggacagtgtcttgtaaaagttcagttgtgatgattttcaaaacaataaaaataatatgtcctagtttttgatcgccagagaatttgtgataatgctccaaacatttcagggttggaagctgattgttttctgaaggtagaattcactggcatgttggctcctggctccatgagggcaggaagtttcagttcttttccccgcttctctaccaatcaaaacaggtgcctcgcaaataattgttgaatgagaatttaaacaaatggcacaacaatagttaaaatatttcaagtacatttttctcccaacaatgaatgtgtattttaaaaatttatttcagaatcggaagaatgaatgtttttgatgaaagaagaggatttttagtttattcttaagatcagaagtattctgattcaggcattatggaagttgacatcaagcacattgttaagcaaagtattttctattaatcctgaaaaggcacaatcagtaatttttactttgaaaaaccaaagttaggaatggtattgattccttgaaaaagggaagtgatatttgaccttttaaatgtgcaaaatgagcattttcttatcattgttcattttccagttcatttcagttctattcctagtctttatgaactgcaaagaatgccagctctcttctgctaaattaaaactcctctagagaaattaatctgagtttaaaattcatcttactgtgcctacttgatttgtagtgcttctcaactatttctccccattcatgaaatgttcttgattcgttccccatataatcttgaatctctgagatctgatcttcacttaaacttttgagtgcctgctcacctgcacagccatgtcctgaatactgtagagctaccaaggatttcagtcacctaaaagtctaatccaatagaggacataagacttagacaaataattttaataggaggtagaacagcttcctttgggatccttccattgcagtgtggcatagccattggagataagtgaaggcttgggaagaggagcaggtatcagttttaggatttcagaagatgtaggaagcagtgatcgaagggcagtagtgctgaaaagtgagtattttgattctgaaggctactggaaagtaaggatggtaaagtagtttgggcctgacaagtttcatgtttgcctaatgtgtttgaatttcagttttaggctgtgggtaaacattgaaggttttaagcagtgggataatgtaatcaaaactgtttcgttcgtagtgttatgtgttgtaggaggcagagacttggtaggaaagataagtaaaacctgaacttggcaagtgtatagtgggaatggagaataggaaaaggatgtgggccaaaggaatccatggaccttggcatctgataggtttataagcaccttttgtccccacatcctaagggctgagagagtggtgatacccttatcacaagtcatcaaaagcctacttagtagagaagaaaatgtgtttgatttttgaacaggttaattgtggaacaatcatgtggaaatttttggcaagtagttgggcttataggacttaaacttggaagcaactaagagatagagggagacatccaggagttcagatgggaaagatgggggaaaattgaaagggggagaaaaaggaattaatataagaccaatggcatgtcaggcattagatatgtacacatatctaatttaatatgtattcccacaaccctgcatagacgtccaattacagatgaggaaactgattttccaagaaattataataaatagtaactcccctaagggcatattgctagttaatggcagaactaggatttgaattgggatctctccaatttaattgtgtccgaagataatattttgtatagtatgaggggacttggccactgaaatgtttgaggataacaggatttgaggtttagggttgaatggtgatgggagataaggaaataagaggtagctagtgtaaagtagtctttagaggtttggttttgagggattagagggaaatgttgcttaaggatgagggaaggaagggcagttaacaatgtactaggcactggtgataggcagtacgtttgtttgtattatatgtatatatataagtctttagctttagttagtagtgttgaatccctagtcttttagatgggagtagaggctttagcattttcaaggaagggggtgtagaatagcatagtttaccagcaagaggggatggctaacttgaagcaaaattatggataagagaaatgggacaaatcagaagcagtagtaaaagacgtccatctctgatacagaaggaaaggaagataagagaggttattaaagatacccatttaacagaatatttggagaatttttatggcaagacatgtattaagtgttgtgaaagattgaaaagggtagtgaaaaagtatcagttatcaattatggctaatacttaatggtgtctgttgtatagtttatatacttctgaatgtgaagaatttgctaaagtttgtggaatagaataaagagtatggaattttttttttttttaaggtggagacccgctctgtcaccacgctggagtgcagtggcgcaatctcagctcactgcagcctccgcctcctgggttcaagcgattctcctgcctctcctcccgagtagctgggactacaggagcacaccaccactcccagctaatttttgtatttttagtagagacggggtttcaccatgttggccaggatggacttgatctcttgacctcgtgatccaccctcctggcctcccaaagtgctgggattacacgtgtgagccactgcgcccagccagattgtgttttttaacccattgattgtatttttagtctttaacccatcttgcctaaatcctgaagaattgtatcttgcccctcccactttttttgcatcatctgcagttttaagacatttgaagtacaaaaatagtccaggcacggtggcttacgcctgtaattccagtactttgggagcccaaggcgggtgaatcatgaggtcaggagttacagaccagcctggctaacatggtgaaaccctgtctctactaaaaatacaaaaaattagctgggcctggtggtaggcgcctgtaatcccagctacttgggaggctgaagtaggagaattgtttgaaccctggaggcagaggttgcagtgaaccgagattgggccactgcactccagcttgggcaacagtgtgagagtccatcttaaaaaaaagaaaaaaaagtacaaaaatagtgcagagaaaataaaacagttaagaatatacagttgttactattttgtgtttttaatttacaaataaaatataaagtcttcctttcatcctcactccaaccccaaccctcctcccacttgcaggagaggcaatcaaataatttagtattaatctctgtggtccataaacaatatataatattctctgatactggagtgtagtggcaccagcacggcttactgcagctttgacctgctttttttgtttgctcaaatattaatactgtctattaagattagttaatattttgctgacaggctgcaatgaacttttcaaacatgtctcctggtgcgcatgtgtaggaatttctgtaggacagctgttctcaaactttttggttttagacccatttatttgttttttgagacagggtctggctctgtggcccagactagagggcagtggcacaaactccacccattgcaacctccgcctcctgggctcaagccatcctcctgtctcagcctcccaagtagctgggaccacaaacctctgccaccatgcctggctaatttttcaatttttttcggtagacacggggtttggctctgttgcccatgctggtctcaagcctctgagctcaagtgattagcccaccttagccccctgaaagtactgggattgcaggcatgagccaccatgcctggctagatccttttaaattcttaaaggttaagggccaccgccaggcgtggtggctcacacctgtaatcccagcactttgggaggccgaggcgggcagatgacaaagtcaagagatcgagaccattctggctaacacggtgaaacccygtctctactaaaaatacaaaaaattagctgggtgtggtggcgggcgcctgtaatcccagctacttgggaggctgaggcaggagaatggtgtgaacccgggaggcggagcttgcagtgagccgagatcgcgccactgcactccagcctgggcgacagagcgagactctatctcaaaaaaaaaaaaaagttaagggccacagagagcttttgtatctatctattggttattatatttattgatatttaccatattagaaatttaaactgagaaatgcaagtgtttattaatttactaaaaataacaataaacttattacaatatgttaatataaataacatttttaatgaaaagtaacgtttctaaaacaaaaaaattaataaagagtgacatcattttgcatttttgcacgtcatttaaactttggtttaataaaacctggatcctcattccactttttcattcagtctgttgcagtaacacacatcaggtagcctctggaatatactgctacatacttctgagaaaacgaacaaaaaggcaagaactatcttagtattcatatgaaaacagttctgacctcaaaccacggaaagggactcaaagacctctcagaggtccttggattactctttgagaactgcagtgctgaggtggtatgcatataatgctactttgcagtacagaaaaaaaatgcgagtacttgtatattcatggttatctttaaaattggacataaattaggctttatgaatacttaatgtacgaattgacattggtacacttatccagttgggctgtcaatcatgttattctgaaggaagagttgagttttacatcttagtgggagcttggtactcccttctcttactgtaaattgttctgtatgactattgttgattactagggatgattgtcttctagaatttagttcatctgatggggatgccttattaagtattttttttttaacctgtagtgttaatgtttggggtttgatcatttctgagacgtttatctaaagacatgtagacagagggttcaaagttctttactgtatggaaaagatgtagaggaccaggtcgattattggcagtaaaattggagatttcccttgcaaaagttgaccatgttgtgctgttatcccaggagtttttgaatgttgaaagttggttatacagtgttttctttctctactttcttgacccagggaattcttagtttctgacaagggtattggtctggctttatagtgattgcgataaagtgattcttcagagctttctgtagcggggtttatcactgatgttcttgttgtaagtatttccctccctagtctatcattttgtctagtattctgtttcagaaaaaattacatgaacacatgaggaattgattcagagagcaattagaataatggaaaagttggtttctaaaccttgtgaaacagaattcaggttaaaactgtacctactagagagatgacacaattggtagtttttttttgtttgttttctttaccacatacgaagccactgtaaaaattgtaggttgttctgtgtcatggggcacgaacaaatataatttacttcagaattggaagtaacttttttgtacatatctgcgcacactcaaatctcatttgaaatacaccttgataacatagtagggaaaaaatgttacatcagtaatgaacctttagtgttattcataacatttgttgagacaatatgccaaatccttttttagcacacttcagagcaacagcatacaactttcatgataagctgaaaactacactgtgttgtcaggtatatagcagaataagcagcttacctattaacagttcaaaattttggtaacattggtatattaattagtattatgtttctgtcaaaccacagaaaatatagaggtgggtaatagttaaatttgcgttagaagaggccttamcaggatctgttgagagcttaggagagacatgtctacatttctgtgttaatattaagtgtaattaatactgtgctgctgtgattttgagaactacaagagattttacaaacaatattataatttattataccctgatcaccttcattctgttcaatatttgcatcgtttattgattacatttcattgctgagtagtttgagctttttattggtgctttttaagacatagataagtaagtatacagaaaccctatattccagtaaagtgcactgtaccagattagtagtaaattcaggaagaaaaccagtgtaactcagcagtggagttaagaattagaagcccgggtttttactagggggtagaggagaacagcagggctcagtgaaaggtggatggccatccaaatacctcttgaaagttataatttatgtttgggtaattgatgattcttggtgtaaatccatgtgggtcaataatcccagttggaagagaccggagagcagtggtatagctggcatatttgacatccagagcagatttttttaaaacacaccctttttgtatagcaaaattattttcagaaataatcatgaaatgagtaatggaaatggccagaaagaaaacttgaactgtatgtgcgcgcgcgcgcgcgcrcacacacacacacacacacatcatataaatcataccagacttttaaattgcattaatatatgttttttgaaatagtggaaaaacttatctgcatactgatatgtcacaataatgaatacaaatgttacaggattttttgttttgttttttgttttgtttgttttgttttgttttttttgagacggagtgttgctctgtcacccaggctggagtgcagtggcatgatcttggcacatagcaacctccgtttcctgggttcaagcaattctcctgcctcagccctgcctagtagctgagattacaggtgcacgccaccgggcccggccaatttttgtattttaagtagggacggcgtttcaccatgttggccaggctggccactatctttaaaagtcttaggcaggtttgtcaatgactattaaaattgatcttcacatatttgtgttcggtagacagttacaaccagatttattcatctgttttcacctacagttaagagcacttttaattaattttaattacaaaatgttgtacatacagcaacacatacacaaataggaagttttaaacatcatactgtgtttggcagcgatttataagcatacttcacaataaattctagaaatcacaatactatccatgtatttttttcagcattgagtgtaatgactttttttttagatggagtcttgctctgtcacccaggctggagtacagtggcgcaatcgcagctcactgcaacctccgcctcctgggttcaagcggtttccttgcctcagcctcctgactagctgggattacaggcacgtgccaccacacccggctaatttttgtatttttagtagagacggggtttctcaatgttggccaggctggtcctgaacttggacctcgtgatccacctgcctcagcctcccaaagtgctgggattacaggcgtgagccaccacacccgaccttgagtgtaatgactttgaaatgcctcagtcaaaattttactgaaatggttatcacctaaaaattcaatgtaaatgtctattatatttgataaccacttttgatattcacgtacaaggaagtacagcttccttgtactttgttgcttagtgatggcatctctataatttttgttcacaggtcttcacttttaaagttttatttatctctatatttgtttgaggccgattctggttgtttgtaaatatttatgccagaaaaaatttatctcagaaaaattggacacagctataattttgaatatactatttaaacagaggaatgtatataggtacaataggattggagtcatgctgagcctgaggagagctgaagctatcctgaacctttttgtacttactctccaaatgaacaggtatatcaaatctgcatgtgttgggaactgactgtataactgggggatttcctaataaacttccaattaagatggattgcttattaaagggtatgtaataaaaatgtgcagatttgacatttttatgttgttaaaactcagcagtaaccacagcaaccccttaaaacttaaagagtattgccaaaatattttgggggcgatatattttatccctgggttttttagaattgcctgtgctcaggccaggcgtggtggctcacgcctgtaatcccagcactttgggaggtcaaagtgggtggatcatctgaggtcagaagtttgagaccagcctggccaacattgagaaaccctgtctgtactaaaaagacaaaattagctgggtgtggtggctcatgcctgtaatcccagctactcaggaggcaggagaatcacttgaacctgggaggtggaggttgcgaggagccgagattgtgcckktgcactccagcccgggcaacagagcgagattccatctcaaaaaaaaaaaaaaaaaaagaattgctcttgcttgatgttaataaaagaacaaaatcaaagtcttgctgttttatttagtcttgatagttcacccacttactgcctgcacctgggtggactgctcctcttgcctcactctaggtatgcagttgcattaaagagcaatagttgaccaatccactagtctgtaaagtctccctctgcaatatgcccagtatatcttaatgcattctgtcatgagtgttcctctatatttcctccttttgactttcagttaaagtagaattataataccctgcttaaaggaaacctgtaataccgaaaattactgtgatatccgttttaaagcctttaagaaatatataatagtctttaaactttaatggccatacatgacttagtttacattgattaaaagatgctgaatgttaaatcactttagatagggcagccaagtttagggatcagttgaaataagtccaaatctttatgaaggtcttttaccactatctattttaacaaatatagggatatattttataaagcaaacccgtagagacagaaagtagattattggctggcagacagcaaaaggaggaatggagagtgactggtaatggggatgggatttgttttgggggtgatgaaaatactctataaagtgttgatgggtgcacaactcttgaatatatcaaaaaccattgaattgtccattttaaatggatggatttttatggtatgtgatttatatcacaaagctgttgtaaaatacacagaaatgtcaggttatatcataaccattttgttgtttacttgccttatctgattttctgtcaagatgaaaactatctagcggcctctgcatggctctgtaaattattttgttgatcccgaatcctaagtttgttcaaaggataggtttagttttgacgtactattttaaggagtaatccagtgggaacagtttaagggaaggacaagaaaagaatcctgcatttgcccattaaataaccaggtgctggctaatgagttaggtgttgtgtacatgtctttgcattctttccattttaaaggtaaggaaactagagaagtttggcgaatggtctgaggtcacacagtgtaaaagtaacagttctgagatttgacacagtcctttgaagagcccatctgagtctagtccacagccccacatggctgctgtgaagtttttgagyagtgagtccttatctaatggaccatttatgtggggagaagactcagtgaacagcttttatacgtctgaagcatggtagcaagtgataactatcaaaataatgtgtacttttggaaggacttgtcacagtttaagaataacaaggtttggttaagtttttgagccatccacagtaatgcagtaaatgtaatcagcatttaaaactaaagatgtctattctttttaccagtttatactccattaaaaattttaactcattaaggattttataaatgctagcattaatattgttttctaattaaatgattttatgtcctggaatcaatttttatttcttgtattgatgtctaggaagaagtgtttaattcacaaaaatgttttaatagccaactgtgaggggagggagaccagaagttcattagtgaggcacagtaaatgtgatgctgaggtatggcacctgtactgctaaaggagagcactggcatggataaaacatttggcatttcctaaaatcacctcctggcctgtctttcaagcaagtgaaaaggaagaagttgtggattgatttgggaagtacatttggaaaatgacctaatgtgataagctggaaccaatagggttaaaaaccctggtgaggtatacagccttgattctaaaagtggaaagtttgagtgaaggctagacccttggaaattgtaggggaggtagtgtaaaatgaagaatacatggccaggcgcggtggctcacgcctgtaatcccagcactttgggaggccaaggcaggcagatcacctgaggtcaggagttcgagaccagcctgaccaacatggagaaaccctgtctctactaaaaatacaaaattagycgggcatggtggcacatgcctgtaatcccagctactcgggaggctgaggcaggagactcgcttagacccaggaggcggaggttgtggtgcgctgagatcacaccattgcattccagcctgggcaacaagcgtgaagctccatctcaaaaaaacaaaaaaaaagaagaataataatacattaggacatgctttatagagtaagttttcagaaattaactattaatacttagaaaattagttctgcccggagtaaatggtaatagaataagggctcgatggtacaattaaagagtgaaaaataatgcagatgaagtttaaaccattgtgtattatattctgttgtgttttttttgttttttgttttttgtttttttttgggacagagtttcgttcttgttgcccaggctagagtgcgatggcgtgatcttggctgaccgcaatctccacctctagggttcaagtgattctcctggctcagcctcttgagtagctgggattacaggcatgtgccaccacgcccggctaattttgtatgtttagtagagatggggtttctccatgttgatcaggctggtctcaaactcctgacctcaggcgatctgtctacctcggcctcccgaagtgctgggattacgggcatgagccaccgtgccccacctatattctgttttcttaatgttcttactgcacatagaaatataagtagttaacctaaaaatggtgttatatttattattaaatgtaatttagcaattccatgtgtttatttggtaaaacatttctttaaattccggaactagaagaaaagtcaacaagattgtggaggagaatatggtatagtaaagaaatttaggaagaagtaagtatgaaaattttgaatttgaatattatgtgcggttttgttgcttatgaaagtacctggtttggaatctcttgaaatctgaagagtaaattttgtacagaagtagatggaactgttttgtaatgtttacattcaaacaagactctgctcagtcggagcaggaaaatggtagagcatctttcccctatttgttttaaaaagcttttcggggtgggatgaggtggctcacgcctgtaatcccagtactttgggaggctgagactggcaaatcccttgagaccaggagttcgaaaccatcctggctaacatggcaaaatcccatctgtaccaaaaagaaaaagctttgtaaattttctctaycttaggagtatttcatattgacaatgccagatttatcttgttttcataccttcctctaagcaagtggaaaagtggttaaatgtttaggtttcaaaaggtttgagtctgtgacaagcaagtggaatttatatggaagtaagctgtatatcaataattaaagggacactttctttaatgaagagatgttgaaaaaaatataggcctggcacagtgcctcacgcctgtaatcccagcactttgggaggccaaggtgggcagagcaactgaggtcaggagttcaagaccagcctgactaacatggagaaaccccatctctactaaaaatacaaaaaaattagccaggtgtggtggcacatgcctgtaatcccagctacttgggaggctgaggcaggagaatcacttgaacctgggaggcggaggttgtggtgagccgagatcgcgccattgcactccagcctgggcaatgagagtgaaactccatctcaaaaaaatatatatgtgtgtgtgtgtgtgtgtgtgtgtgtgtgtgtgtgtrtgtatatatgtgtatatatgtgtatatatgtgtatatgtgtgtgtgtgtgtgtgtgtgtgtgtgtatatatatatatatatggcascagtttcccaaaaatttttttttttttgcacagtgtatgttgttcattttatccacagggcttcagttattgtaaggatttgtggggggaggggtgtttttaatttaattttttaatttaaaaatttactaattttgaaaggctttattaaagatttgcaagttactgatttaaacatagtaactgagcttcaaagacaagatttactctgtggacaagttatgtgataatggtgattctgtataaccatatttctttatcacttagttatatttataatcaaaagttgaacaaagatgtatctcagacagatacaaattaaagttcatttttaaatccatgaatttaattgttttcatttaaaaattaatgcaagttagataaatttgaattagtagataaaacaatcccatcaaacaccattagcattttagagtatttcctttgtctttttttctcctccacttgtgtttggaattttttatgtagttaccagatctttttaatagcatgaaattctctgtcattttctcaataattattgtggaaaatttgagaatatctaataattgccttagataaatttctagaagtagaattactggttcaaaaggtatggacattttttagttcttgttttatagttttaaatttctcttcggaattaaaactcgtccattagatctcaccagcccagtactctttttgctttatgctagtccacatgcatgtccgttggataatgtaagaattttatctccttgtattaatttgtactttgattattgattggtatggttgaacactttttcctgtgtttgttaattagatattgggattttgtttgttaaatgaattgcttctgtacatttttcagtttcattgtacctcttactgtgtgtatgtaccattgattaactcatacacagtattctgctttcaggtaaagtgacatagtggtacttgtttaacatgtgattggctttctttcctcgccccattatattacctgatattaaaaaagtattaacccagacacacatttagtaaattatatattgaaggcataagatgaaataccaggttaagaaaaggactgtacatgatcccttacctagttgttctagcagtagtgttttatggagttgtcttcaggtttaaattagatggataaagcatctttacaggaaagatgattttaaaacttgtttaaaattatcttttgttaagaaatttagcgtgtgctttgttatacagtgtctatgtgttgctaataaacataaaagttgtgttggatttaactatttggtttaagacagtgtctttgatatattaagttgagtatgaaagaggaggaaagactgtagaactaaatgctttgatatttgcatctaacaggaaggagatttgaatactagcctgtcattgtgagtatatatgtatttcttttaggaaacatttctattttttctttaaattcaacttcacatagtaataggagcttaagggaaaattgctttgtcatcttggaggtcatactaccaaaggaaggaatactggaaataatcagtgtaatccgttacaaagtaaatttaggaaaatacattttttaaagtttaggtttcgaaaagaaagggataaatatcccattgagaaagattcagaaagaaatattgcttgagagatttaagttttaaaaagatggcttagattagtatatagtcttctaattcttattgcctcggcaactttatttcaaaaagtagraaaaagcatactttagaaattgtagactctgggccagtttacttttgtctgccagtttttattaattttagaaattgctagtcactaagagccagaacagattcactaacaatttataacagactaycatttgtaaagtatgttatgtctagtgaaaactatataccaaatatttcagaaaggtattgtatatgattgcattatgaatgaattagaaaaatatgggcaggatgacagtattgctaagtggattttagctgactggttataaatacccaaggaatatcagttaaggtcatctttcaaataggtcctattttaatttttagaaaacattgacttggaggaaagcataccaaatgagttcatgaaatttacaagctgattggaatagctggagctacatcaaatagcagaaaatcacttctagacttgctaaataggttgaaaggtctgttagaaaccaacacaaagtcaatgtgaagatctagttttgatgggaatyctggtgaaagcagcctgaagatttcagatgattacaaattggagttaatgaattaagccctattttttttaggtaataaataatgcccccttctccaaagatgttcataatctaattctaaaacctgtaaatatattaccttgcaaggcaaaagagactggggatgtgaataaggttaagaatgttgagacgggttaattatcctggattatctgggtgggcccggtgtaatcataagggtccttatactagagaggtaggagtcaaagaaggaaataaaacaacagaagagatagaaggagaagatgctatactgctggctttgaagatggaagaagaggccatgagccaaaagaatgtaggcaccctgtagaagcaagattagacaagaaatagattcttccctagagcctttacaaggaatgtcgccttgctgatgctrgtgagattctgacctcaaaagtgtaatttgtgttgctttaagccagtaaatttgtggtaatttcttactacagaaataggaaactaatacaaaagccaattcacagtgcaggactacgtccggaccctgtccatttgaggataccatacttaaagggaattaaccaggatcatctggaaaccttatcatttggctaatagttaaagaacagagaggaaatactagttatcttcacattgttttgctccatttactcagcacttatgtgttaggtactgggctaagagatttacatacattatcctatttaatcctaacaatgtggtgaggtgagcccattaattcctgtttttcagattttaaaaatccttggagtttagaaaggttgactaaacttgttaaggtttatgccactggtaaatagcagagtacccatgttactttgactaatccctaaacattgtgaattctgcaggtatcacaggccagataccctcgttcttctttatcttcacttgaaactctttactggtatgagggatcaggatgaatcattcttcataatttttagaggattttgtgtctcaggcttctatatgtcatgcagcagggcagtggtcatatttagacgttttcatagtcattctgctagtgacaaagcaaagagccaagctcatatctactgctgacaagtagcattcttttccactatgcttatcccttctaaagaagtcttgtatttggaggggctgttgttatttttatgcaggaggatttcatggttttctctggctgctttgacactttttattcattcacagataacattaattgtgaatacaggctataatgttgggggagctctgcacctaacggtgtttattgaatacttgtcctctgcggggtgacatagtacgagtcattccatatacaaaaactcatttagttctaactgaaactgatacctatcaagcagatatcrgtatatcctttttacaaatgaggacattatggcttagagaaattaatttgcccagagtcatctgcatggccagacccagattcaaaaccaaatctttctcactctctatagaagaccacaatttctggtttttctcactagtagattttgttggaattatattaaattttgtggcttttagacttgatatataaagctaatagcttttttcctgaggtttgttgactgaaattggatgttggtcataagtaactgaattatctttgaatctgttgtctactctgtgtataatacttatgtgtatctaaacttgattgaaaaacatgaagtttttttctgacatggcagtgcttcttccctgccccccccaccccacccccgctccggtttgcccatgagaaatttattaatggtttgaaggaacctacacattattgaaaggtgactagcagttattttgggccttattttcctcatttctaaaaacaaaataatttttccctgggctgttgtccttcatatttttgaccacagtacacacagtaggaattatgtaattcattcctggatctcaacccacagtttgaaaaacactgctctggattaactccaggattctctctttttctcaaaagaattacgtgtagtactcattaatatctattgtgtatttactctgtgctaggtgttgctctaagtgcttttgtatgtattgtttgtatttaattcttagacttaactaaataaggagggactactgttatccccattttacagatggaggaattctcataggtagcaagtggtagagccaagatttctcgggcagttattattgagcctgtgcacttacygttattctaacaaattattgtggaaaatcaatcaaaatcttagatcaccacaacattatatacttctcttgagagattcctcaaacaatattggtgaccatgacaattaactcttttatttaagattaataaattgcaactttgctttagacacaagtaaggactcagtaataaatcatttacaactaacaagttcattttgttttagagtgagaaaaatataccatgcataaatggaaaataaaacagatatagcaatgagcagtataattgatttttaattaagagaaacaaaagtyggggattggtgtatgtgagagggggtaggagttagagaccaagacatttattaagcactgattattttagatgctttcatttcatgctattaacagttttataaagaaggccatcagtgtttattttaaaaatgggagaatcaggccaggcacagtggctcacgcctgtaatcccagcactttgggaggccgaggtgggtggatcaactgaggtcaggagttygagaccagcctgaccaamatggtgaaacccccgtctctactaaaaatacaaacattagccaggcatggtggcaggcgcctgtaatcccagctactcgggaggctgaggcaggagagtcacttaaaccggggaggcggaggttgcagtgagccgagatcgcgccattgcactccagcctgggggacaatagcaaggctttgtctcaaaaaaaaaaaaaaaaaagggagaatcaggccagacatggtggctctcgcctgtaatgccagcgctttgggaggctgaggtgggcagatcacacaaggccaggatttaaagaccatcctgggcaacatggcaaaaccccatctctactaaaaatgcaaaaatttgctgggtgtggtggtgcacgtctgtaatcccagctactcaggaggctgaggcatgagaatcgcttgaaaccggkaggcagaggttgcagtgagccaagatcccaccactgcactccagcatgggagacaaagtgagactgtctcaaaaaaaaaaaaaaagcaacaaacaaatgggagaatcaaactcagcagaactggcaacagtagagggcccatgtcttacctggaaatatttggatgagtcaatattcagaaataagaatttctgaatgtataacatgctggctatttaaagctttccctcatgccctaaggtaaaattgagttctaaaacataaaaacagtgtattgacctttagtcttgagaaattgaaatttgatcagtattttgatcatctaaataaatcatgctgacactttcttcctaagtcaccacaytcagtattgtagggtcatttaaagcatcaaaaaattgaccctattttagtaatttatatcgcctctaacttgttgcttgggtaggcacatcactttatacctctgtgccacttaatttttttctttaaaaaattcttgggttcaactcctcataacaattatatattagtatattactttctagtttgggtccacattgcaatttttccccacttaacatagctgtacagtcctttttatctttactatctgtacactattcttctgggctaatatatttgaaataattttgttattgttaggtactagttaaaagaattagagttttgggaaatggttgattacagattgaattttaccacttaattaactttataactgagcagattgttgagcctcagtgctatcatctgtaaaatggaatgataacatctgcctcaccataaaggttgttactatttctgtccaaatggacagtgtcaatgtacatgcttaccaggaaagtatatcaattcatatcctctatgtcaaagtatcagcgtaatttctggatttctgtatctgttcagtgaaggcattgctgtaggtatcagggaacttttttgtcttgcaaaaggtagagaccgtttggtgaatttgtgcattaaataagtcaataaaatattaacagcattcattgactgttaaaaggtgattttgcaaacctccaattttgaaaaatctgtatttccctgtagtgtttttcttcgtaaattatatcaaatgcaaatgcacagcttgaaattttaagaaaaatgttggtaaaggagaataaaagtcatcccaaaagaaacttctctggtggggtggcacatgcctatagttccagctgctggggaagctgagatgggaggatcacttgaactcaggagtttaaaaaaagaaagaaagtgatgtgatggaaactttataatgctaacaaataagatataagtaagggtggtcatttataaaaaagctttgaaacatggtcctgtctcctttttatatacgaaacactcagcttgccacttactaagctctcagatatttgttgaattaatgaaaaatgagccaaaaatgcatttctgtttccttgcctgccactcattccttaaccagttggaatttggaatcactttcaaaaactgatgtcacttgcattcacctaattgccaaactaaataaacaagatttgttttgcatcctgattaacctcttgtagcatttggctatgccagatgtctctaatttctgggattctactttgtcctggtgctcatttttgcaggttttttctctgctacattgaaatttttggtatgtatgttgttcttctgttttgtggtttttttgtttgtttgttttttgtttttggagacggagtctcggtctgtatcccaggctggagtgtagtggcaccatctcggctcactgcaaccttcgcctcctgagttcaagagattctcatgcctcagcctcccaagtagctgggactacwggcacatgccaccacacccagttaatttttgtatttttagtagagacagggtttcaccatgttggccaggccggtctcgaactcctgacctcaggtgatctgcccgccttggcctcccaaagtgctgggattacaggtgtgagccaccgcaccagcctggtgtatgtgttcttggtggccttcttactccaggctccttctaatccatcctcatagttctataacctttccatttctagcctggatctcttacacattcaagatccatatttctttctctgcctagatatttagtaggcatcccaaattaaattcagtatgtttcattgttatccctgaatccagacaatatacaggcaggcacagatgccttcctggattttttttttccccctatattccttttcatagttaatggtctctgcacaaatttagtctgtatgcagcattgtatcaggtatgggtatgggtatgttgttagggagtgtgaactttagaatcaacaaatattagttcagatcatggcctaggcatcatctaaaacagatatgaccctttttttttttttttaagtatcatctcaaaacaggtgtaacagatctgccttagttaacatgattaagtaaaaaatacaacatatcacttaaactcattgctgcctggtaaagcactcaaatgttggttacctcttctcttcccaaataatatttttatggaatgtagtaatactctgcagctgtctcagattatggtacctgactgttctcttgctggtcttttgtctgaatgatggttatactgttaggtggtatagtctttacttttaattttttaaatagagactatagagtgtttccttaaaagctacactagtctgtcttgtatgttcatttggctgttaatttagtgagttgcttactgctgaaatgataaagaagtgctttttgggggcattagatgaatattagctctggcttaggtttccttaaaatttactctaagcttttaatgaccagagaagtagttcttactgttgctcatttctttctttctttctttcttttttttttttttgacagtttcagtaccagtaagtatttattcgttgtattttcccaggggaaggagaagggaagggaaaagagtcagtttgtatgttacaaaatcattagaaaatgggaaaggaagtacctggttcagcaaaatcaaccatcaaaatagacgctcccccccacccccacagtgatggggataccagtgcccagtgggcctcagtctctacatttcaggaaatgaggagaagggatcaggaaaagaacagacaggtgaaggctttcttacctagcttctccataaattagagatttcacacaaagctttgatttttagcagtaaacagggcgtcacatttgttcatctcctatgaaataatcttgtggctactttgacataagtttcttgtacctgcatgaaagttccagactgccttggatatacatttagattccctttcttggctcctggccatcctcaccctcttgactttctacgtggaaaggccccttattgcttctactttattattaaagatttaatctatccaaaatatagcagtgtcttaagtgtttggcatgaatcacatcaagaagtggtcttgactcaggaggttgagaacaaggaagggagggtttctagtttcttcaggatttttgcataaatcattgaagagttgtggagacaacccaagaattaaatgtgtgtgggtgtgttcattaagacctatgggtttttgtttttgtttttgcatcccctttcactgtgttaaggtatagaaaatagaacaataataagcaactgtcttaatagattttataacagaatataccttttataaatgtatgctacatatttataaatcatacagtgttgatatttttagaatttgtgtttaagttgaaatatgttaaattgtttcttactggtttgtataattttaaggatttgttatttctttttcttttcttttcttttcttttttttttttaaagacagagtctcgctctgtcgcctggcctggcgtgcagtggcgcgatcttggcttactgcaacctctgtccgcctcctgggttcaagcgattctcctgcctcagcctcccaagtagctgggactacaggtgcccgccaccattttgtatttatagtagagatgaggtttcgccacgttggccaggctggtctcgaactcctgacctcaggtgaaccgcccacctaggcctcccaaagtgctgggattacaggcatgagccaccgcgcctggccttactgtttcttttctaattgcctttcagttagtgagcgttttattctcaaagataatttttttattacattggtaaatgaagtaatacaatgaagaattgcagcygtatttagagaatccttttattaaaatgaaatcctgtgttaatatcttagtgttttctctgttttctgtatcttatggaaaaattatattttctgcttaagtagttatctggttttttattgattatatttggcattccatgccttttctaaaattgttactgatgtctgtagttttgaaaagatgtgaaaattgtctaaatttttaggatacactgctaggtggggctgtttactctgagaaaacactcatattttagtctagcctcttagctagtggtctagtaaaggttcataccctagggctccatatttggaatattgacataaattgaaagaatggaaatgtgattcatatgagtttcataatgttgggatctctgaaacttacttcacaatatcttttggaagtcccaggtaagtgtatgcttatggttaaaccaaacaaaaacaataatttaagaaggtagatatgtttcttaatgtcaggattttatctttataaccctctatggactctatgttttggttggatttaaccctttgggggaagtatgtggttaagtctcatggaagcacctgatggctgtagatttactgttgtgagatttgttaaatttggttttccccttttgtttgtgttttttggaaacaaagtcttgctctgttgcccaggctggagtgcagtgatgcagtcttggctcactgcaacctccacctcctgggttcaagcagttctcatgcctcagcctcctgagtagctgggattacaggtgtgcgccaccatggctggctaatatttgtatatttagtagagacattataggatataaaaagtaacccccccatctatggaatgttaagctgacacccaagacagtcaaagcctcccataatacaacatcccacactctgttctggttgtaccaaaaaataaagtaaacaaccagtgaatgattttacctcttaaaaaaaagcatttatacataaaaaatgggatgaactgggattccctccttaaaaatgtttctagacctactaaaatcttgcatttacaaaatagttgataaaaatactcctctggattgaagagaggggagacagagaccactgataagacatggtatgtactgagtagacttggcttctttctctggcttcatcagaggctggactctcattggttttagtttctccgttttctgcaggtaaatctttagtttcttggttagtcacttgagtctgttttctctttgctccccctccctttcccttttgtttgcacatctttgtctaaggatttatacttctgctgccttttttcagcctcatttccacttttgcaggagcaggtttagctgacagccatgccgattgcctcttgggctyttccttcatttcactaccccttcgccacccctttggcagagctaaccttcttcttgggtatcacggcaktggggagggtgtgtgctgggtgcctggccaccaaagctcttcctgctgccctagctgctaagacccccctcaccaccccggccccgtttgtattttccaagtggtgatgtagatatgtaggaaaggtgcttatttactagccaaatagttaaactttactttttgtttgttttttgtcttttaagctcttttcgcttatggatatgaaacctcccatctctagagccaagatgattctcatcactaaagctgctattaaagctattaaggtaatgataaaataaagcaatttgagaaatctttttgaaattttgaaaatatttattacttttaaacatgagaagtcaacttgtgaattagttcaggcytaaatcaaagagccctaaccagcctttgctgaaggtrcatgataagcgtgcatttgcattgtaacatattgtttcaaagcagtgtggttttttggtgggggtagggggatagagtctcactgcgccacccaggctggaatgcagtggtgcgatctcagctcactgcaacctcaccctcccgggttcaagtgattctcatgcctgagccacctgagtasctgagattacaggtgtgcgccaccacgcccagcctcaaagcagttttttaaattttcatttattccttatcataaaccaactatttagtttcatttttatttaaagagaaaaaattcaagctccatgaagttaaatgtcttacccaaaatcacactttaaaatgtgacttattttagaaactacattgtttagctctaatccattggttttgtcccataaggttgccaaatattctgcttcatgaaggtttattgatttaaaatttaagaaaagggatcttctgtttggggaatttttgtagttttctgtttttagtttatttttctctgagttttttaatattaaattttttattatgtatttctcatggttcattcagtattgataatatttagattgtatagatttcagagttttaagaattttctaattataggaaatgtagaaataagtaaactgaacagtaattttctcttaattcttttcagctttataagcatgtagttcaaatagtagaaaagttcatcaaaaaggtaactatctctcattataacctcattttagttacaatatgatttgtaatttactttgtaaattttaatctcaatgcttgtttctaaaccacttcataaaaatttagtcactagaggttctttttaatcactagaagtttataaaaacacatttttagcagtaccattaattggtacttaacttactgtgaacttagcactcaactcacagcagtttcttatatgttggttatgacccttccctaaacctgaagtgcttactctacccccttgccctgactgctgttgacatttaggtgtttaactcacctttgagtatttcaaatgaaattactttgtcaaattttcccaatttttcccttttcccatcagaataaaattattttcagttcagctgtctgttgttttataactgtgtgattggcacacatctgtctcagtagaaaatagaaaacagagactgagacatctttgtcttaacccctgacctggagctgtgacatgtagtacctactaatcagtgtttataaaaatgtctctaatccatggcccttgtatactggcttaggtataaaagttaaagttccaacaggcaaaaaagatggttagtaaacgctttgcatagtagtacatcaaagtacaaataaataaaatggaaaaaattacctataggcactgtcaacaaattaactgcaatatttattaatacatttggatttattttttatgtacatgtacatttataaaagtaaaaatggacataatactggttgttaggctgcttttcccactgagtttatcrtaaacagttgcaaaatactcctctgcggttgttacagtgatgcacacagccattttctgagttgttagacctaattttttttttttttgcataaattcctagatgtagaattggtggattaaataagactttgcttttattgctaaattgtcttctataaagggttatacctgtttccactaccaccagaaatatatataggtgtctgtttctctgcttttctctgctgttgtcagttcggttagccaaaaactacttcttgtttttaatttttatttggtactgtaatagaattaaaattgatatgttaaaaaatgttttgttaattttgaaagataaaaattacctttttgagcagggtgaattgtagagactatcataataagtgaatttatatggaactggcttaaggattggtaaagtaatgtcgattttgggacattgggtgtagggaagtagagaaatcaaagaagagtaaaatcttgggggtcagtagtatcaagagaatggtagttccattatagacatgggaaatttgacaagttagccatttagagagctgaaacattcaagtagtttttaaacaaaagcaatcattggatggatatataaaagtttcataaatgtgaaaataatgggtgtcagattgtgactttgctttttctgtactgatcttacatctttatccttgcagtgtaaaccagaatacaaggttccgggattatatgtaattgactcaattgtgcgacagtctcgtcatcagtttggaactgataaagatgtttttgggccaagattctctaaaaacataactgccacattccaatatttatatctttgtccatctgaagataaggtataattaatttttaaactaaaacttgtattctttaaaaaatattattttaaatgtatgttagatatttggagcctactatattaccagataagattttcatgtagcgatgtctgtgagcttgaaacaaaacagtttttttcttcagtggtcatttcgtgtttattttcttatgagttcttcaggattatcagtcatactgttgaaatatgacaggaacaaaatttatagaatcaaagagtttaatagtggttgccagggactaggggtaagggaaacattaggagctgctaatcaataggtatgacatttcagttaagcaagatgaataggttgtagagatctgctgaacaaccttgtacctatagttaacaattctgtattgtacacttaaaaattggctaagtgagtagatctcatgttaagtgttcttaycacagtaaagtaaaatttttaaaaaataatatgaaaggcgcatcatctttaaagaagatatcgttggaaagatgtgcttgtgtagttgagtaaggaagaaattgtgcagtaggaaaagacagcgatcatctgattgtggttattccagaaagaaagagccaataatagatgttcttccccaacatatagagatactaaagtttaagtggtattcattagcaatcagactacagtatttrattccttatatatacagttggctttacaacatactatataaaagtagaaaaacattacagatatagtagctgactataagtagataggaggaattatactagtaaacatactcagaataatgaagaacggagacatttacaataaacagcatataaatttcagtgtcataggtgctgtttttatattcttggaagaatgctcttgtgggaaaaatacacccaaaaccaagatgattccttgagtaaagataaaagttgtgcccatgaataacatatattctctggatcttcatatttgcttggccacataatttaagttttgactacaggccagttgcttaaatattttagctgttataattactctgaagaaattctccttcatttacttcaagatagcttttttttggggggtcagtgatagtttatttgtaaccataagtaaaataaaatgaaaatgtcaaataataaatttctttttattgtctgggtctatagtccatctctgttccttactctagatgataccactgaagaaagactaattagtttaaccaggttgtaattctgatttttttttttccttgtttatgaaacacacatagtatggaaatattagcctagggagttttcctctcttttttttgtaagagtataatcggttatttatgcaaatatttattgtatatttgtgtttctcatgcgtaacagagtaaaatagttcgtgtgctgaacctttggcaaaaaaatggagtgttcaaaattgaaatyattcaacctcttttggacatggcagcgggaaccagtaatgcagccccagtagcagaaaatgttaccaataatgaaggtatggtcagatgtatctgtgagctcacacaatggtatgattttttgcacatgaaacagtcagagtttatgtgtattgaaggaatttttctataagaaggaaacttgagtttacatcttggaaggtatgattttctttccataattcctatttataataaaggtctgctcttctggtagttgttacagtataaactctagtgccacaatctctatattttatactttgttaaattggataaaatgttattttagcaaagaagcttaattaggaaaacttgtaggttaactttttttttaggccttaatgcccttttcttttttaggctcacctccacctccagtaaaagtttcttctgaacctcccacacaagccactccaaactccgtcccagctgtaccacagttgcccagctctgatgcttttgctgctgtggctcagctgtttcagacaactcaaggccaacaggtaaactgtctactcaaaagtgaaattgtttgcaggactaggtactgttgtcacttcttgttttctattcttcattaataagcacattgaaaggagaaaatacrtctgcttttcaactagaaaagccttcacaagagaagtaatgtaggaggaacagggaaaatgtagaagtgataaacaagggaacaacacacttagaaatgacagtacctctttgaagaggactttagaactactaagtggctcatgttgctcacaattctagcatttctgatggatttcaaaattatttttaacggagagaatttttccatttttctagaaaacttatgcttactttgttcacaattcagtgtattttctctttttttgaccatcatatcattgacattgtcagcatacatttttaaccttaagaaatgcacattatatctctgtatattcattcacaacaaatttaaccattcataaaaggattttttccccaatttgttctgtgcctatgctactttgaatcacctttaagacatttttttattaaattaacttttgatagtatgattatactttgttctgtgatttattggttttcccattctttaagcttcagcagatccttcagacttttcaacagcctccaaaaccacagtctcctgcccttgacaatgctgtgatggctcaggttcaggctatcacagctcagttaaagacaactcctacacaaccatctgaacaaaaagctgctttccccccacctgaacagaaaactgcatttgacaaggtatatttctctcacataacccaccccaccatttatatcactcaacttgagttatggaaattatcacttctgtatcccttctgtggattgttcattatgtcgttttgtaatttgagagattttccccctcaacaagaaaacatcgattattttccctggttttaaatgtgatatgtgctcagtgcaaaaatttccagggtttgaagctgaatttactagtgtaaaattaaaaaagtgaaaaaaaaaaaaaaaagaaaaagttagggagtaaaggaaacagaaaattcttcattaaccccaatacttggggattactgtgtaacattttgccttacatcttttcagaattaatttcctacagatacatgcttttctttaattgagtataatacatacccacttgttttggtgttaatactcttgtatcttttttgttgttgttaaggttaatagtggatttagatctacatttttactgaatgcatgtaatacatagtattccactacatgggcacattacagttcagccattccactactaatagacattcaaattgctttcagttttttgctgttaaaaaaacctgacagccaagtgtggtggctcacacctgtagtcccaacactttgggaggtcgagaacggaggatcccatgagcccaggagtttgagaccagcctgggcaacatagtgagactccgtctgtgtttatttatttttaatatatatgtgtgtgtattaataatatataggtattatttttaatatataaaaatatataaaattatatattatttgtgtgtgtgtgtgtgagtgtgtgtgtattttaaccttagttaccatatatataatatgagggtttgggaaccagctgggtatggtggtgtgcacctgtagccctagctacccaggatgctgaggtgggtgggttgcttggccccaggaattcaaagctgcagtaagccatgattgtgccactagcctgggcaacaraatgagatcctgtctctaaaaaacaarcaacaacaaaaaagaggatttgagttaggtcagtgtctcagctgctctatcgggcctataggtttcttaggcrtgtttaagaagctgccactaaggatatggatatgctgaacagcttaragcttctcattgaaatttaaccctaacagctccactcttgtctgttttatttggtttatggctttataaaacatcatttgacttttcagttttcactgcaaaaaaactcaaaagtttgaaaatcagaactgatgcctttggtttcatcatctttaaaatatctgattctttccaacatcctaactataaaaacagaaggactttattgccaatagtctaaattaaaaatccacctagtaaataccagttttcattatatcttagtgatttatgagtgatgactgattaaacaaaagttggatacatttttttgagtaaaaaggaaatatatacttgcagaaaaaaaaaaaaacaaataatacagaaagttataaaataaggaaagaattccacactgcagtttgaacagatttgttcgtgtatattcttgcactcttgtttgcatgcacatacgaacataaactcacatatttggttttcctagttttttgttttatgttgtgattaggaaaactcctcatttgtattagaaaagatttctatattctagtaaggttttttttatgattgtctgttcagtccctctggaatctgttttagaatatggttgaagatagttaaaccattatgtttttgaaaatagccagttctccctcactacttttttatacactaaattcctgtatgtttctgtgtcttatctctggacactgttctatcccactaatatatttgtttatttctgcatcataataattcttgtgacagactgtctttcatttcctggtatcccgtctctccccctcccacttcactctttttcaaactccccctcatactttttcaaactttgttcatttatcatgaagtgtattagtcaagagttccagggaaacagaaccagtaattgaatctacatctgcatctgtctatctagattcttgaatgaaagatagatttatcttaagaaactggctcacgcagttgtagggactagcaaatttgaaatttgcagggcaggtcagcaggctggaaattcaggagttaacattgtaggcctgagtctgaatttgcaggatagcagactaaaaactcaggccagggtttctctgttgcactgctgaggataattccctctatctcagttcttattcttaatgccttcaactgattgattgaggcccactcattattgagagtaatctgctttactcagagtctactgatttattgttactttcatctaaaaaacaccttctcatctaaaaaaacaccttcacagcaacacctagattagtgtttgactgtacagctgggtactacataacctaggcaggttgacacaaaattaacagtcacagcatacttttccagatgaactggaaaactctgtacatttctatgtcagtgtatagaattcctttgaatttataggtaaatttaggaaaagccatgatggtgagcatgtttctcttattaatgtgaattctaattcctctagtatttaaccttaagtggactggcccataagtttagaaaaaggaattctgtgcttttcttttgactaaaaaggtctgtttcaagcttctcactggaaataatttgtctgtttcagctactttatagatcttcagtttcctaaaaagcaactaaaatttctttttgggtagaccccattttaattttttaattgctttaagtattttaaagcagtattcttcaaactttaaagaacatattaatatgtaataaactgtgaagatcataggttttgttttttataggcgactttgaccagattttaattttggctccaattacttacagactgtcctgttgttgaattaatgtttactgttcagtagtgtaaaataaagatggtagtaaaaatattttattgttgccatgagggttaaataaaaatatgtaaaacagcaaggtacctgggctgtgatggttcctgttcagaaaatactaacttgctcatttgtaagaactttactcacttggcctagaactacaaagaaacataagttagctctatcccaaaacacactttacacttagtttagtcctatatactgtgttgtctaaggacagaacttttcatttgatttagaaatgtgttgttcaataaagcaaaaccagaatctctaggcagaactattatagaatgacaaggttcaggaatttaaggttgaagtctataagcagaatgagcacggcttgaaaggaaagattgcttattgaaagccagagactgagggctttgaagtcaaaaggactagtgtccgcatcctgattctaccattcactgactgtgcaatcttaatcatgtttcttaatcacctgagcctttgtttccttgtctgtaaaaaagaagaaactatctacattgcagtgttcttgtgatgaagtctatatgatctgatacacattagtaggtatttaagcattatcttttttctgaataaatcttacttaaaattgttcttctagatatgtgatctcattaagtctcttgaatttttttttacatgaaagtttctggtaagctgtgaagttatgagaaagaagcaagcgaacctcttaggaactgctagtgacttttttgtgtccttgccattttttttctttttttatattagtatattcttgaggaagcagtatatggacacttttctatatgcattatggtgattgaataagacagtctttttgtacattttatgctgactgaaaatgtrtacccattttcatgtgcacaaagttccagacatttttaggctagggaaatgagtattttagaaaaacatgtatgctgctaaattacttgtgaaatacaccartagaaaatagaaagcactgtacttacaattgaggaaggaaaacagaatgaaaacactgtgtgttttccaaactggcatctgtgtaaaaattgtttatatctacaaaccaaggtcctgaggggcataagggaaaataagattgtgcttgacaatgtgggtttctagatggtggtaaacatcccttgttttcatraagttttttgtgcagtgaatcagtctaaattttaaaatgaaatattgacataattattccagaagttgcttgatagatttgactatgatgatgagccagaagctgtggaagaatcaaagaaagaggataccactgccgtcaccacgacagcacctgctgccgcagtaccccctgcacccaccgccaccgtgcctgctgctgctgcacccgctgctgcctctcctcctcctccacaggcaccattgttagtttttttttttattcctcagcagatagaaaattggtaatagttgtaaggcataacctaagtaacatttagcaatgacaacaatgttctatgaagttgttttgtaaaatttgtggtattagttttctcttgaatgaggaagggatcctcttaagatttaaaaccaaaaaatggcttttatgttgggaataatactgagtttataaattaaatttaatatataggtaaatatatggttcagtaaaatgttaatgactcatgaacaacactctgtttctgtaatttaagtgtggctgagaagcttgtgcttttgaatgggtaaaagattatccacctttttttagtggctttcctggagatggcatgcagcagccagcatacacacagcatcaaaatatggatcagtttcagccacgaatgatgggaatacaacaggatccaatgcaccatcaggtacaagcatttttcttgcagttcaaagaaagatctattcattatagagcgtatggtttgcattccacagagcactctgcagctatgtaattggctaagtcgtactatatctctgataaaagctgttgaacacgtaactattttgagttgcttttttctgtaattaaaacaaggatgccaaaatcacatgctcatattttaataataggcatttttttagttaaaataatgtagagattacagttctatttgaagaaaccgacctgtttagttatacagctttttcccttggaagggccttccttctgtattttgtgtggttagatactttagagggctctgagctctgaacattcaggaatatagtttgaaatccgcaataaaaggagcatacatagcacactggagagttgcaggaagttagtagagataaatttgttccagtaaattctctcattgagtgtttcttaaacttgattctgtatctaaattatggggatggggtgggaagcatttttgttatttcaagtgtttaacaattactgaaagttcataaataatttagaaagaatacttaaagcattatatttatagttttatttgtgtttaaactgacatgcagaaatatgttagattgtagtttactttcattattattatgatactttatttgaaactctaaaagttgggtatgttagttgaaattcccccttgrttatttttttttaaagtaaacctagaagtcattgcttctagatagccagttttcctcccaaaaggcttaattgtctttaaagctgaaaagagaccatttgcaatggagtacttctgacttgaagttcagtttatcacattgcttccttatgtaaatgaaggtatttctttaaatatttaaaactaaacctgtgtgttcataattttaaaaagagttacaggatttttaacctatatacttggtatgtaacaattcttgcgtggaaattgtacatatggaaattgttaaacaatgttgaatgtcgttgtaacttttccttgatcaaactttattgaggatattttagttttatataactaaaggttttccaaattattttgatagctattactcatacactttctttaaaaatgaaaggttccacttcctcctaatggacaaatgccaggatttggacttcttcctacacctccatttcctcccatggctcagcctgtgattcctccaactccaccagtgcagcagcctttccaagcttcttttcaggcacaaaatgaaccacttacacagaagccgcatcagcaggtaaaactttattctcagatagttttatctttttttgttgccttgacttatatgcagatttctccttatttgcttgctgtcttcatttttgaatatgaagaaagacctgggtacatattaaaccctctcagtgctccaggtttttcatctggaaagtggacatgctaatactgccaacttccataggattctgtgaggtttgatatagagtgttgaaggcttaactagtgcctacttcactgcattagataatggtttattaaaatggtatgtaatttaagcaaagtaactttaccagaagtagagaaatatttcttttaatcttttaaacaatataaaagtggtttttgtttttgtttttttttcccagtgatggccagttgttactagtaatttggtcccaggcaaccaaaagagaattgcttcagggaaggagatttttaatatagcttttgttagattttgtcctcttgcttttatactttttaaatttctcattttatcatggtttttgttttttaaggaaatggaagtagaacaaccttgtattcaagaggttaagcgacatatgtctgataacagaaagtcaagatctaggtcagcatccaggtaatttatagaaaatgttttttccaaccctgtatatcttaggggacatagaaattaaaattagattgggttattttcagatattcagaatgttagtaaaataacagttggtatgtttgtatttgtatatgtgtgtagaagggggcaggtgaagtattgatgtaaaaaaaaaaactacatcattcatcttactttttttccctatatttaagttgctcagatgtaacggaattttgaagatataattctatacataggtaatcagtatgtgatattagaagaactatattttcaaagttccattacagctttatcagccagcaaaagtggaaagatcacagtaatgctgtaatcagagaatgtttttaattgctgcagaaaakactttactaagaagataggtaacagtagtagcagtgtatctcaactgtgaaaattagctacttaaattacaaggatgtaattttatatagtaccagacggcactgaagatgacagatacttatataagctgtcaacattgtgtattttatttaaataatgtgcatgatttctaatttgggacatactaaatctgtaaaatgaattctcaggtattgcattcttacatacccaaacattaaattacctagtttttgttctgttttaattagtatgtgcttatattttctggtttttgtctatatgctatgcattctcccttctcttgaaaacattaggtcaccaaaaaggaggcgatctagatctggttctagatctcgaaggtctcggcatcgacgttctcgatctcggtccagggatagacgccgacattctccccgatctcgatctcaagaaagacgggatcgagaaaaagagagagaacgtcgacaaaaaggcctccctcaagtgaaaccggaaactgcaagtggtaactcaacctttatattcaaacctcatgtactattttttcatgtcttgggtttaaagtgttttataactgttagcaaaactataaaagaaatgttaccactgtgttgatttttatttgaaatattgctttcttgtgccttgtttattcattgatgtatacccttagatttgctttcgtaccttaaaccagctataaagcagcagtaaggagtgaaccaaaaatttacagaatgtattcacttgcattattttctgaatctcatcagatgtcttcagaatacatttagtaaggtgtgctagacatatatttgatataaatcagtaactattaagatgactaagattttaatttataatatgactagggcatatgtaagatttctgattccataaggcttatcacctaggacacaacataaaagaaaaaccatcaacacttaagagtggagaaaggacagttacatgcaagtgaacaaagcactgagctggttggtaatcaagagacttgagctccaatcctagttctgctgttcattggcagggtgaggtgggcaagttattgcttccctggcttcagtttttatagatgtaatctttagatccatctacaaaaaaaccagttttttccaacttttatgtatatctttcactatcccagttctctttctggaagtactaatgcagttttctagaatttttaaaatgtatgtgagatttactatttaaacttgtggtgttgtaatatagttcatgaatattttgtgtaatgattttttaatgtaagctacagtgctgctcattatcaaatgtgaatctctttatgattgtaattttattttaagtttgcagtactaccctctgggtggggcagctggacaaaagaactactcagcaggatgttgccagtctcttggaagagtttggtccaattgaatcaattaatgtgagtgtttattcagttttttaagtacgatggacaggtgtgattaatgtcattttatgaaatggaggacctgagaccaaagttacaatttgcccaggtttatagatgtgactagaatttaggtgttcagagtccacgtttagaattatctgtatttaacatttcttagaattctttgtatttaacatttcttggataaccaagtttaatttcaaacatttctaggtaagtctttatataacaaagcttggaggactcagttgagaccaaacttgaattgccaacttagaaatgaatttaaccttacattatatagcatggggtgagggatgggattgttggaactgcttacttggtgttgtatcttgttgcttttcaattttgttatcttttataatattaaaatgttttggagcagatgattcctcccaggggttgtgcctatattgttatggttcataggcaagatgcctatcgtgccctgcagaaactgagccgaggaaactataaagtgamccagaaatccataaaggtacagtcttacatgttataattaattttttttttaaataggcagaaggggaaaaatatgtggcatataaaaactaatttgggtcttcgaaatgactttcaacactgaggcatttcatgtgcatctttttttttttttttttttaaagaatatttcctaaaagaactccagtgtttcagcataaaattgtaaatgttacgtgcatggtagaatttgttttgttttgtttttcctaaatgtagatgggttcatcatggtaaattagtgctttaaatataatgtcttttagcaatatgttttgtcctgttcaaaaaatttggatactgtatttttaaagtttgccatcttagaattaactgaaaaatattcaccaaaggtggagaaaaacatataggtatatgggtatttttcccctaaggagctaaagtcagtgtttcttcagtgtcttaacaccccattctaccgctggattgcactgcaaaaagattttgtctgatgttaagtaattacaaggcacccctagacttggaaaagtagtccccagtatactactaggctattcagggaacttcagcctttccctgttaaactttttccttttctctaagttttatgttggctgggttgggtgagagttggtaaggagaagatgccagtgaaatttccatcctaggacaaagtgagaattaaagggtaaccagttctgtagtgagaataaggctttgaatgagatccaagcctagctggtccagattgctcccttggtgcccgagtcrgaatggatagaatgatagagaataataccctcaagacttacgaccttgctttgttttctttttatattttcactaatggtgaaatagattgcctgggccttaaacaaaggaataaaggcagattataagcagtattgggatgtagaacttggtgttacttatattccatgggacaaagtcaagcctgaggaactggagagtttttgtgaaggaggaatgttggacagtgacacacttaacccaggtaaagcagtatttaatttctcttacagttcacttatttgcttggtagtacatatgacaaatcgaatgtcctgttccttgcattaggacgtgatttttgagattttttaggatccctcctgtgtcagtatctccattataaactgagggttaaatagtgaatgagacaaaagagatgcaaacacaagtgaaatacttaactgattatgggatctatgaattacagaattaagtagaacttttcctgtgaaacttaataaatcatataggtcttaactgagcatctttggtattatgtttttttttatttattttttgaggtggagtctctgtagcccaggctggagtgtagtgatgcaatcttgggtcactgcaacctctgcctcccaggttcaagccactctcctccttcagtctcccgagtagctgggactacaggcgcgtgccaccttgcccggctaatttttgcattttcaatagacacggggtttcaccatgttggccaggctggtctcgaactcctgacctcaaatgatccgcccacctcgacctcccatagagttggcattacaggcgtgagccactgcacctggcctggtattgggttttaatccagtgcttcatgataattaccttggaaagttttagatgtccagagaagcaatctaaagtaaacgtrtaagacaatgaattgcagttatttgtgggcataaatatttaaaatgccagattgacagtgagattgcaggggggaaaatcrcagaatgcatgggcatgacctggagattgctagacagaggaacaggaggagcataggatggcatggcagtatagaatgttttttgttgtttttgtttcgttttgagatggagtcttgctctgtcactaaggctggagtgcagtggcatgatcttggctcactgcaacctgtgcctcccgggttccagtgattctcctgcctcagcctcccaagtagctgggactacaggcgcgtgccaccgtgccatgctaatttttttggtattttttttagtagagaaggggtttcaccatgttaggctggcctcgaactcctgacctcaggtgatctgcctactgcctcagcctcccaaagtgctgggattacaggcgtgagccaccatgctcaccctcaccgccctcagaaagaacatttaaaggaagcttcaaggccaggcacggtggctcatgcctgtaatccgagcactttgggatgctgaggcaggcaggtcacttgaggtcaggagtttgagaccagcctggccaacatggtaaaaccccatctttactaaaaatacaaaaaaaaaaaaaaaaattagctggatgtggtggcgggtgtctgtaatcccagctacttggaacgctgaggctggagaatcactggaactcagaagatagaggttgcagtgagttgagattgcgccactgcactccatcctgggagacagagcaagactctgtctcaaaaaattaaaataaaataaaggaagcttcaagcaggagtgacggtttcagagccaaaaagagatgaaacaatgctgtactattcccacatcccactccctccctggatgtacaaagccttcatctaaggatagagctagatttgtgttaaggcaatcaggtattgagggcctactatgtgctggacatctgggaggcgctagacagtggtaaaaagaagaagatggtgtaatcttggggctcatggtccagtggagaatgtattgaaaagctcaagaatataggagaatctgatggagccagagcctcagaggacggagcagaaagacagttttgttttcacttgactagaagatatgtggaaataggtgggaagtttaagttattctttaatattagtgaaatgtgttcaggaaatattgggtgtttcattatcctttatttctaatactttaaataatacattcttgtggttaagaacatggactctagaaccaaatgtgtctgagttgaatccgtccctgccatttaccaagaatgtgatcttgggcaagctgtctttgcttttctcatttgtgaaatgggaataatagtagtatctacttgtaaatggttrtgagaactaaataagctagtataaatagagtgcttgtgacagtgcctggcacacagtatgcattcttttacatgtttctattgttgttaatttaaataattactatttctaaaattagcatgggaatttctttaataactgggctaggtttttataatcaacatttttcatttctagatttaaagttacaaactgaaaatggtaaactcttgttaaatttctttcacgctcacagattggaaaggaattcctaagaagcctgaaaatgaagttgctcaaaatggaggtgctgaaacctcacacacagaaccagtatcacccatacctaaaccattacctgtgcctgtccctcctattcctgttcctgcacctataacagtgccacctccacaggtgagaatattgggacatgacttaaactttaagtgcctgaaaggtccctttctaaatcttactgtagatatatgtctggattcatagtaaaaaacatgagtacatatatgtgcatattacatttttcatgttttatcagatttaaattttatattcttcactttttttttttttttttttttttttttttttgagacagagtctctctttgttgcccaagctggaatgtggtggtgatgttggctcactgcaacttccacctcccagattcaagccgaccctcttgcctcagccacctgaatagctgggattacaggattacaggcatttgccaccacacctggctaatttttgtatttttagtagagacggggcttcaccatgctggccaggctcgtatcaaactcctggcctcaagtgatctgcctsccttggcctcccaaagtgctgggattacaggtgtgagccaccgtgcctggcccataaatgtttatacaaccaaaataaatgtatattgtcttacatctatccatccagattattcagtatcaagtttcataggctctgcctactttttttctgagtcttcattcttcagggactttgtgtcctgaagaaacttggatatgtacccaataagctgctgctttgagggacagggattttcttaattttcaccttggatgctatccttatgaaatttttaaatggattgaaaacttcataataaatgccatttaacatgaagatgtgttcttattataaaatatttgctgtctagtcagccaacctgttacttgaaaagcaatactagattctggtagaactgggtttaattctcaactctgttgtttatattcagcagtatggtatttggcatgtaacttcacttataagcttcagtttcctatttgtaaatgtgcaaattccctttcctggctttggcattcctcatgtgttagagttgttttgagggttaaatgagataatatatgttaagtactcagtatgttttttgtcacgtcataagrgccgaaaaatgaaaaaccctttgaaaattataagaacttgacccatagttctatgtgtgatctactggatttttcttgtcttccttcctcagtttctcacattaaatctgaatcagataaatctgagctatcatgaaagtgaattgtgtcttcattttctcaatgtgaggggaaaactgtatgctttggtacattcttggctgtgatttaaatggactcccctagttggcaaactcttcagctgaccttctggatatgcccctccagtgcaggttctaagcaaaattcaatgtgtgtcagcactcatttacagaaagctgcctgatctgttcagatagtggtctccaacctttccggcaccagggaccagtttcttggaaggcaatttttccatggactggagtggaagatggtttcaggataaagctgctccacctcagatcatcaggcattagttagattctcataagaactgcacaagctagatccctgacatgtgcatttcacgacagggttcatgctcctatgacaatctaatgcygccgctgatctgacagaaggcagagctcaggaggtggtgcttgcttgcccactgctgtgtggcccgtttcctaacaggccatagactggtaatggtccgtggctgggggggttgttaaaatttatcttaaaaaaaaaaatagctaacgtttgttgggtatttaagtgccaggcaccagcacttagtatgtattaactcatttaatctgcataattatgtgtggttggcactttgccgttttagagaatttaaatagcttgctcaaggtcacacagctaactaaagcgggtgggagaagcagacagtttggctccaggacctgtgatcttagccattgtgtaaattgccaagtagcctgtcttaaagctgtrttgctgaaaggaccatggaacattttaaaatgtattacatgatgtcagaacaccaataaacactggtgaaatatagtgtgaaattgctgtcataaagtgaagagcgcaactttgatttctttctttctttcctttttttttttttkctttttttttttttgaagaccaagtcttgctctgtcgcccaggctggagtgcagtggtgcaatctcggctcactgcaacctccacctcccgagttcaagcaattctcctgcctcagcctccggagtagctgggattacaggtgcttgccaccacacccagctaatttttgtatttttagtacagacagggtttcgccatgttgaccaggctggtcttgaactcctgaccttaggtgatccgcctgcctcggcctcccaaaatgctgggattacaggtgtgagccaccacacccggcccacagctttgatttctatcagttggtatgaatagaagttaactaccacctgttatttaataaattggtctaataagcacaaattaagaaacatctattttttcaacagtttgctcttttatctgtgcttactgtgtggatgggagggtgtctagataggtggtttattcttttatctttctttctaggtcccaccacatcaaccgggtccacctgtagttggtgctctccagccgcctgctttcacgcctcctctgggaataccgcctccaggctttggtcctggtgttcctcctccccctcctcctccaccatttttgcgcccaggattcaacccaatgcatttaccaccaggtacactaaattgtctgtgaacatactttagagcctgcgatggagtgatacagcataagttgacattatttttcttattctaggttttctgcctcctggacccccacctcctataactccaccagtatccattcctcctcctcacactccaccaataagcatcccaaactgtaagcatgtttttttctttgtgtttgcttatcctcttggagctgggtgtaggagggagagtgaagcggtaataggatctatagtatggcataagaatgttgaccgggagataattaattattcagcttcacatgttgatataattatattccttagctactatcgctggtataaatgaagacactacaaaagacttatctattggaaatcccattccaacagtggtgtctggggctagaggaaacgccgagtctggtgacagcgtgaaaatgtatggctctgccgtgccacctgctgcacccacgaatctgcccacccctcctgtaacccagcctgtttcacttcttggtaagttatttttttttatcattagttttccttgccccaccccccccccacccccccacccatccccaagttagatttttttaaaaaaacaatgttaattttggtaaaattatttccaagactggcttttttggttgttttgtttgtttgtttgtttttgaggaagatcttcctcttaaagtcaaatatgtgtacttgatctttaccaagagagaatctcaaagacaaaatcatgtttgtctgtcttgaataaaagtttggatcttcacatccttatttggtatagaaaaatgattaaaagtaatctctgtgcaaaggaattggtacagagttcgtaattcacttaaccttagtctcttcccagcttttaggagatacttctttaacggcataggtttttctctgtctggaccaattattatctatctgaaacccctggacttgggtagcgttctttgtgggctagcaaagaaatcatctttgatacattccaataaaatggytttgttttctaagtaacagttgcgcagcctgaggtaccactttcccactcactctcagtttacttggctgragtttatctgttgtactttttacccacaacttcaatactgtgatcaagggcgatgtgacttagatcttttacatctttaagcaggcttactcttgcctgcttaagttatgaataaatacatcacatgcttgttacagtagaccatcttttaaattaacaaattgttgtatttgaagtggtattgccaaatataattaacacttgaatcccctaaytggaagttaatatcttgagagtattacagtgttctagtcctgtgagcccatagtatttttcaaaggtatatgcatatgcctgtttgctttcataatctgagttgttttaggaaagaacctattgattacctctgagatgtaggactgtgagacattggtttgtaatggaggacttttacttttcacctatgctattcagtactgttggaattttttattttttgcatgtactatatttataataaaaaaacaatttgtttttaaatggtatactgtattctgccctcccctagactaagcttaggctgataatagccttgagtttatttcccttagtacacagattgggtaatggtaaaagaggatttgggattaaaatttatcacaagtgatacaggagtgtagttaccataatgatggaaaatgatttgtttaatgaggaagttgcttaagaggtctaccttccaatggaagtcatatcatagaaggaacattggactaggaaccagggaacatctttgcatcttttttgttatgcttttttttttttcatattaacatgattgcacaagaatcacagaatctggatagcaaccccttcttcacatcccacatacacacccttgattatgaatcctaatctaaggtccatggatgttagactacctgaaactatttgtaaaattgctgcatttgtgttttttactgggtttaataaatttattgaatgagtgaaaagatctcatgaactccaggagtttaataaccactgctttcaagcaactgtgaagcgtagtaagtagcctgcctgtgatttaacatttaggtcttgaagaccctgcctgttatttcttatcactactgaacatacaatttaacctctgcatccaacatgtgcaaccaaacacagatgagaagtcggtgagcttggaaaaacatagtaagctaggcatggctagaaaagtaattaaattctgaatcagtcgtagcgtttatcatcacctgacatactgtttgcatgtccatcttcctcccactagatggacccatgagaggggaacatttgttacatgagcgggtggttttcaatgcaggactgttcatattttacttctgatgattatcttcgttctaaaacagaattttaaaattgaaggctattctaaatccagaagggtttagaatttgacataagaaaagtgaaaacaattttgttaaaataagcactttgaactaaaatgcaatatgttagttcagtcatgagaaagaaagccttccatgtgccttcagtcagcagtcttgaaaagaatatcacaggaattttgaccttatagaggaatgagttttaaatgtgtatgcaagttaagaagggttcatctaagactaaccagttttatcattttgataaaggaatgtggtgaccacactgcagtattgcagtactaaaggatcagtaattaggttgggataacaagtgatggaatcccagaactaagatgctttggtatttcctcttggtgctctaatgttttcttttaagataataaaaggaattgttatgctcaccagaaaactataagtctagaagttgatgctaaacttcagttttctcatctctaaagggggagaaaaatgacaaacacaatggtgtcacgatgatttaatgggctaacatctataaaacacttgctttggggcctgctgtagggcaggcacttagtgagtggtgggtgcttatattacaggtaagaaatgtcatagatgttatttataagacctagagaagaatatcttttgcaattctaaaattayattacttcatctgtgattcgttttaaactgttatattggcagacagaggaagcaaacttttttttttttttgagatgtgtctcactctgtcgccaggttggagtgcagtggcgcaatctcatctcactgcagcctccgcctcccaagttcaagcgattctcgtgcctcagccttccaagtagctgggactacaggcgcgtgccaccacgcccagctgatttttctatttttagtagagacagggtttcaccatgttggccaggatggtcttgatctcttgacctcgtgagccaccgcacctggcctactttttaggaaaaaatttatcttgacatagttgcctcagatattttcgagatagattagatcataaatttacacatattaaagttccatcagttggcttaatgagaaaatgtgtcagtttagtgataaatagcacacctactagatatctgtagtttttccagtgagcgagacttaactgagttcttggatcttaatttgtgaaatgtggcaatatttttaaagtactaggcaccaaacagttgttcagtgggtctccaaaaattctgtagtgaagcctgattatactggaaagaggcagtgggtgccttaaggatggtttggttgtatcatcagacttaagtgcgggtgttagtttgggagtaattagttgagttgtactactgaatttggagggaataaaaccaacttttagagattttgattcttttagtaatactgataatctgaaaatataaaattacttgrtgcgcaataattattacttgattttaaagaaatctcacacacccaaatagctacagtggtggtagtttcataaaagctaaaggtaacattctacagttgttggtcayttaggagagaaggaatattrcaaatgatagcaattcagttcattctctttactgtataagtgtttgtgttttacttttcaaaaacttttgtataacatgtatctctaatatgtacaacctatttttattaaaaagttcattgtaaatgtaaagtttgggttactttggtgttccaaacaataaaaaagaatacacaaaaaaatgtttgtttgtgttacctatctgtactgtgttaccagtatatccaaaatatcttttcaagcaaaaactgttctaggtcgaactcattccttttatggaaaattaaagcctcttgacaagtatgtttattcattaattatcaatatgaagagattaccaccagtttttgtcacactactgtagctgatggtaaaatttataaataagagttgagtatttgtaagatcacttcctacttgtaatttttgttaccaaaggttttaaagcaagagtaacaagttggtggcctgtggctaaattactaggcagtggtgtgctgcgctgcagtcctggcatggcttcagtagacatttgagttgatgattccagatttggacacctcaggaaattgtggggacagaattggtttgtgaattatatttaaacaagcgcaaatgtttttatgctatcgttatgatccctgaaactgcctaaaagatgaataactttgccagcaatatcaataggaatttgattttgatgatttcacttaagtttggatttctttgcccagtttctgtctagaattttagattttttagtagctcatttttagcaacacttactagaatattaaagcaccagtctactagtaatgcactagttagccactgacattaaaaggaagcctgaagaaaattctagaaagtagagttttcaaagtactaacataatacgtaattttttaaaaaacaatttttgtgttttaattttgtttgaattttgatgtttggttacattaaattataagctagagtgatatatcaggtatttaatttggtacccaaaaagcctgtttacttatcctataaaagtgttcttctttgaaagctttaaaatatttgaattggtactctaattattgtattaatgttattccactagtgttatatagtagaaatggttcttaaatacgaattacagtaccttcaacttagtatataaccttgttcattggatacagtggataatgcaaaatagtgattaatctagaacaaatacttggcgtggatatgaatttacacatgaacacaccatagtttctcccaaggcaaagcacttcaaatgaaacatggagaaagtcttgcagaaaaccttgaaatgttttaacacattgtctccatttctcctgggctgtcacttgttaggctgctccagagtgcaagtctgaagaatggcttaaatgtaaatctctctgagggacatcttgaggaaggtgggaggggcagtaactctgggctctagattgattttggtagacaaagttaattgctgtaaagaatttcaggtaagatttttttccggctaatattgaaaataaaattgcctacagataatctcattcagtgatagaaagttaactttagatttcaagtttattgactctaatagtgaaattttaactcatagctattgcactttgtcaattatagtaacatacttaagtaattattattatgctaactgaaattccaaaaagcaaatctgtaggaagttgaccatgcagagcctactgtacattattttgaaaaaaccaagcatttaaaaaaggtaatcattctccaatttcacttataattctgtttttcatgtattagatgttatcaaaatatacccttatgccaaaaatagatgagtcacatctcagtatatctgcattatatattattgaaaactcaaatttctcttaagaatctcttgctaacattctaagcatcatttttaaaatataatcttaatgtataatacaatctgaaagatgctttttctcattctttgaaaattggctccttattcttccattttccgcagctctcagaacatrgtgccttctataagaataacccaggagtgttttcagaataaataggcctaaatgttattggtgaatctatgcaaaggaaataacatgttggttgtactgttatttcagttttctgcaggtctgaaatggaaaaaggataatacttgctgattaaaaaaaaaacctagggatatatgcttagggatcttcaggtattgatgaaagagatgagtggttgatacatctttttcttcatgtgggaaaagttcatgtttagttcatgcaaagtgccacagtgacactcattctgtrgagatcaaatcaaaacggtggaactgcaacaaagaacagaaaaggaggttgaaagaaaacatcctttctcaaagttcaagtcctcctaggtttatgctgggaagattcttaccaccctgggaaaagacctggagcttgtagcctctattcttaattccctgagaggtatcttctccttgatgagtttggtcatcacctctgcaaacaccattcactcatatgttcaataaatatctaatcaataaccattgtgtgccaggcacccttctaggtatactagaaataccagaatgaacaaaacaaaacctgtctttctggagtttatattttcgcagacctgggctaataatttaacatggagagtaaaacaggacagttaggcagtataagggtgtaacacggatatgtacaattttaaatacgattgctagggaaggcatctgaaccagtaatgaagagaatatccccatgtaaatacagaggaaaggaatgtagagtgaggaccaaaggaaagggggcctgaattgagatggggcatggattgttgaaggaccacagcaggaagggagagcaaagggaagaaagtggcaggagatgagcttagagaaggttgttgagcactaggctttgagtgcagtgggaaatggtgtagagtcttttatccatgccatgatctgatgtgcagtttttaaagtattactgtggctgttagagaaacagactctagaagttggtaagagtggaaaggagaccggttctgatgctgttgcagcagatgagatgggagctagcccacgttgggctsgtgcaatggaggtgataagtggttagagtctgaagatattttgaagatagagccttcagaattgccatattacttaaatacggaatgcgaaaaagagtcaagaatgactcgttttttatgtgagcaactggtagatgtaattgccattcctgtgatgcgcaaatctgtaggagtgggtttgaggggagcctatcaaattaaaatgttggatattctaactttgatacccaggtacagatgtcaagtaaactactggtaacatctaatagagctgcaaattctggcatcttcagcagataaagataatatttaaagccgcaggagcctgtgagattacctaaggagaaaatgtaaatagagaagtggtgagaggtctgaggacaaaattcttcagcatttggcagctaagaatatgatgctgtgagactaaggtagacatagttccacgtgccagaaactcttaagcagtttgtgtatattaatcatttaacccttgcagccctcagggttatcttcattttatagatggggagactgaagcacttggagatgaaataaccttccaagggtcacatagctacaagtagccgtgttagaattcaaggtagccccactccaacaggagcctgtgcttttgaccactatctatactgtactctccagcaaaggatgctgagaaggtacagcccgtgggctaggataaaaatgtagagggagataatctgaaagccaagtagagtttctaggcaggaaagagggggagagaggtgaactatcagatgacactgatggatcaagaaagagcgctgcgacttggcagctggatttagcaaaatgaaggctcctggtgactgtgagaaaagtgctttcattggattgatgagttcaaaagcccagttacatagggttgtgagagactgggagatgaaggatacaattaggattttgaacatctcaggagatttgctatagaggagaaaaacaagatggggtgatacctgaaaggagatgcagggtgagggagtttttaatttttgttcttgtttctgaaagatgggcaaaaactacagcatacttatgattgggaagcccagtagaggggagaatgttggtgcaagcaagaagggctatgtgctcggttgttatgtaggtgagaggggacagatccagggtacaaataacaggtgtaaccattggagcacggacagtcacagacagtaggagtaatgtggattcaggtgcaggtaaattggtagatttggtggcatgtgggtggatgaaaaagtctttttctaaagacctttttaaaaaaatgataagccaactagggtaactaaaatatggtatattcatatcacggaatattagtaataaaaaatgaaggacttaaacatgcaacatggatgaaccttgagaagatacgccaagcaaaagtcagtcacacaggaccacatattttatgattccatttatacagaatgttaataggtaaacccacagagacagaaaacattatgtggttgcttggggctgggacagatgaggggaaagctggggaaatagagatggcccacggatgcaggatttccttttagggtaataaaaatgttctaaagttgattgtgatagttgcccaattctgtgaatatactaaaaccattgaatagtacatttatgtgggtaaattacaggatgtgtgaattttaccttactgaaattaccaaacaaaacaactaagagtagacaggatgaaggaggaccttgaacatgtgtcctcatccaggacatgagaatgtggattgactaggaaaatgttagattactggccagaatgaagggtccacttgggttgtarttacagaaatttgaaatgagagcagtcagcatactccatgtccaggtggagattaggcagaagagttgcatttaaaaccaatgttggggattttccaggcagatatggtgagggagagccatggactccagagcaggtaaggattaagataaaaacatgaagggccttgtgaggcatgagcctggtgggattgaagattgtttggggaaaggagatctggagagaataacctggaaagaggagaagcaggtaaagagtggggtacttgaaattgggaatttggaagtaatgactttattagtgatcaaacatctagagctcctagagatggtggctctggtagaatggaagatagggttgttgaccaaaacaggtagaggaactgagtcgttcctctttttctgtaaagatctcactgaaattttgcatcctctgcaaaatcctctgcaactgatgcagttggtcactcccacaatatttaaatcagaccttttacattttatgttttatatctgtctccctgactgcgtacactctgtggtccttgacagaaagccaccctattcattatatgccttttgtatcccttatgcacattctccggagatttcaaggtccacgttggactccaactatgaaatcaaccttcctttctcccacctcccccgtagccctttaatgtacttgttctttatttcacaccatttcaggcatctttgctgtagatggcaatggtgtctccccacccccttttgtaattgtaaatcaactgttttttggatcgtcataggaaatatttacagattcttggttatttttagttaaactccagtgtgttttccatacttcccaaatttgaattcaggcacttagagccatcactgttttggtctgccctaatgcctcgctgtattaaaaatttgtttcccaggtctgagcccttttttgtttcacctatattccgggggagttaacaccatcactcttctgatcttgcgttgacagctgcatccgctcagttaaggcagagagctgtgttcctwcatcgcttacaccctgtccttcctgtccactaaatgtcttcagtgtgtcctccatctctagcacctctcacttcagtctcttgtcactatcactgtcactgctggattctccgaataagtgcctaactactctcgaggggccttcccctcttagctatcctatacactacttgccagaaggatctatcaaaaacaatcatagaatcatttatccctgctaaaaattacttggttttctgcaccactagaggtcaaagtccaggttcctccttatggcatatagggcctgtgaattgccctgacttatctctttagcttcataaacctcatctgtattttctcctttcttcttagttttcatcaagtcattttattgtggttctctgaaccacacacaccactgctttaccttgctatatgccttttcaaaagctgctagtaatgtcttgatagtaacgtccttccttaactcactggccttgtgcattttcctttgagatccrattcagacacccccgatgactgccactcagattcacacaccagctttatgagtcccacctctataccaccatgctagcttgtgccatctcctacagcaattgaaatttgtctatttctaccaaactgtcccttttgaaggaaaggactattaaatgagttaatagaaaattcagatatttaatacataatatgaatgaattgggttttttaaaaatttataactttagaaaactcatcagtgatatcacacgtcatatttccaaatgaaatgaacaattgctttgaatgcccttttcacctgggtaactcacaatatactgatggtttatgcctaatgccagctttcctaataaggacttcctagctagcatgcttgccagtcttctgccacctaatgtgtttttaatataactggttataaaagcattacatgttcactgcaaaagggaataaaaggaactacagataaaattttttttgtggtctgaaggccatctggggctatgggcatattctatcaggaatctataaatttagttggctctcaaagggttaaaaggaaacccagctggccacatctttttagctttatttacgaagaagggaaaggatttgagtgtataatgttttaagcaaatcccacacacaaatatccacatgtatcaaacaagtaggcaattctttataaaaattgtgcttttatataaggtttatatgattattgtaaattttaaccctgttaatttataccctcaaatgaatgctgtaaagtacttaagagatgtggtccttcagtctggggtttgtattttatcatcagggcccattttctctcttctgtacaaagttgaggtggctttgcatcctttggccactgtcagatacttgaggaagccaagtcaatggggcatcaggagtaggaccttcccattgcccttcaggaatcactttccttttgaagactcatctcaactaaattctcttgttataataagatgctttgaaactgtttcccccgtttttctggtgttatwttataatttggcttggccacttgaacctatagataggcaccagaatgtkctatgctgacctccgttaacagtaaacattggtcattttagtcctggaaaacaaatctttactgataaaaggtaatgggaaagtaaagttcagtttgtttcaggtgtttctatataatgatccctctattaaaagagactgtgcctgggcatatacattttatgttttggattaaagtccacaggtgttggaactacactatttctttacaaagtgaaagcaaggacatgtgcttctgttgccccagtgtatggtatatactcggtaaatatttcccaaatgatgtgaagagtgttttatttctatctgagatacagtgtagctggtgtcctgtacttgttcattgggattttcccaaagtgtctgaagagcctgtgaagggacagagccatcacctcatccatttcacaatttctggcgcttttgctgtggtaatcagcatttcccaattggtcatttttctgtcagtgtcacccaagtatttttcttaccattgctaactgatcataacccataacttgctcaaagacctttctgcagcacatgggtaaatagcatgttcttaacagtacctggaacattttccattatcagaataactcctttcaatcatagtattatagtatttgtcttatttatatttgcaaaaggataaattgagagattccaatgcttttctgtacctaagtggtgaaccccaagcagaaaatgacaggttgttgaacttgcgtgactcttatatcagtatgagcaaaccctcatgtagataggaaaataaaaccaagaagtcattgttatttcagcagcaccaaccttaccagacttgccacctttggaagaatgaatagaaataatgaatagaaggtgaacagctgaacattgagcattattcaggtcgtgatggcctcgcaagttaaatatcatgctgtgccttgaaaaaggaactgtaacagtaaacttcacatttgtgtatggatctttgttttgtagacattagtgtttatttgatgcacattgcatagtaactgcatgaggcattttaataatatggactaagtgtagcatggagtcaaagagatcttcctctttcctgggttttctaggtcagtgacctcatttttttctagtaataagacggggtgtaaattttctaagtgtgcacctgcagtatgcttagttagcttgaatagttactgatagtgaatgtatttatctcattaggacttagcacactgtgtttctcaaatgtatttggagtgggaagacagcttctaatgaaagctacaggagattttgacatactctttgaaaattggtattaccattactattttatttcccagtttattctggcctctacctgtattagatactttaaaaatgtctttgcaattgcttgccttaggttgttacyaggcctcacactgggtttgtgacagagtggcaaactatgaaatttgaagattgtgggttgaattttattttgctttaagcgccacagaacacagctgaaactggagtgccatcttcggtggtgtttacatttttatttttgtcgtcttttaggcactcaaggagttgcccctggtcctgtaattggacttcaggcaccatctactggtcttcttggcgcccggcccggtctcatcccactccagcgccctccaggaatgcccccacctcacttacagcggttccctttgatgccgccccgtcccatgccaccgcacatgatgcacagaggcccaccgccaggaccagggggctttgcgatgcctccacctcatggaatgaaaggtcccttcccaccgcatggcccctttgttaggcctggtggaatgccagggctcgggggcccagggccaggcccagggggtcctgaagacagagacggaaggcaacagccgccgcagcagccacagcagcagccacagccgcaggcgccccagcaaccacagcagcagcagcagcagcagccaccaccatcacaacagcctccaccaacacagcagcagccacagcagtttagaaatgataacaggcagcagttcaattcaggtagagaccaagaaaggtttggaagaagatcttttggaaatagggtggaaaatgaccgggaacggtatgggaaccgtaatgatgatagagataatagtaaccgtgacaggagagagtggggaaggaggagccctgaccgggacaggcacagagacttggaagagagaaatagacgctctagtgggcatcgagacagagagagagattctagagatagagagtctcgtagagagaaggaagaagcccgaggaaaggaaaagcctgaggtgacagacagggcaggtggtaacaaaaccgttgaacctcccattagccaagtgggaaatgtagacactgcttcagaacttgagaagggggtgtctgaggctgcagtcctaaagccttctgaagagttacctgctgaggctacctcatccgttgaacccgaaaaggattctggctcagcagcagaggctcctcgttagagactggaatttgtgaaaatgtgacagtgacacttcctggagtgtagagcttgaggtgtacagatgctgtattatatccgctcccgctgtactgcagccccgcgccagctggtggggaactgtaagcaatttgattgcttcccttctatttaaaaatagccacaaaataacaaaaaatactgaaaatatgaataaatattaccctttttgctgtaactttttaaaagttttgactttaaaaagtttacaaatcgtaattagaagtgctctctatttttttttttttttttaatttaagacaaggtaacggtgaaagctcctcaaaacaatagggatgtttttaataaactctattttcgtaacaaactttaatgtgtgctattcttcctacactgcattaaggtggaaarggattgttcaccgtcaaagtttgagctgttaatactgtattggagtctaaattagacttatttgatgaaaatagacattttatgtagttattctcactttcatatgtaatacttttgatttttagtgctcagtcataaggtaaaggttagttgttttaatgtcaattgaaaagctgtgtttgcaattcaatcgaggttttctttttttttccattggctttgtggtatatgttgccctaatttgtaaggagattttgctgggtgaaaagttggatcccagtgttacacgttgtactataaattatcggactgcctgggtattacgttagaaggttgcgtgtgtgtgtgtgtgtgtctgtggtttttttttttyccaaccatcccattgaatttttcaaaagggtaaaagaatcaaggttaacatttgcaacctaagagctttttgttgtgtttgaggacttcagtgcagcctactactgtttccttatataagccttgcctgttgcctttcttcaccagcgttttaattcccctgcggggcagaggtaaacgaacttttcccccacatatacgttctttcttttgcttaaagttggtgggttaaataggaaaaatcgttgtaggttatccaagaattatcacatgaaaacatctaaagccaagtcaagccttcatctgaaattgcaggaaatccagtgccaagacctgatgtcacactatccaagtatttatggccttgaagttgttttgaattactttttcaaactcctggtttcagtatgctgagcagttaactttgtctttgccttcatcctcaggcgaagctgctttattactctggtttttaaataatactcagcagcaagacctttggtttgatggggagaatatatctagggcaatgtccttatattcctgcctttagaaaatgagagaaaattgttttatatttatctgtaaatttaaattataaaacttgtccttaattttacactggcccactgagaagttttaaagtcctaacaaatggcttctggaagaaaacgtgattacccaacatccagacttgaaggacttacagcctgtatttccaatttaaagtattgggaccatcctatatgcacatgtaaaaactggtagtgtaattatatttgaagtttcaaaaggcataagtgagtctctaattgagttattccacataggcaacaaactacattagggaaatgtgttaaatactgctttttaaaaattctctactgagatttaaagaatggttgttttaaccacttactgtgaacatactgttgtttaccataattttaaaactttggaaacactacagatttgtcttccaatttagcttttcctctcctaaatgatctctcctacatttgataaagtacatatttatgaacaaacagcatttcacttatttctggtttatcagaaataatattctacaatttccaattgaataatttagtcaaacctgagttaggttaacattgaaaagcattctctcaggtacataaatacattaagagaaagtgactcatttcactaattcggtgtgtaaattatttctcaacagccagaacccacagtcaaacatttccttggttccatcttctaatgctacagattgctttaaagggctaatctgtaagtaggttgtgccagcgtctacccttgaatgtagaatttgtgccattctggcaggtagataatcttactagctagctgaggctgtaacttgcctttcaaagctcactaaaaagttatcaaatggctctcttacatcataatgtctttttaaaatgaggaggtactttatgaatcaaaatgctaaaatgactaagcaggaacatttccctaaagctttcaaaggacagcctatttgtctaagcagagttgtgttagttttagctaaaagacctgctgttttaaagtatgcattttgatggtctcaaaacactttcaaaataaaatgctatcactgttagtattactaaatctgttccactgaagctgtttatataaataagtatcagagctaatttagtttgaatttggattcttttaatagcctcataataagtgccatacagggtttttattcacaggcttgaatgacaaagaaattctgacaagtttaatacccatctgtgatttaagtctggcaaaatacaggtcattgaaacagacattttaactgagttttataaaactatacaaatcttccaagtgatcataaatcagtttctcactacaggtactttaaagcaactctgaaaaagtcacacaattacacttttaagattacagtgtttaatgtttatcaggatacatttctacagctagcaggataacagatgagttaaggggcctcagactacatccaagggaatgtttattgggcgatcccaattacaccacaagccaaacgacttccagcgtttcctgtctttgtactttcttcatttccacctttgcccaagtcatctgctttttcatggacctgtaaaaaattttaagaagataactttgggctgtcaagtaatcactacctcctcccaacaatacccaaaagatgtttaagaacctcataatattagaaaaataacattaatcctagtagagagatatactaatatttagtagtttaaaagtagaaactactactcaaagctttttcttggtgttgcaaagacattacctttaaacattaggtaagtgttgctgtctaaatgaaatactaaaacccaaataactatgttgtagaccaccacacgctacccttaatcctccatggtaagttacagtaaccttagttccgcagtcactcttactttggcagtttttttaattgctttggaaaaaaaggaaagtgaaagtgaataaaactcaaaatttcatgccaaatgaatgacgggcctataagtaaggtataatcctaaaaaatcttaatactttaagcaacagtattttgaattttgttcaacaaacctttataaatgatttttctgctttacaactatggctcaagaaaaaccataaaaataaagggttaactgaatggaagtgactactgaatgttaatgccctcaaggggaggtaaaagagagcctgtctacttggtgttttgcaagaaccagatgcagttccccaggataacttgggacaacagcttcccacaagttaaacaagtcatgataacctgcagtcctgaatgaacatgaatgaacatgaatacttaagtccatcccaggttttaaacttaacaaaatgttctgtttaacaagtgagaaacccaatcctggcaagaaaatctggccattttaaaactaaagactacttctgttttccaaactcagatctaatatggtcaaatgtaacctgctttttactgcatcttagcagaacagtgttcttaactgacctagataaaataattcattttcaccgtaattgtccaataaaattgcttttcctaatttgaactgcaagtacagtttatctggatctttagaaaccgcgactaacaatcaaagtgaaaagatacatgactgtatgttagaagaagttttatgcatatccttttatgaaaacttaccaccagtgtgcggccaatgatgcaatggtctcctgagagtgagatcacagaatcttcaatagacacatcggccacaccatctttgtcagcagtcacattgcccaagtctccaacatgcctaataatgaaaaagcatcagatggattagggctgatgccactaaacatcaaggtagttcatgagctaaattaaaacttgactgagtagacacaaatttgcaaacaagtagctaggcattctaaatacagctcttcaaacaaggcttcacgtctacacactaatgctctgggaagaaagatggggctgcacctgatttcagaagtaccaaagggtaaactctcagttactgagttatgcctgttaattactggcatagctaacaaagctatgtcccaaggcctctgatataaaaatcttgtccttaaatttaatatttttctgaaaggctttcagaaaacatacacatataaatggagtctcgactagttttcagtatcaatttttttttttatctacagaagcttcctatgtttcacaatgatgattgattttgctagtggttgacagtactgttcatgacatttcctgtattagttcccctttggcacttgtattagttctatattcaataaatgctacaaaaccaaatcgttttaagtgtccccatttgtcaattcctttaagcccaggaagtaaaagcattccagcatttgggagcaggggtttagatgagtcagcaagttcaaaagcaaaggtgggggaaacacggaattatcttagcacatatttacaagtagtataccatatgaactccagaaagctatcgccattattacaagagttaagcatcttgttacctctcttcatcctttggcccaccgtgttttctggatagaggattaaagtgaggacctgcactggtacagcctatttataagaagaagaaaaaaaagctaaattatgaattaaagttcccaaatacattctaaaaagaaacactgctaaaacttcccatggagaaagtgctgacctgcatcacgacttctgggataagcaacaccttggtacagccacagtgagaagggaacagaaacaagtctatggccaggcatggtggctaacacctggaaccccagcactttgggaagctgaggtggctggatcatctgaggtcaggagtttgagaccagcctggccagcatagcaaaaccctgtctctactgaaaaaatacaaaaattagctaggcgtggtggtgcgcacctatagtcccagctacttagtaggctgaggcaggagaatcgcttgaacctgggaggcagaggttgcagtgagctgagatcgcaccactgcactccagcctgggcaacagagcaagactccatctcaaaaaaaaaaaaaaaaaaaccccaccaagttctaactactgtctgacacttgtaaagttaacacccttctctgggctttggcttcttcactgtaaaaataagggaccagactgatcttcaacagtttttctattattaaaatcccatggttatgatccaaattcttaagaacgtagtatactttacaaaaaactcatctccccagcaacatatgccaagcagttctatctgtgccctttacttggtgcaggcagaatattcaacagcatcttatgtgcaagggccaaggctgctgccttacacaactcgagggggcggcattccaactgtatcctgtgtagaaggtgctgctgtgcaccaggggatgacattcacagagcacaacctcgacagcacaggaggccctttcataacacggctgtcttcagccacgctctcacccgcaggagtcccacacagggagaaaggcaggcaagttacaggaagcagcagagcaatcacctcccagaccagaggcggtaaagccaaaaagcaactcgggggaatttcagcaattacagaaatggatcaaatctgatcattacaaatcactatttgaaactaaattagcaagatgaataaagttaatttaagaagaaatctataaacaaaaaaatcagattattactcaaatatggcaaaagatcactaaatgcaacttaactcataaacttctgttaacttgcttccaatcccaaattaagaaaataaaatttggcagtttctctgaacctactctggttcaggggttgcctgattttttaaaaatactttaaaaaaattttttttaagcatattccaaagtaccaataatcctctgcattccatcttcagtttgtatcatactttggtcccactaagaagcctgtgtttggggtgtagagctactcttacatggcattatgcaaataaatgcagcccctttgctcgaggcacccaccctcaacccccagctcaaacacctgggatcattacaaaagttaagagcccaagtttttatttcctatttgccttctttaaaaaacaccctcttctggctgggtgcggtggctcatgcctgtaatcccagcactttgggaggctgagacaggcggatcacgaggtcaggagagagaccatcttggctaacacagtgaaaccccgtctctactaaaaatacaaaaaattagccaggcggggtggcgggcacctgtagtcccagctactcagggggctgaggcaggagaatggcatgaacccgggaggcggagcttgcagtgagccgagatcgcgccactgcactccagcctgggccacagagtaagactccgtctcaaaaaacaaacaaacaaaaaaacaccctcttctacaatgatgctgtaagacaaaacatcaactctttccctttcttttccacacctaggtatcaaagcccagttttgtggctaatcttaaggttgatcttcttctctttttttggtttctaaagacacactacaccaaatcttaagacaaagggcactggaccttcagaagcaggtccaccccag

SEQ ID NO: 96471 - DNA, 22521 bp, Homo sapiens
agatggggtcttgctgtgttgcccaggctgatcttgaactcctgggttcaagtgatcctcttgcttcagactcccaaagtgctagatttataggcatgggtcaccaatcctggtcaagacatgaattctattttttttgacagggtctcattctgtcacctaggctggagtgcagtgttgcaatctcggctcacagcagccttcacctcctagcctcaagcgatcctcccaccttagcctcctgagtagctgggactacacaagtgcactaccatgcctggctaatttttgtatttttagtagagatgaggttttgccatgttgaccaggctggtcttgaactcctgacctcaggtgatctgcccaccttggcctcccaaagtgttaggattataggtatgagccactgcgcctggccttttttgatttttttgtagagatgaagtctcactacgttgcccaggcagtctagaactcctggcctaacactcctcttgcctagaccccataaagtgccgggattacaggcaagagccattgtgttcagctttttttttttttttttttttttttaagataagctctcactatattgcacaggttgtagtgcagtggttattcacaggcacaatcatagcatactgcatcctcctctctcagcatcccaagtagctgggacttcagtcgtgtaccactgcactcagctttcaagccttatttttattgtccttagggtaatgaactctcagcaaagttagccctcattttgtcatagttccagcaaaagtccaaagattaatatttggcctgttttgagtttcatacctatgccgaaactccttgtttttggtcagagaattggagtgctctgattggccaggtctgaataaaacccctggagttccaagtaaagttagcctcttttgaagtagtggaataggaatgagaggggcccggcatggtggctcatgcctgtaatccccgcactttgggaggttgaggcgggcagatcacttgaggtcaggagttcgagaccagcctggccaacatgatgaaaccccgtctctactaaaaatacaaaaattagccaggtgtggtggcgtgcacctgtaatcccagctacttgggaggctgaggcaggagaattgcttgaaccggggtggcagaggttacagagagagggagaggggagaggggagaggggaggaaagaaagaaagggatgatttgcaaatgaaaaagaggcttctcttaccagaagtgtgctgtgcagggagaaccaattggtgtcctctaccgtaccttcctgggccagctaaacccaggacacatagcctttccttgaagtcagatcattctacataacctcagtatgtgggaagaatcagtctagtcacttttgcttggtgtggcaacagactgaagtttaatttttgttgatgtaggtgcttttgatagatgcttcctaaaattttagttgagaattttcttggatgttttaatgatgatgaagttcactctttccctctctccatttgttgaaaaagtacaaaaatatttatacataaagacccaagtattgactctctttaaagatgaaattatcccactaggtacagtggctcattgtaatcctagcattttgggaggccgaggcaggaagattgcttgagtctaggagtttgagaccagcctaggcaacataataagacaccatctctaccaaaaatataaaaataagcctggtgtggtggcacacacctgtagtcctagctactcgggaggttgaggtgagaggattgcttgagcccaggagctcaaggttgaagtgagccaaaatcatatcactgcactccagcctggatgacagagcaagaccttgcctcttaaaaaaaaataaataaataaaaaacggttcattagaagccatattttagctgttctaattctatcccatctccccagtattagcgtgagagaaagatgcacagtgtggcaggctccttagctgttttgttgttttctttctttcctcttgttttagagacaggttctcactctgtcacccagtctggaatacagtggtgtggtgtgatcatagctcactgcagccttgaactcctgggctcaagggatcctctcacctagcctcctgagtagctgggactcagacacgtgtaaccacactcaactaatattttaattttctgtagagatggagtcttgctatgttgcccaggctggtctcgaactcttgggctcaatccatcctcctgcctcaccctcccagtgttgggattacaggtgtgagccactgtgcccagcctccctcagctattttctgattgctaatctgtagattattttaaaatgaaataatagcttaatagcttgatattgcatggtttcttcctttaggctcgattttattctccagccaccatatttattgatgagatagactccatctgtagtcgccgagggacttctgaagaacatgaagcaagcagaagggtgaaagcggagctgctggttcagatggatggtatctgtgtttagcttgagttgaacagggacgggaggttgttaggtgtggtgtctccagttccagtgggtcaaactttactcatagtgctaacccaagcttttaataggtattcttaacttcagatggactagagggggtggcaagaagttcctgatagtgatagtaatagatttggtacactgacagtggtgacaagtcagaattaatggccacacacagggcacccttttggtatatacaactatcttactttagctatgaaattgaaataaaaataaatgcagataaattggccttagagtttatgtacgctttgaaaaagatttaaaattgttatgtatttgagatctggcttttcgattaaatctattttgagtcatatatttgcatactacagaactcattttctttggattacaaattcacataggtaccagttaacctaagtcttaaggaggcattaagactgtgcttccttgtattgttgtactaaatagttgttgatctttaaatagctgagcttcatttggtataatccaacttaatatctttttcactctccccttacccttattttaggtgttggaggtacttctgaaaatgatgacccttccaaaatggttatggttctggcagctactaattttccctgggatatagatgaggctttaagacgacgccttgagaaacgaatctatattcctttgccgtcaggtatcttcctttcaatcttgtcagaaagcctgttaactttcatgtagttttgtttagagaatttaaaatttgttattaactaactttctggaagagatacatgaggagtatcttcctttacagtactagtttggctatatgccttaatactaaatagtaaggaattaaaaagtaaagaatggctctttacttaattatctcttcttagagatccaattcttactggaagacaacatctcacacaaagaagatttgagacaatagtatactatgtttatgctgcaggcttacattttaaaatttgtttctaccattagcaaaaggcagggaggagctattacgaataagtctacgtgagttggaattggctgatgatgttgaccttgcaagtatagcagaaaacatggaaggttattcaggtgcggacattaccaacgtgtgcaggtatgaattatcatggaagcataggtttttgtaagcataaacttctagtatgaagttttttggttttgttttttgagacacagtctcgctctgttgcctagactggagagtagaggcgcagtcacagcttactgcagcctgaaactcctgggctcaagtgatcctctgacgtgaagtttttatgctgaattaagacagatcaatatcttggtggtggctcacgcctgtaatctcagcactttgggaggccaagtgggagatcacttgagcccaggagtttgactggcctgggtaacattgcaagacctcatatccatgaaaaaaattttaaaaattagccgggcatggtggttcccacctgctcaggaagctgaggcaggaggatcgcttgagcccaggagtttgaggctgcagtgagccatgattgtgccactgcaccccagcctgggcgacaaagcaagaccctgtgtccaaagaaaaaaaaaaaagatgaataaagacccacattccagttttgttttgttttttgagacggagtctcgctctgtcacccaggctgaagtgcagtggtccgatctcggctcactgcaacctttgcctcctgggttcaagtgattcttgtgcctcagcctcccgagtagctgggattacaggcatgcaccaccacacctggctaatttttgtatttttagtagagacggtgtttcaccatgttgaccaggctggtgtcgaactcctgacctcaagtgatccgcctgcctcagcctcccaaaatgctaagattacaggcgtgagccaccatgcccggccccacatacattttgtagtcagggtcacaaattctggttttgttggtgttagcaggtgctggtaagatatctggtatctttcatgtcagtgaagagtctacagttcatttgaaagctacaagttcaagaagctaatgttaggataaattgtgtaaaatagaaaatcagtaattgtcttggattaaataaattgttggtgcctttgttcactatattataaaatacgaaatgactgtgaaatatattgacttggcatatgcacagaatacagtctcattctcagtgaacttatcctaaatgtgacagaatagcagtaaaaagaaaaaaagaatgtctttaatccagctggttcaagtaggttttgtcctaatctaagtattagtagagacacttaattaaccaggggcttgactgcgctcgtttcctcctttctaaagtgagcataccacacagggttctgaggattaaagctaaagtgtatacatcaaacagctctattgctatccctttgcataaatggtggctgctattaaggataaaacttggtaaaaggcaagagctgtttgaatctgaagttttgttttttttttttaacacaaatgagaaaaggagaaaccctgaacttacctagcttttcctctacatggagaaaatatttaattttcttgttaacagtttctcttctcttctgactctgtgatgcttattcttcattttattgaatagttataatgaaattcaaattgctagctttaaccccacttttactttttctgggattttatattcagtattaattatttaaattagcatcctttttcattacagaagatttaactgcttaaaaatcaatcacaacaggctttgtattccaataagtttctatacaatactacatatatatgtaatataattagagaatgctacaacagatcaattgaaaatttttctattaacaggttttcatttaaccaaagtaacattgtgtgtgttgttgttgtttttaacttaaaacctagggatgcgtccttgatggcaatgagaaggcgcattgaaggtttgactccagaggaaatccgaaatctttccaaagaagaaatgcacatgcctacaactatggaggatttcgagatggctttaaaaaaggtttctaagtcagtgtctgctgcagacattgaaagatacgagaaatggatatttgagtttggatcatgctaaattctcacatgtaaactgtgagaaatgtgccttaagtgtttgaatattaaatgcagtaattcattgtactgagtgctatattttttttaactttcataatggtaagatttttttaaaaaaacccttatgattctgaataaaggcaatatttttaagctgaaaatttgttttactttagcattactagatttctattattatttcactgaccacaaatgttacttagcttggaaagctgtcttttttttctttgctttttctatttttttcaagactgtttgtttcttctagctgaactggccattcatactgggattagccaacagaccataagaaagacatcaatcttggctcttgtttgaaaccaatagctacaatggcaaaccatcacgtttcttgattcagggcctaggaaagctgactttatatgcacttttttttttttttttttttggtatataaactatttattaacagacaaggcctacagacttacttcttcttagacacacccacgatgcggccacggcagcctgtggtcttggtgtgctggcctcggacacgaaggccccagaagtgacgcagccctctacgggcccgaatctttttcagtcgctccaggtcttcacagagcttgttgtccagaccattggctaggacctggctatattttccatcctttacatccttctgtctgttcaagaaccaggctggcatcttgtactagtgtggattctgcataatggtgatcacatgttccacctcatcctcagtragttctcccgccctcttggtgaggtcagtgtctgctttcctcaacaccacatgagcatatcttcggcccacacccttaacggcagtgatggcaaaggccattttccgccacccatcaatgttggtgttgactactcggcaaaatatgctgggacttttcagggatcactagagacatggcggcagcacaagtggcggcatgtaggcctcctgtggaagagagctatatgcacttctaacttggcatcttctctcctactgtttgctgctgttactccttctaggaagaaaaaaatattggctctagctccagttaaccttacccattgcctctgggtgccagcrgataactgaaaatccctgaacatttttacacagtagctaattaaagcatgagccaagcccagtatgtcttccttcccacctggtgttatggtagcttcccttcacctcctgggagagttttaaagacacattttactttgcattttaaaaaaataaaataaaattcttacttgacttttattttgcctatgtaagaggctgcactataggcaaataggcatttctaaacctgtgctgctcatagtactctaatcactcattaactcatgcataccaaacatagctaaagtaaagtattaatggtatgagttaataagtgaaataaaagttaatggtataaaattttagataagatttccatgtgtgactacttagaagaaaataacttaccatgttatcccaaccatagaaaacagagcctcaggagattgcggaccttgctgtggtcccaagtcttactgagaaagacagaagcctgggtagggatcttctgactgcagagcctacactctccaatagaccatgtagcctcctaaagttttttcttcactagaatctgtaagcttatggttaatagataaaataagaccatgtcatcatttggagttagaactggtgctttctaatgacttagggaatgagaaagggtgtaaagaacaagtgttactggttggtaactcaaggatcaaattgtaagttgcagattatttttttcagcagtatggagagagtattgcataatagagctccatgcaatgtaattaatttaaagtctggcaaagtgaaacatcactccttcattctacttgtcatcctctccacccccatcacacacatacctatttggcctaaatataaagtggtctcaaaaaaaccaaccatggccgggcatggtggctcacgcctgtaattccagcattttgggaggtctaggtgggtggattacctgaggtcaggagtttgagaccagcctgcccaacacagtgaaaccccatctctactaaaaatacaaaaattagccgggcatggtggtgggagtctgtaatcccagctactcaggaggctgaggcagaattgcttgaacttgggaggtggaggttgcagtgagctaagatcacaccattgtactccagcctaggcaacacgagtgaaactccatctcaaaaaaacaaacaaacaaaaaacaaccattactttcttggatagtgttttcaaaatgatgggttgcagtatatatatatatatatatttttttttttttttttgagacagagccttgctctgtcgcccaggctggagtgcagtggtgtgatctcggctcactgcaagctctgtctcccgggttcacaccaattctcctgcctcagcctcccgagtagctgggcctacaggtgccccccaccacgcccggctaattttttgtattttttttttttttagtagagacgaggtttcaccgtgttggccaggatggtctcgatctcctgacctcgtgatctgcccacctcggcctcccaaagtgctgggattacaggcatgagccactgtgcccggccagtaaaaatattttttaatgaaacaacagaaagtatcacatagagggccaggcgcggtggctcatgcctgtaatcccagcactttgggaggccaaggcaggcagatcacaaggtcaggagatcgagaccatcctggctaacatggtgaaaccccatctctactaaaaatacaaaaaattagccgggcatagtagcgggcgcctgtagtcccagctactcgggaggctgaggcaggagaatggcatgaactcgggagacggagcttgcagtgagccgagattgcgccactgcactccagcctaggcgacagagccagactccatctcaaaaaartatcacatagagatgagttatatgtactcgttcacattgtaaaatattaatatgtcaatatgagtgatggttaaaaaaggtaataaaacacttttagggtaaacagcactatatctagaaccacaagaccaagggcacagtctaattcatgacatcaatggactcattcaatttgagccatggtttcagccagtgtaaatgaaagtatacctactcctgcatctcagccattcttacctgggcaaaggttttatatcagtgtaaccaaaacagctatacttttttcctcaaaaaaaaaaaaaaaaagtttattttagagtgagaacatgtcatactacttttaaatcttggagcattcaaggtaagtagtcttggtacaggatacaatcaaatcatgatacacttcagtgattttatactgagtcacatacttaatataaaggcacactgtactgaataaaaaaataagtgttaagttcttgaccttttaaattagaattttataaagtgcttttcataaagtcttatatattatagtaattaagtggatataatttccttaacaaaggcaccttgaaaagttattggcacatgagattttgtctggtcttttttttttyttttgataatttcaaagtctcttcacatgtgttctcttccactttaagttttccttaacaattcatcatatgaatagccagcccttttagagaataaggtcaacttttttttttttgaaacagagtctcgctctgtcacccaggctggagtgcagtggcgtgatcttggctcactgcagcctccgcctcccgggttcaagcaattctcctgcctcagcctcccaagtagctgggactacaggcgtgcaccgccacacccagctaatttttttattttttttagtagagacagggtttcaccatgttggcaggatggtcttgatctgacctcgtgatccgcccgcattggcctcccaaagtcctgggattacaggcrtgagccactgcacccggccgagaataaggtaaactttaacttggcactgtaaaggtcaattttcaggcagtcttagagtttagcaatttctctagtgtataaactgattcttaacgatttaaagaaaattatattcaagtggcaaatttggaggcaacaggctacttcggagtccatgatatgagatggcgttttaaatacatgttttatcttcaaggttttcagctcttttctctggaccatctggatataagttgatagctgtcacaggtatgacgtccactttatccaactgaagaattcctctgaaatagaaagtgattaattactatcaaaattaaatgtttcctctgcctgtagtttgatagtgagaaaaggctacttcaaggttataatatacacctaaggttaggtgcttttgctacattctatttaaaaattcatagtggttgtacaaactgagcccaaagtcactttaaccaaactggctgagagaatagaaaggcatcgaggaagttcattatttcctattttagggaagaatagggtaagtatagatctccaaggcagagttaggttcctagatacacccaggctgagcaaaaagcctaagcctaagcctctctctaaataatactcaccaccacaacacaaccttaggtctttagatagtgttgctctttttgttacttaaaatccctgaccagagagtacgtctttggattgaatctaggaccctgcattgtaaattcagtgttattctaataagaacatcaacgggggttagttgtttatagaaccaaacagattctaaagttcacaggggagtaactgcaagaacagccataagattttttttaaaagaacaatggggagaagacaaagttgtcttaagtagctctcaaaggttttattaaaacatgatagtaggccaggtgtaggggctcacacctataatcccagcactttgggaggccaaggcgggcagatcacttgagcccaggagttcaagatcagcctgggaaacatggcaaaaccccatctctactaaaaatagaaaaaattagctgggcatgggacacatgcagtcccagctagctagctattcaggaggctgaggtgggaggatcgcttgaacccgggaagtggaggttgcagtgagccgagatcgtgccactgcactgccgcctgggtgacaaagttagcccctgtctcaaaaacaaaaacaaaacatgagagtaattaaaactgtgctactggcacaggaatagacaaatagatcactaggacagaaaacagtccagaaaaagactaacatatatggaaatttagtttataataaggtaacattctaagtcaatgataaattactaatggaaaaatggcctctgtctgggaaacaaaatgagaactctagctttaaaagtatacagaaaagtaatgctaaaaaataaattttggctgggtgcagtggctcatgcctgtaatcccagcactttgggaggctgaggtgggtggatcacctgaggtcaggagttcgaggccagcctggccaacatggtgaaaccctgtctctactaaaaatacataaattagccggctgtggtggtgcacgcctgtaatcccagctactcgggaggctgaggcaggagaatctcttgaccccgggaagttgaggttgcagtgagcagagattgtgccactgcactctagcctgggcaacaaagcgagactctgtctcaaatatataaataaataaataaataaattttaagaaaatataatggctgggcacagtggctcatgcccttagtaatcccagcacctttggaggctgaagcaggaggactgcttgggcccaaggagtccagcctgggcaacatagtgagaccctgtctctacacaaaataaattttttttaaaaaaatggctgggcacggtggctcacgcctgcaatcccagcactttgggaggccgagacgggtgggtcacttgaggtcaggagttcgagaccatcctggccaacatggtgaaacccatctctactaaaaatacaaaaattggccaggcatggtggcgggcgcctgtaatctcaagctattcaggaggctgaggcatgagaattgcttgaaaccaggaggtggaggttgcagcaagccaagatcacaccactgcactccagccagggcaacagagcaagactgtgtctcaacaacaacaacaacaacaacaacaaattagccaggcagggtggcaagtgcctgtagtcccagctacttgggaggctgaggcaggaggatcgcttgaacccaggagggtcaaggctgcagtgggccttgatagcactgccactgtactccagcctgggcaacagaacaaaaccctgtctttaaaaaacaaaaaacaaacaaaaaaagccccataattttaagataggaaagtctggcctacttagtaggcaaaataaaaaccctacatgctgtaaaggaataacatgaattacttaggccttgaatttaaagcttttgtatgatgagataccataaataagcaaaagacaaacgataggctgggattagtaaaaaaatctgcaatgtgcattacatatgtataacagacaaaagagctcttatatactaatagttacaaaatgccaacacaattgaaaaatggccaraggctctacgtaagcaagtcatgagagaatcatatatagccaattatcacaaagatgttgaacccacccagacctaaactagcaaagatgctagtaagatgaaaatgcaaattmagatgaattatatttttagtagcaaaaccaaaaaagattatcatcaggttgtaaggagttaatacaattacttgtgacacagtaattttacttttaggaatctattctacataaatacacatgtgcaaagaaatatatgtgcaaggatgtatactagaacattattgggattaacatgaaattggaaattacctaaatgttagaggaatggttatattaaggtatatctatactgtggaacacctgtgatattatgacttgtaagttcctctggcttcctggaacagctcctaaaatccttaaatctccaaagtggtaagtatcttttggatgctaatgatgactgatggctgggggatcctggatagcctcaacaggggagctggttgccaggggtatcaaccatgagatcagtcccatcccccaaccttggggaagggaacggggtactgaaggttgagttgatcaccagtgaccaatgatgtaatcaatcatgcctgtgtgatgaaacctgcaaaagaacccaaaaggactagctttggagagcttctggatagctgaacacacagaggtatgggacctggatagaggtgcacctagggagggcagggaagctctgaacccctctccccctccccatgtcttgccctatgcacttcttccatctgcctcttcatgtttcctttgtaataaaccagtaagtggaggtgtttccctgagatctgtgagccgccccaaagacgtcccaagcaaattaatcaaacccaaagaggaagtcatggcaacctctttatacccagctggtcagaatcacacatcacaacctggggcttacaactggcatctgaaggggggcagtcttgtggaactaagcccttagcctgtgggatctgacgctgtgtccaggtggaaagtgtcagaactgaactgaattagaggacacccagctggtgtccactggagaattagttattggtggtgaaaaatccccacacacgtattggtgcccaaacgtgaagtactccagagtgtcagagtaggaaaaaccaaagtatttttcctatgctttggtttttcctatctcctttagaactatgcagccataaaaagaataggtaagctatacataattatgacatgtcagttaaaaataatattaagggctgggcatggtggctgatgcctgtaatcccagaactttgggaagccaaggtggaaggactgcttgaccccaggagtttgagaccagcctgggccaacctggcctctacaaaaaataaattaaaaaaattagctgggcatggtgacacacaccttagtcctagctactcaggaggctgaggtgagaggatcacttgagtcttgggagattgaggtgagaggatcacttgagtcttgggagattgaggctgcagtgagccatgactgagccactgcattccagcctgggtgtcaaggtgagaccttgtctcaaaaataagtaataaaaaataaaatagaattaaaataactaaggggacaaaaaagaatatatgtagtgataagaaaagatcttaggtctatggttcccaaactgcactgaggtccctgggttggtgagcaaactcacagaggcaccacagaataatataaattttcaagagacttcatgtgtaatattaccttgaggttacttcatgcttttaacattagattgcaaaacattcaatgaagtcaatctttccaaagctgggttttggtggtgctagatttggaaagtttttcccctccaaacctcatgttaaaatttaatcccctatgttggaggtgtggcctaataggaagtgtttgggccatgaggacagatccttcatgaacagattaatgccctctctggaggggaagggaatgagttctcattattcattccctggagacctggttgttaaaaagagcctgacacccccctgctgttcctcttgcttcttttcttgatatgtgatctctgcacatgctttgccttgcgaagctgctgagtggaagcagcctgaggacctcaccagaagcccagctgatggcagcaccatgcttcttgtacagcctacacggttcttgcagaaccatgagctaaataaataacctcttttctttataaagtaaccagcccaggtattactttataagcaacacaaaatggcttaacacaggtggttactatgataaaaagcaaatactgtacaaaactaacactgaacaagaaatgaggatgccaatttccagtctgatgccaagatatgaggtattgtgtagtgctctataggcactcacatcccattagtatttcttaaattagtaatttaagaacaaaattgctgggcgcggtggctcacccctgtaatcccagcactttgggaggccaaggcagggggctcacgaggtcaggggatcaagaccatcctggctaacacagtgaaacctcgtctctactaaacatacaaaaaattagctgggcgtggtggtgggtgcctgtagtcccagctactcgggaggctgaggcaggagaatggcatgaacccgggaggtggagcttgcagcgagccgagattgtgccactgcacttcagcctgggcgacagagtgagactctgtctcaaaataaataaataaataaaaaataaaaataaaaatctttatatttgtcttttggcctaagtataggggcattaaaaaaatttactggcacactaaggatactgtaaaccaagaaagtttgggaaacctgtgtcttaagtgaaaaatgcaatgtagaacaattaacaatctgagttgataaacaattatgattatctagtgtacatttacattaatacatagaatttggattaaaaatgtcaactcagttgacaatgactacctctaggtagaataagaattgaagaacagagaagggatactttcagttcattgctctctatagttctgtattaaatccttttctaccaggaagtatctgcagtacaactgcaaatttggtttttaattttatattgcatctgttcctgcagagaaacccataacaaaacaatggcaaaagaaaaagaaaaacattacaacaccgttttctatgcaggtatacataataaagttcaaaaaagtttggaacttcctggcagccaaaggggaaagaaatctgttaaactacagaatttttattacaggtcaagcatccctaatccaaaatccaaaatgctccaaaatccaaaactttttgagtgccaacatgatacttaaagaaaatgcttggccaggcacagtggttcacacctgtaatcctagcactttgggaggccaaggcaggaggacaacttgaggccaagagttcaagaccaacctagccaacatagcaagatccccgtgtctctctctctctctctctatatatatatacatttataaatatttatataaaatatatacaagtattatatatatatttccatatatgcaaaggaaatgctcccaagagcattttggattttggattgaggatgctcaaccagtaagtataatgcaaatgttcaaaattccaaaaaaatctgaaatctgaaacacttttggttctaagcattttggataaggatatttctatatcagaaaggaatgggaatgccaattcagtggaaatgtaaactaagaggtgggaggggcaactaatatttctttactctgcaggtgctttgcttgcttcatgactttgactttcaacaatccttcaagggaggcattagttcatcattacacctgaagaagtcggaggttcaaagacctcacaacaagcaagtggaaaagtaaatgttcaaattaggtcttcttttccaaaaatcctgttacataacagtataatgcaatgtagctaagccaagaactgtggtcatctgcattgagatttgtttctgttaagataattaaaatgactaatgggccaggtgcagtggctcacgcctgtaatcccagcattttgggaggccgagacgtgatccacctgatccacctgaggtcaggagttcgagaccagctgggccaacgtggaaaaaccccatctctactaaaaatacaaaaattaaccaagcaaggtggcgcatgcctgtaatcccagctactcgggaggctgaggcaggagaatcgcttgaacccaggaggcggaggttgcagtgagccaagatcatgccactgcactccagcctgggtgatggagtgacattccatctcaataaataaataaaataaaataaaataaaacgactgatttaacttgaaaaaatactaacaataattcattttaaattttataatttttgactaaaaaatatacaaaaggaagtcaaagtcagtctctccacctctgctctcattcccactcattagagataacttgttttctcattccagaaattttctatgcatttatatacacataatacttttgttttacctaaatgtgatcatactgctttgccatatttccccccacataatagattttggacttattcagccagagaaaatctcattagacctcactgatatacagttaagagggcttttattttgcttttacttttttttttttttttcgagagggagttttgctcgtttcccaggctggagtgcaatggcgcgatctcggctcaccacaacctccgccttccgggttcaagcgattctcctgcctcagcctcccaagaagctgggactacagatgggtgccacacgcccagctagtttttatttttattttttgagatgaagtctcactctgtcgcccagactggagtgcagtggtgcaatctcggctcactgcaacctctgcctcccaggttcaagtgattctcctgcctcagcctcctgagtaactgggactacaggcgcctgccaccacggctggctaatttttgtatttttagtagagacagggtttcatcatattggccaggctggtctcaaattcctgaccttgtgatctgcccgcctcggcctcccaaagtgccaggattacaggcatgagccaccaggtccaggctaatttttttttatttttagtagagatggggttttaccatgttggccaggatggtctcgatctcttgacctcatgatccacctgccttggactcccaaagtgctgggattacagccatgagccaccgtgcccagcctattttgcttttattttctattacaaacaatgctgcaatgaatatcctgcttgtctactgaaattaacattttaaactgatactctggggttgaaaatacatcatgaagtcctcgggttttgttcacctctgatcatacagttgcattttccattacatgtatttgtttccttcctctgctactagattttaagttcttagcagagtttgtcttacttacatctgaatctctccaagaatgtcttgatcacaatagctattcaataaatgtgtttcaattttgctaacattggaagatgagctagaaaaacagtaggtgttattttccctcccatttgtcttaccctttctaatttttatattttctattctaaaacatagcaaatatgtctcactttttaatcattaaaaatactaacatttcaaaaataagaaatacttacttgtattcagaaactgggaaaaacacctttaagatggttattaccacagctgctcctgtaattccaaccaccatgatgttcaaaaactgaaagaatactgggaaaacgttgctccagaacctacacagatcttttctaaacttttccatccactgacacattacctgaaaaaggaatttcgattagatatgcaagttgcatcaatctctaagaataaactttaaattttttaatgttttagctttgggatgataaaaatattctatattttgattgtgctggtagttacatgggtgactacatttgtcaaaactaattgtatattttaaatggtgattttattttagaatgtacctcaatgaagttacttacaactttaaaaattatgttctaacaatacaagcacaaaaatgttaatagcctgtaaaattatttatattgttttctaactacaaatcaagtgaaaataattgctaattgacaagagattcgttaggctagtccattataaacgaaatggagcagagtcaactgtttccagtacctagagcacaagagaaggaagagaaagacaaacatattagaaaattttagaatacatgggaagttcactgtgtacaaaacatgtttctatactttaagagcgagagcagaacttaaggtcggcactgatggcacggactatgaagacagtctgctctggggctgagctgctaagggaggtgaggtagacagggtaaaggtgctacagtccagactgctgaagtgacctcaaatatgcaagcctgaccttcagtgagaactactactcctttaataccaaccatagaccctgctcatttaaaatgaattttgggtaggagtctacttaatatacagagagatatcgggatactctctgaacccatgaatatattcctggtaagcagtataaatgtcacaggtaacatctgagaaattagtaggtgccaatgcatatttatatgtagtacccaacttatttaatccttgtaacaacttcatgagatactactttacactgctattcagattaagtgggtgccccattgtacagataaagaaactgagggtagagagattaagtgccccaaagtgggagtacggggaaataaagagtaattatcggccggggatggtggctcatgcctataatcccaacactttgggaggccaagatgggcggatcacttgaagtcaggagtttgagaccagcctggccaacatggtgaaactccatctctactaaaaatacaaaaattagctgggcgtggtagcgtgtgcctgtaatcccagctactcaggaggctgaggtgggagaatcacttgaacccaggaggtggaggagtaagccgagatcacaccactgcactccagcctaagtgacagagtgagactccatctcaaagaaaaagaaaaaatttgttcaagatcacacaactagtcagcggcagaaccaggtttcaagcctgggcaggctgactctaggaagtatattctcaaccacctgagctgaatcactgggcaagatcctgggggcacaatgcatatgtgtgtatgcgaggtagcgggtacagaataaacacagaaatctggatatgagaaataactgtggaatttataattccaaccaaatgaaatccagcaccttgataatcatgatctgactacaatattattaaacaaagctcgaagaggaaaataggaatactaaaaatatcacattaagaccaagatgagtccattatcaccaatgctctacagttccattcttcaggatttccactccattttaaatgctagggtcgattttcttcatcttaaccatgaatgcttatgataacaccaaatacttgatttaccttatatgaagatggcggctctgctctgagaggagtttcaggtaacttgccaggtaaaacatcttcatctacagtggtttccacattcctgataagatactggctagtggtttgcagtgaactaacactttctacccaggagaaagagcaacgttaccaaaatgctggtgtcttatcctactagtcctaagattacgataccaatagcatttaggatagtaagaacacatattttaccatgggagaaaaaattaacacatctgaatgttcactgatttaaatgtcagaagagaactataaactaagacacgtataaggagctaaagcagttatgattctgtcacatagaaagccaaaattttagaagttctatgtttctgtgaaaaaatgaatagttcttcctctgaatgaacctttacaatagtcttattacatattttgtgatcagtacccagagtaagagtaattactgaaaaatgtcactatgcaaccagcactgatcacattctactaatgctccaaatagagtcctaaagtccttaaatggacatatgaagcaatacatgttatgaagcatttttttaaacaagctcatttccaaacatattaactattaaagataaatagcaacttttgcaaatagtgtaaaaaataacaaagttcaagagtatataaagctaccaactaaataaataatctccttaatactttaaataatggtcttttaagttaccttttttggagaggttaggaagggtaaataaaatgtcactgtctcgagaaatagagtagagcatgctttcttccaaagggagggtatagtttgaatgtctgagtactccccggttcttaactaaaatatcaatttcagtgacatccttttgctgaacctgtgaaagaaaatataattattctttattttaaatagtagcacagccccataaaaatttaaaagcaaattttcctcccagatttatataactaaaacatgtgtcctattcagacaattactctttttttttttttttgagatggagtttcgctcttgttgttgcccaggctggagtgcaatggtgcgatctcagcttgccgcaacctccgccttctgggttcaagcgattctcctgcctcagcctcccgagtagctaggattacaggcatgcgccaccatgcccagctaactttgtatttttagtagagacaaggagtttctccatgttggtcaggctggtctagaactcctgacctcaggtgattcgtccaccttggcctcccaaagtgctgggattacaggtgtgagccaccatgcccagctaacaattactatttatttccccgtactcccactttggggcacttaacttgcaactttaataatattcctgtcctgctttaacacttactattataagcttaatctcgattctacttcatttacacacagagacttcatttaccatagaggaaatggtagcagaactatgagccaaattgaatctctttgcttactttctatttaataatgtctgtacattttaaagtgatacaaacatgtatgaatatgggaaattttaaaaatacatttcaaatgctaaaataaatatacaaaaattctaaataattggatataggcaacattaggcaccttccttatcaagtcggaaacaaataaaataactgaacacatgcataatatctagcacaaatctaaatatcatttaattcccaattaataaacatactatcttacttgttttccatcaatctctactacctcttcttgaatgacaattagttgcaaactggaaccagatgtcataggccactcatgaactaaaatccttacactgacaattccaaaatattctttttcctccaaattttcaagattttcattcttcactataaaaaaaaaagtagtgacacctttgaacaaagattaccaccaaatctgtgagtgagtgtgattattttgatgacatttacatggaacaagacagttgaaaacccatttctttggctttcttcatccctgacctcaatgctgtttcagatttattaaaaacaaagacaatctgacaaatctttatgactgcttacactcatttgaaagggtaaaatgtgttgatctttagactttgtatgaaataccacactagcaacatctttcctattcttttttttttttttttttttttgagatggagtcttgctctgtcgcccaggctggagtgcagtggtgccaccttggctcactgcaacctttgcctcctgggttcaagggattctcctgcctcagcctcccaagtagctgggtttacaggcttgcaccaccatgctcagctgtttttttgtatttttagcagagatagggtttcaccatattggccgggctggtcttgctaactcctgacctcaagtgattcacccaccttggctgcccaaagtgctgggattacaggcgtgaacgaccacgc

SEQ ID NO: 96472 - DNA, 30422 bp, Homo sapiens
  misc_feature (1)...(30422): n = A,T,C or G
acacctgccccttcccagggatcacgtgtgtctccagcctttcacctttctattgcaatggtggcctttgtccaggcaagagcaggcctgatggatgtactggtgagccccacagttggatgtcagctcagccgtccaactgggaggaacagtaggctcagttcctccctgacccctgacaccaggccgcagtgggcatgcacaggcccacagaaagtcagtctgggttttgcttttctcgtgagcatcacagttaaagaagcgctcattgagcaactacagtgcacttggtcttctgcaagtgctgggcacctagagataggaacagtcatggtccctgctcttaaggaactgatgacctggtggggccctgttgtcttcaaggaacccagaagccactgggccccaaaggtggaactgaaggactgggggcagctggctctcagcctgccacctctgcactgcctgcctttaaagaaccccaccccaccccatgatggccccctctgttccccttgtatttcagtgactgtgaattgaggttaggaaggcacacctgcccttctgtgtgctctctccacacgaaggatgacagatactgtgaattcagccctcacggccaactgtgaaggggatggagaaggctgggagggctcggggagagctcttaggggctgcggaagtccccacgggggtctgagagtggagcccaannnnnnnnnnnnnnnnnnnnnnnnnnnnnnnnnnnnnnnnnnnnnnnnnnnnnnnnnnnnnnnnnnnnnnnnnnnnnnnnnnnnnnnnnnnnnnnnnnnnnnnnnnnnnnnnnnnnnnnnnnnnnnnnnnnnnnnnnnnnnnnnnnnnnnnnnnnnnnnnnnnnnnnnnnnnnnnnnnnnnnnnnnnnnnnnnnnnnnnnnnnnnnnnnnnnnnnnnnnnnnnnnnnnnnnnnnnnnnnnnnnnnnnnnnnnnnnnnnnnnnnnnnnnnnnnnnnnnnnnnnnnnnnnnnnnnnnnnnnnnnnnnnnnnnnnnnnnnnnnnnnnnnnnnnnnnnnnnnnnnnnnnnnnnnnnnnnnnnnnnnnnnnnnnnnnnnnnnnnnnnnnnnnnnnnnnnnnnnnnnnnnnnnnnnnnnnnnnnnnnnnnnnnnnnnnnnnnnnnnnnnnnnnnnnnnnnnnnnnnnnnnnnnnnnnnnnnnnnnnnnnnnnnnnnnnnnnnnnnnnnnnnnnnnnnnnnnnnnnnnnnnnnnnnnnncctgggtgtctggagtttgtgaaataaagttataccaaagggtgttctggggcttgtctttgctttggtcagttccagctgagtcctggggaccatttggatgggtggcatgggaatggataggtctggggtgactgaacccctggtctatagattaaggagctccttccaaaggaagaagttatgccaggacctcagtggcaggtgtttctaaacagatggaggaatggagaaggcacagcgtcaatggcccacaatgcgcagaggaagatcatccaggccccagcagcaacaaagccatgagcaggcccagcatctcctgagctggagatgccttagccttatggaagccttggagggatgaggtggtgttcatctgaatccaatatctaggagcccctcattgccagttatatatacagataggtggagaagaggtactttctaaacaccatctcactttaatcctcacaaggccatgaggtaagaattgtgatgtttcagctgaggaaaatgagaaacggagaggttaaggtattcacccaagatcacacagctgcagggtggccaatccaggactcaggccacagctttcactccagaatctctccagaagtctaggaatttgctggtcagacatttactgagcacctactatgttcataagacagtgctaggttgtggagcattttccaggataggccgcgtggtaggccacacattaagtctcaatagatttaaacataacatacaaagcatcttctccaaccacaataggatgaagttaggcagcggcactagattctcataggggcacaaaccctattgtgaactacacatgtgaaggatctaggttgtgcgctccttaggagaatctgagtctaatgcctgatgatctaaggtggaaaagtttcatcctgaaatcattgtatatccctttccatccgtgaaaaattgccctccatgaaactggtccctggtgccaaaaagtttggtgactgctgccttaaactactactggatttactgagtgaggcaaaccaagtactgttttgtcatagtctgtttacaggagagagttgcactgttaatttgccattaggaagcagttagaaccatatatctgactttatggaggtagaatacgctcaaagagaatgttctcagtgggggggatgtgcatgcatgttttagtgattaatgtggttcagtacggctgtaccaatacaatgaggtttccaaagggaactggacaagacgacccagggccccctgcattgtacgacaggactcaggtgtctgcgggcatcactgactgccctgccgaggccctctgtgctggaggtgtcactgcagatggaaggattccttcttgaggaagtctactactggcgaaggtgaatgggtctgggcgcaggatcagtgcagtccaggagtgactctaaaggtgctggtgtgtgggcactacgtgcggagctcagccccaagtccttttcatgcattagcccatttaatccccacagcatctctctaaggttcacattcatttgcctcattttatgggtgaggaaaggaagcttggagaaattaaggaacttattgaagatcacacaagaattaaatgacagggccaagattcaaacgtgggctatttgtactatctatagaattgtatgtctggcccacattttgttgaccactcatccattgatggacatgcgttgctttcacctcttggcttttgtgaatgatgctcctacaaacatgggtgttcacatgtctctttgagttcctgtttttggttatttgggggatatacccagaagtggaattgctggatcatatagtaattctatgttgagatttttgagtaacagccatgctgttttcacagagttccagtttacccacaatctagccaacagttgttatttcctggattttttttttttttttaatcacagccatcctaatgagtgtgaggtggcagactcacattttgaaaagatccctcagtctacagggcagagaacagagcctccgagacaggtctgcgactttgaatactagagctctgagaagaaacattcacgagggctgcttctcatctcctgaagaccagggttaaccactgcgaatggattgtggtgactgaagggtgccggcactgtgcctcaaagtgtctccctactgtgttgattggtctaaaaacacatcagcctttgggtatgaccttactggggcccctccaggcagggtgtggagcagaggaccctcctttataggctggactcaatagtgaggctgcttacctgtgactcacctccaaggctcaaggtgatgctaaggtgctgatttgctagaactctgagctgtgcctgtgtctccttgggctctgggagattttttcttttagcagtattttatggaaatattgtctaggtagagtaaaatgtacagatcctggttttctgttttgagttttgttttgagacagggtcctgctctgtcacccaagctggagtgcagcggcatggtcatagctcactgtggcctcaaccacccaggctcaagcaatcctcctgcctcagccttcctgtagccaggactacaggtgtgcaccacaatgccccactaatttttttgatttttagtagagacaaggtctcgccatgctgcccaggctggtctcgaactcctgggctcaagcaatcctcccgcctcagcctcccaatgtgctgaattacaggtgtcagccactgcacccagcctcagcctgttgttaatggatgtaaatacctgtgtgatcgccacccagaaccagatccagaacatttccagcctctcaaagactccttcctgcccctcccagtcagagacccccaagggtgacgccattctggcctgttgttcaacttgacttgaacaacccttcaagtcaagtttggatctggcttcttctgctcagttgcgaggcccattgatgtttcctgtggcctagctcctttttattgccgagggctactctgttgtatgaaaaccacaattcatttctcccttctcctttggtgaacatttgcactgtttccagcctggggcaatgatgagtaaagctgttaaaaacaggcacatatgttttcctttctcttgggtaattttttagaagtagaaaagccagaacatagaagtagatatttgactgtattacaactcaccaagcagtttttctttttattttttatttttcaattttttgagacagagtcttgctctattacccaggctggagtgcagtggcgtgatgagggttcactacagccttgacctcctggggtcaagtgagcctcccacctcagcctcccatgtagctgagaccacaggtgtgcaccaccacacctggctaatttgtttgttaaattatatgtagggacagggtcttccaacctttcccgagctggtctcaagctcctgggctgaagtgatcctcctgcctcagcctctcaaagtgctggtattataggcataagccaccacgccctgcccatttttctaagttggattattttacactccagtctgctgtgaatgagagttccagttgttgcgtatcgcaatcaatttgtgattgcctacaaatgatgtgccgtgatgaaattgtccctggtgtccgagaggatcgcaaagaatttcccttcctttctctcctttctgctccccttgtactgtctactccttaaactggtacttgatccaggaacataatggggatggacagtgcagatggcacacatggcctcagtctattggagcatctcaaaggaattagtctgcaaattctagtgcatctaggtggagcacaggaaggaagagaggtgcagactcacgtatggccctggggcacctgccatcctctcgcacccgtacagcccttacctgccagcacttaccctacccagcttgagttctgggccttctcaccagcacatcgctgggacctggtcgacttcaggtaagtttatttcatggctccctcccccacgacctgcacatgccatatgttccttcccagccccatgtcacttgaaatgttctatcatgtccaagacttctctcctcatcctaaagtgcagaaaataaggatggagaagagaaggagaagagaatcaagagagattcattgagagggaggatcagaagctcctgggcaccccatactgtagaataaaaatattcattatggtgtttttcttgcaaaatattcccctctacataattatgtttttacatgaataatataaatttaaacaggagaaatactttttgaagagtctgagaatcttcataaagttcaggcggccacgaattagctgtgtgacctggggcatgccccttagactctgagcctcagcttctctgtatgtaaaatgggttgaagccgcccttccccacaagcaccctgtgcacaggcaatgcccagccccattattttctggactccgtggccaagcatgcttaggacacacagccacatacttctgggcagtgtcatctggcaacttgctgtcatgtcagtgtggtcaagcattgtagacctctatgaaccaaatatgcttcaggcttgggttgagcacaggagagggaggagggaaaggtcactggggctgggagtgcctacttccctctgtgagtgtcaccccagtccacccagtaccatacctttctctctctggacccacttccttttgctgccggctcctccccattgaataacagccaagttgctttggtttctatttctttgttaagtcgttccctctacaaaggacttcctagtgggtgtgaaaggcagcggtggccacrgaggcggcggagagatggccttcagcrgttcccaggctccctacctgagtccagtgagttccagggctatgggcacagggctgcctcagccagagggacacagctctggggctctgaggaagcaactcctgggtggcaggggatgggggtgggggcatcccaaagagaacacaagcagggcagaaatatcagaggaggtcatcctggcacacctgtgccgtgctgagctcactcatgcctggagrgatgctccttcccacgagtcatggctttgacagtgttgactgagctgtcstgtcctgtcctgtcctgtgtgctcaggggaagacatgtagagcggggtggttcatgtaaagaggaagcaagcacgcttctgggacagtaaggacgctacccggcatggtagttaagggtgcttactgtgaaggtggcctccctgggtccagctatttactggctggtggtctctgggcctcagtttccatatctgtgaagtgggaataatacttgagccccccactcccagggttgggatatggattaaggaagtagtgtatctagtgtgtttgaacagtgcctgacacactgtaggtgctttgggagtgtttcatgttattgggtgtctgagggcagcagggaagacctcccgaggaggtgtctgtgctctgaaggttgggcatgggcatgttcagggcatctgtggaggggcagtctcagaggtgagaggggggtgaggactgtccctgcagcgtggggtcagagggcggcaggtgccttgctgaaaccctgtgaggtttatgagtccccttcatacacggaaaatctgaggctcagggaggcagaggccagttgccaaatgcctccagatgggagtggcagccccaggagcccaggagacttcaggggtcactgtgtcctgggccggctcctgtcataggatctcaccccgccttggcaaagagcttcccgaggggctggagagggtgggctgatgggtccttcctgggtggggaggcagggtggggagggtgggcagaggcagggtactgagggagggaagctgccatggcccacctcrgcagaggccagggtygggcttgagtgccccctggtgacactgagtccagaatgaggctgcctacgttctggtctgcagagctcggctctgctttctaaactccagagagaaagaatggggaaaggaggcctgtttcctcctggctgtcaccaatgacacctcagccaccctgtggaggcccctgaggtaggacctgcacagagggggctgggggaagctggaacaggccgctggtgggggccttagggtcagcaggtgctgccttgggcatgtcaccctgtctctggttttctgtcaaagaggggatcccagagcttcttccaggttctgacatattattattctggtgactggtttttactttctaatccttggattcagaaggaaaattatcctacggacatcagagagttaaaacagggccttggagtccagacaagaaagatgatcagtgcagcccctatgggtgtccagagtacccctctaccccacgggggctcccctgggttgggacaattaagcctcacttggtgacccatctggcagtcggagccacgcttcctccacatgccgacagtgggggaaggtcacgyggttcgctgtcctgctgaggagggctgagtgccatgagggcctggcttggaaacctcactcccacttcttgtctggcctcatctagcccagcctctttggagggcctgggggaagctggaaccacgtgctgtgtggtccaggaagcactgggagagccaggaataaggatgttctcagcttactcatgagaggaagcctgtgtggtggttagaagcgtgggtgctggggttcaaatcccagctctgttgctgaccagttgtgtaactttgagcaagtgactgaacttttctgtgcctcagtttcctcatctgtaaaagtggccggggttgctgtgaggataaatgttcctagtcatgcccagagccctcatggacacacatggatccaaatgccacagcagccttagctggtcaacctcaaaacaacacatttgttcttacagtgttggaggtcagaagtctaaaatcaaagtgtcatggaaggtggccagcaggaccatggagcctctgaggcagcggggcaccttggctaagagccacgtactggcctcctgctggcacgcagtcttggccagccaggctgagctccccacttcggggtcgggcctgggtgtcctctggtgatgctgagtccaaaacaaggctgcccacattttggttcacagggctcagctctgctttctagacttccagataagaagaggaggaaaagtccccggtctctgggcactatcaggaacagagagcaagtcatgactcagcagagggatcgatttgttcaatgcaaagagctgcactgtcatgtctgacatgagccaggggctcagcacacggaatcgcacccagtcctctcagaacgctgccagccaggggctcagcacacagcgttgcacccagtcctctccagaacactgtcgggtggtgttactgtcctgccattcagaggagggaactggggcacaggcaggtcaagtgacttggccagtgtcagaattgctagtgtacagagctgggaggcaagcccagtcccgtgggaccataaatccagtgtgaaaatccatcctcctgcaccacatggaacaaaagcaggtccggttgttttcctgggttttctggacacacttatccaaattccacagcagccttggctggccaatcttaaaacaacaaatttgctctcttaatgattttgaaggtcagatgttaaaatcaatgtgtcagcaaagttgtttccttctggaggccccaggggaaaatctgtttcttttccttttccatcttctagaggctgcctgcaggccttggcttatgacccctcctgccatctttaaaaccagcagctttggctgggcccagtggctcatgcctataatcccagcactttgagaagccgaggcaggaggatctccttaatccaggagtttgagaccagcctgggccacaaagtgagaccacgtctctacaaaaaatagacaaacattagccaggtgtggtggtgcatgcctgtagtcctagctacctgggaggcggaggtgggagggtcacgtgagcctgaggaagtggaggctacagtgagctgagatcgcgtcaacacactccagcctggctgacagaatgagatcctgtctcaaaaaaaacaaaaaacaaaaaacgaaaacaaacaaaaaccccccaaaaacgcaaaccagcttcttcttgcttctgtgcttctgttgtcacatctcctacctctgacactgatcctcctgccttccttttataggatccttgtgatcacattgggaccacctttaaaatcaggacaatctccccatgccaaaattactaatttaatcacatctacaaagtcccttctacaacatattcacagtttccggggattcgaatgtggatgtttctggggggtggcccactggtaaccagtgttataagtttcttataaatccttccagatatattttatctataaataaataaatgcaagtccatagacttcccccacccactttttatacaaatggcatcattccatatcagtgctcagagttctgtcttcctctttttcttttctttttaaggctacacagaacctattaaatggaaataccctaatttatttcacctttttcctgtcagaggacttttaagctctttccaatgctttgctttataatcctttgtgttataatgctgcaatgaataaccttgtttgtaggatgatattcaatttaaaaactcatttttcaggccaggcatgatggttcatgcctgaaatcttggcctttgggaggccgagccggaaggatcacttgagctagcccaggcaacacatagagaccccatctttacaaaaaatattgtaagattagtgggacatggtggcctgcacctattttgtcccagctattcgggaggttgaggcgggaggattacttgagccagggggtggaggctgcagtgaaccatgatcacagccctcactgaactccagcctgggcaacagagtgagaacccatctctaaataaataaataaataaataaataaataaataaataaataatcttgtttttccgaattttgggggcactatttaagatattttgaaacctcacagagcttttttggggaacttgttgccttggagattagcctgtcctgtcccgcccccatgatctgtacttcctctttctccctcctggcttccttaattaagccttgtgtgtacttgccagcccatgtccatcacgctctgccttcaattctagatgctgtgctgtgaatacacttaagtggaggccgcatgcttcccaggagggtgtgtattttcagtgttgtgtctcatgatagtatgaaaggctctggagagaatcacaggcttccacaaacaggcaaggagaaaaatgttccacagacatgtttcagggaaaacaggcttcccaatcctaggccgtgctggtccataattggatcaggctgactctccttcccctacactgctggtgtagacagggacaagaatgagaagtcagagacacagagaagctgtgatttgcttgaggtcactaaagtacttaatggcagagttcagacctgacctgaggggcaacaaaagacacccccctcaaatccatggggagcagagtctaactgaatcagatcccagatttcctggggctctcacggtgccaggtgtgtgtacactgagctaggatgggtttcccagggttctgtgtggtcacacaactcaacaatacagaccagaaagcagtggcaagtaggctgaatttggctggtgggtgttttctgtttggcctgcacagtgtttcttttaacgttttattataggaaattcaaacatgcagarggaattgtaccatcaacaacacacacccatcactctgctccaacaatgatcaactcaggcctatcttgcttcatcctataccctccctcgcttgcttccttcccaccctcagatatgtggaagcaaatccaaagataccattccatttcaaatatttcattttgtatctctataatatgggaatttggggggtttcaagacaggatttcactttgttgcccaggctggagtacagtggtgtgatcatggctcactgcagcctccacctcccaggctcaagggatcctcccacctcagcctcccaagtaactagagttaaaggtgtgcaccaccacacctagctattttttttttattttttgtagagatgggggtcccattacgttgttcaggctggcctcaaactcctgggctcaagtgatccttctgcctcagcctcccaaagtgctgggattatagatgtgagccactgtgcccagccaggagcttttacataatcctttttgacaaattttcccccaagaaattagaaagttttatagaaaaaaaaaatccggacttctgtcttctcttaaaaatttggaagctctgccaatactgggcccagatggcaatcactgcttagcacggagtagatgttgacttttcagatgaggggtgtgacatctactttgccacagtccccaccactcccccacctggccatctcacccatacacatcacctgcctggctcctttaggcatttaatttgtgtaggaaattgacctaaaggagatattagagaagacattaaaaacttgaagaatgtgaaaatcagccaggagatagaactgtgctttaatgcgggttatagaacgacattggatatgaagcattttgggaataaactttgaarattggaagtaccagtttgtgaattttgctgagagagatgaaggtggggggtgggtgacagtggtgaagcatctcctatgtgccagtctcttttaccacaggctgtttctcacaaaatcatcaatcatatgcagcaggtgaaacaccttcctattttacagatgaggaaactgaggcacagagaggtgaaataggcttcccaaggtcactcaggtcatgagcagcagagctaggattcagacctggagttggcctgactctaaaacgatgcatgcctcaccatggcccatcactcctttaaagagcaccagmagagagaatttgacaaagtggttgcccgtggggcctgggatgggtggggaaaccacgctaggcctcggggctgctgagggcctgagggaaggaatggggagcccgggcacagaaatagaggagggggctgccccacggctacacaaggcatctgggaagatgctctgctgaaggtggccaggagggcaaaggtcacagtggccattgttatatggtggtggtggggagagggggatggcttcttcttaacctcttcgggtgagtcgaaggtttaccctccagacccttgatgggtccctttggtcccttgggcttcctgagtctccagccagggcctgggacctttgctgggagcttagcatggggtccagcagcccccattgctacctaattccttagcagcccagggtgtctgcctgctacttccctgcctggaaggaaggccttctgcctggtgcgttcctgctgcagcctccactgcctcttagactctcacacaagctcagctccctgtcgcgtcctctcagggccaggcttctccttatcacaagcttagactgtctgagtaactaattggatttgtgtttgcctccacacaggaccctaagacccgtggggctgcgactccctctgtactggtcacagccgcaccctatccccttgcatggggctgtcaaacccaggctggccactgactagcgctggaggggagcaaacgggaggccggccacctgactgatgttcccacaccttctccctgcaggctgtccccttttctgggactattcaaggaggtctccaggacggacttcagatcactgtcaatgggaccgttctcagctscagtggaaccaggtgtgtgtgtatatggatggaaacgtttcactccagcctcgtcccttagtaaaccactgtgcctgtgagcctgggytagttcaaacagcaacatccaagctcacgtgcctggctcaggggaggcccaatgcgtccctaacccatgccacagggcagcactccacaggcacaacctgcacccaggggtgccattaacctggactccaggatgaatggggccctgggagctgacggtctaaggagggcgtgggatggtcagagttggatgattatgttctgggttgaaccttgcacactgtgactaagagttgcaaaaatcaaacttcctccatttcccgtaactgctctcatccactctgaagctctccttctgctgatgtgaaaatattgaaaattgccatcaaaagtaatttggtctcttttggtttcaaggccttttctagaaactactaagtcaattcaacatactaacattgtatcagggctgtttcccaccccctcctccctcccaaggtgggctgtctgggaacagagaagagctcacatggcttctcagtggctgggagggctctagaccctcactcaggcctggctgacccctgccgaggcaccccgaccgggtggcacagaggtgtgcagctctctcctggtttagtgggggaccatgggtggctgcctgctgaactctgcggggcccacagaagagcctctggactcatgactctctctcggaagcctctctgcctcagtcccaggggacctctccttaagaccttctgggcctcacagatcccagctaaacctcagcttggacacctagattcttggtgacctcctccgccattgccatcctgctgtgggacttctctgagagactgcggtgccctcaggagatgccaagggcagggaggccccgatctccctgaaccctccaaccaggggaatcaggmccatgaccctgatcttccgccccttcctctctccctctccctscacctcccccaccccccagcaccaggagggcttcccactcccatcctgtcatatrgagacagatcctacctcagagggccctctcctcttgggagctttctgtctctcccttccttggggcaggaatttcgaaaggactacagggatgaagctgaaggactccaaaggaaaaaatacatgcagatatatttcaaatgcaatcttctccatttattcatttaattaattaatttttttcttttgagacagggactttctttcacccagcctggagttcagtggtatgatcatagctcactgcagcctcaaattcctgggcttgagtgatcctcccatctcagcctccagagcagctgggactacaggagtgcactatgatgcccagctaattattattattattattttgagatggagtctcgctctgccaccaggctggagtgctgtggcgctatctgggctcactacaacctccgcctcctgggttcaagtgattctcctgcctcagcctcctgagtagctgggactacaggctcatgccaccatgcctggctcattttttgtatttttagtcgagacggggttttaccatgttggccaggatggtctcgaactccagacctcgtgatccacatgcctcagcctcccaaagtgctgggattacaggcgtgagccatcatgcccagccaatttttttttttttaactagagatgagctctcactatgttgcccaggctggtctcaaactcctgggctcaagtggtccacccgccttggcctctgcgcccagccccaatttcacatgctctttacatttgttctcttctttcccatttaatcaggcatgtgctggcctccaacaagtgtccactggcacagaaggctctctcttctaggtgtgcttaacaacttccatcttcggtatcaattggtaatcactttccaagacctatgtttcttgtttgctaataccagcacttttccttaaccgttttctatttrcttttagcaaatcatgctgtaaaggcaaaatccaataattaaaacaaaaacacattagatcccaattagaaaaacaaaaacgatgccaacaaagcagtctctgccatacaggttgtgtgcaagatccagacaaatgcaaagcacaggcgccgaggccctcctgtgcctgtcactggcaataatccatgccacagaagactatttgctttccctgggcctaggtttgctgtgaactttcagactggcttcagtggaaatgacattgccttccacttcaaccctcggyttgaagatggagggtacgtggtgtgcaacacgaggcagaacggaagctgggggsccgaggagaggargacacacatgcctttccagaaggggatgccctttgacctctgcttcctggtgcagagctcagatttcaaggtgagcaagaatcccctccccacctctcacccctgggacccccagccctatcaggtgaatggcctttaagtaatcacctaaattgacattcagccagagtgacaccactatacagataacacgctcatttccttgtgaggtgttacccatggctgcctagtctccttatgcaccttcatctgaatctacaggtgcacctgctgcttcttttactctgaaaataagaactagaggagtcatcacgttgctatttggtgttgtgtgtctttgaattccaagctcattccattcctctgctatagccattcctcctctccaggtcactggtaacatttatttttcagcgacatcgttccagcctttatccagggtctattaagggtatagttttgtaagcacattgcaaattaccyttgcaagcagagtaggtctctgggcttgagaagcctgtgggtaagtcagtccaagtatgcttatctgagataaggatgtccccattcgttcagtatgcaacctgaggtcacctctcctctgctccccatgagcattttatgcatatataaataataccgctgcagccataaaaaggaatgagatcatgtcctttgcaggaacatggatggagctggaagcctttatccttaaactaacgcaggagcagaaaaccaaacaccacatgttcttacttataagtaggagctgaacgatgagaacacatggacaaaatggggggaaacaacacacccttgggcctggtcggagagggagagcatcaggaagattagctaatggatgctgggcttgataccaaggtgatgggttgatctctgcagcaaaccaccatggcacccgtttacctagttaacaaatctgcacatcctgtacttgcaccctggaacttaaaatcaaagttgaaggggatggaaatggcagatcacgcctataatctcagcactttgggaggctgaggagggcggatcgcttcaggtcaggagtccaagaccagcctggccaacatggtgaaaccccatctctactaaaaatacaaaaattagctgggtatggtggtgggctcctgtaatcccagctactcgggaggctgaggcacgagaatcacttgacccactgcactccagcctgggcgacagactgacattccatctcaaaaaacaaaaaaaaacagttgaaggaaaaataaataattaataaatgaaaccccaggtgagctaagactagaaagacaaacctactgcaggaaacaaccagaagaacgaaaagtccaactggagcctggtagagactcgggttgatgcactttgggtcacacacacgttcctgtaactggccccacactgaagaccagactcaggtcttcattttctagaaagagggtccaggagctcaggggtggtccccatcccagcctgggatgcctcccccggaacacgtgctctcctctggcaggtgatggtgaacgggatcctcttcgtgcagtacttccaccgcgtgcccttccaccgtgtggacaccatctccgtcaatggctctgtgcagctgtcctacatcagcttccaggtcagactgtccacctggcaccggtcccaggggctgggatgcagggcccagygtasstgtgtctargccctgytgggtgggcccaagccaatctcctacccaggtcactctggggacaacctctgcttccctgtcccagtrcctgcccgccccttctcctctgtcactctgcccctccttctgtgttactgtcyctgtccggaacacctgccttggtctcccagactcctcagctgcccctttctcttcatccctcagtttccatcctggtaaggagggcatattgttctagaaagagcccaggctcaagaaccaaactgaatccagttcaaattcccagctctgccattcatcatctgtgggatcttagacaagcaacttcacctctctcagccttggtttyttcatctgtagaatggtcattgcctgccccccatgggtggttgtgtggttcagtgaggagacagatatcagaggtcacacagtggcccccctgggcccacaccagggtctgtttgacctctgtgttttaacaactttgaatgtgttgccaacatctaaaaggtcaggagagtcaggtatggtggtggaggtctgcagtcctggctactcaagaggctgaggtgggagaattgcttgagcccaggaattagagttctgtctgggcaaaacagcaagaccctgtctccaaaaaactttgtttaaataataaaataawatawataaaactaaataaggtcaggagataccaataccatgtgaaaaatgggaagattagggtatgctgggcccacattcccacagggcaccagcagctgggtgggagctgctgttacccttttggcattcraggctgctccctgagatcagcgaagcacacagtaggccctcagcaaatctgggcttctcgccctttggtcctcatctctcattccctccttccctgactctctcccctgcgggtggtaggggagggaagagctggagggagaccgcacccctgcactgctcaccagagcctggctctttcccatcycatcttggcagggccctaacccccttgcctcatcgccctgcctgcctggtctctccctctygcccctgcctctgcctttcggcttctccttggctctattaatgcttctcctcactgcccggtgccttttgttttaacagaacccccgcrcagtccctgttcagcctgccttctccacggtgccgttctcccagcctgtctgtttcccacccaggcccagggrgcgcagacwaaaagtgagttcaacacagaggccctgggtggccgagcagacagtaggaaggaccgagggtctgagaggctggccccagcmagcaggccactcagggcctacaggccgcatcttgcccacccaagagttccctgtytctgtccgctgggcacccagagctggggacctgggggtcaccctggattcttcactccctcttctttayrtctctccaaggcacsaacgtgtctccctcctgaagccaccgatgtggtccaggcctctgggattcctcaccatgacgacaggggtccagttccccaccccctacacccaaccactgccacagtgaccttcttataagcaaatgtgatcacaccctctccctgcttaaaaatcttcacagcccccagcccttcaaataaagcccaaattctccagcagggtatatgaattcctccccagtctgccccaatccacgtccctgcctcacccccaacccacgaagctcacgcagcctctgcagctcactcaaggccctcttgggccaccatgcttttgcatatgctgtccctggtcccggaagcaccctctgccagcctgcctcgagcacatgcctaattgcccttccatgctctgcctaagtgccgctcctctgggagtcctccccgcctggaatattgttggacgctcccctggtgtccccacagagtctgtatgtatctgtgccatgccagttcacagcaccccattgtaactgtatttgcgtgtctgtccccgttactccacccccatgtccctatgcccatgaggccccagagggccaggactgtggcttgttcatttgcactgtgcctggcactcagtagggactcagtgaatgaatgtggaatgtggttcacacagccagggagaatgggataccagccagggcaagaacagtctactgggtggggcaggatccagracaaggaggtgagcagcccttcctccggccactcaagtagtggggactgggaggaggggcgctttgtctacgcagtcttcttatggctcatcaccgtacagacagggcacctgcctcctgccacgctgacttcaggactggtcgagccccagggaacatttgcagggcagcccaactttggccctggccctggcgctggccctrgctctggggaggatagaaagtgtgctggatacagtcagacagaactggctgccactttggatttgatcccttccaccttggcragcttgggcaagttgcttaatctttctgagcctcgttgcctcactagggacacaggagctgaggctgcttcccttgttggaaagcactgaagcccaggaatcgacccacaataggccttcaacaaataccacttctcaccttatgggtgaaatatggcactggaagtaatgctcttsgctgtgggagctacagaaagcaatgaggtctctatcaaacccagtctcctctctctcgagaggaaccagtggggataccctaccccccaaccccaaagccctgtrcacctgggggtaaaaatctgggtgccacgggctcaggaaggcttgcttgggagcaagagggaggtgggtgtgtccggggaggcatttctgagcacaagagcctccctggagttttgccaccatctcctcccattctgtggtgcccgcgataaccaccattctgactctcctcacccctccagcctcccggcgtgtggcctgccaacccggctcccattgtaagtctcttgctttctttttggatcgtcctcattttggcttttctgggctcatggaggaggcagggccaggcattgggcctctcccattgggagtggggagggcacagaccagacccttgaccatctgcccggcctggtgaggttgggggttggatgtgggggttggatgaaacaacctgagttgccaccccgtgggcagccacggaagaccatgccccacattcacttctgtcacctgcaaagggaggctaggctgagagacgtttccccgagaggaaagatgggccagagccaccagcgtccccatctgtcttctccagggttctaacctttgcccctcgctcatccccttgagagaagagacacctgggcccaccctctgtggggtctgtggggccattgggcttgttacgccccctggagggtgcctgccgtgtggcgccctctggtgggagctggtggttttcacacgtgagagcctgggtgagacctggtttctttcttccagacccagacagtcatccacacagtgcagagcgcccctggacagatgttctctgtaagtctacaagttctggtcagttcacagctgcacagtgtcctccttcaccaaaaactaaactccctagagccctagagtcgggaagaaagcggtttagcaaggaggatggggacactaggggctgagtgcttggctcaggtgacatgtggctaaagctgtccttgggacagcagagattctggaagaagcagggtttatccagtggtggaagagacaagtcccctagagaccgggagggaaactggtccatctgtcaccaagtrgggagtacagtggccccagcacccggatgtgaggttcctggccctgcatcctgggtccccaggatrtcactattgatcacaggcttaagctcttctcctgatggtgcaaatgaggcaggggggcttagaattagtggggctgcctgcggaggggttgaggggcaggtgaccgtggtgtggtctgggaacacggcaggaagttccaggaaggctaacatgaaaagggaggtagacgggcgagtccaagggccaaaggctcacgaggtcagcctcacagtggagtcctctctagaacgcgtgggtgcgcctgggtgagtgctcgcgcacccatgtgctctcccattgaatttcctggtttcttttcaacagactcccgccatcccacctatgatgtacccccaccccgcctatgtaagtggtttctcagggagggcagaggttctgtttgtggtgggcaggctgggggtgaagggccgctgtggggggatccactggccttgaaaaattaaaagcagtcatttgttaagctgaagggcttcaaagcatcccagcgaattagaaggctgtggagaggagctttcaaccttaaaactgtcgtgtcaatatgagcacattgcatgtccctcccttttcaccccacgaaacgagtctttttgtgtttggccaaagttcctttcatgacactaatctaagcccattaatttgaggagcactggaaagttttcctttggcttttatggaaccaagtaaagatatcatgggcttcttctcagctgacagcccaaattcatgggaactggtacaatcttccccttccgcgtggtggctgacctgtcccccttcttccgacagccgatkcctttcatcaccaccattctgggagggctgtacccatccaagtccatcctcctgtcaggcactgtcctgcccagtgctcagaggtaagccaagggctccagtgacctctgggaagagagagcccttcaaggtcagtccagccattcccctggcttcaggaaggctactgatgatggggaggaaatgggactcagaaytcggtggataaaggttcaggtgggctgcccaccscaggttccacatcaacctgtgctctgggaaccacatcgccttccacctgaacccccgttttgatgagaatgctgtggtccgcaacacccagatcgacaactcctgggggtctgrggagcgaagtctgccccgaaaaatgcccttcgtccgtggccagagcttctcagtaaggcaccgcagtctggagcttggagaggctcccatgggtgcacagggggagggggtaaaggaggtttgaggtaccttgaacagtatggrggctgattcctctgggatgaaggcccaaaagaagagaaggtggccaacaaattattattattattattattactgtcccgcatgaaggaagtgctgggatctgctttttcagatgaggaaacaaactcacaagtgcaggttacttgcttgtggtcacacagtcagtaagtgtcaaatcagacccaagaaggaggtgttattcatttcttcatttactcaacaaccattttcttgtcgcctgctttgcgcaggaagcaccccacrtgctgggggcacagtcatgaagcacacagacagggtcctgcctccagggagtttataatttaggtggggaaagaacaaggaaagtaaagcatggacagattgtcacagataacgacagtgccacgcacaaagcaaaacagagcgatgagatagagcgagcctgggaggggcagctagggccaacgtgcagaggcaygggtgtggcctgtccaggaacagcaggcaggcgtgctccaccctgactacatattcaaatcacccagagagcttacaaaggaaatatcagtgctgggaccccagcccaggccaatgaggcagtcagctgggcattcgtattttaaaaatatgccttaagtgatyatactctgcagtcagagttgaaaatgactgatgtagggctttgcagccatggaaaggagcttggattttaacacagtgaaaagcctcaggagtgtttcaagccagggagcaacatactttgatttgtagacagctgtgtgacctcggacaagtgacttaattattctgtgcttcagtttcctcatctacaaaatggagctaataatcatgaatttcctagagttgtaagaatggaatgagacagtatctgtagtatgcttaggacagtgcctggcaggtggcatgtgtgataggagtgttagctattgcaaagggaaggaggttttaacatttgtaycctgactgcttcgtggagaaggcattggggtggaaaagacaagttaggagactgatgctgcaggagcccaggcccagagcactcctgtgtgctgggcctgagggatacagacggcacaggccagtgctcctgtccctgatggggtgggaacagtattctasaccagggaacagtacaggggaaagagcrcgcacagcctgtttagtgaagagccgtcgttcagtggggatagagtgcaggtgaggggcttattaacaactgaggagggagggagggtgggagggagggagagaggaggctgcagtgagggtggaggacttcccaagtgtagtgcaaacggcatgatctctgcacaggtgtggatcttgtgtgaagctcactgcctcaaggtggccgtggatggtcagcacctgtttgaatactaccatcgcctgaggaacctgcccaccatcaacagactggaagtggggggcgacatccagctgacccatgtgcagacataggcggcttcctggccctggggccgggggctrgggtgtggggcagtctgggtcctctcatcatccccacttcccaggcccagcctttccaaccctgcctgggatctgggctttaatgcagaggccatgtccttgtctggtcctgcttctggctacagccaccctggaacggagaaggcagctgacggggattgccttcctcagccgcagcagcacctggggctccagctgctggaatcctaccatcccaggaggcaggcacagccagggagaggggaggagtgggcagtgaagatgaagccccatgctcagtcccctcccatcccccacgcagctccaccccagtcccaagccaccagctgtctgctcctggtgggaggtggcctcctcagcccctcctctytgacctttaacctcactctcaccttgcaccgtgcaccaacccttcacccctcctggaaagcaggyctgatggcttcccactggcctccaccacctgaccagagtgttctcttcagrggactggctcctttcccagtgtccttaaaataaagaaatgaaaatgcttgttggcacattcatgtgggttgaccatggcttctttaattcatttggagacattttggagtctgtggaatcgggcgggggtgctgctgagaggagtgggatgggaaagcatggactccctttgggcagggggtcctgacctcacacctcctcccagagggtctcttgcaaatcccacgagggtgttggagaaagcaggctggggctctagccttttgggcaggagtctcggacacaggaagggtggtaatgggggacaccaggaaacagccccatgcctccgagatgggagaggggctggggcagagcctgtgagggccacagcagggtcagagctgcctcctcagacctggcgtcccagtgggaggaggtggcttggggaggggggtcaggagaagctgatccgaagcaccgtctgggtgtgtgttccattgtgggtctccccggcattaggggttagggcttgcgtgggaaaagtggctcagtgttcatgtgtggggttctgccagccactgggccactgcccaacagcccagctccgcgtccacgtgatgccaacacatcctgcttggctcagcaagaatccagttcctcaggccccagtgtagtcctcggagctggcagcaccagcagcaactgggagcttgttggaaacgcggcatcccgcgcaccgcccccctgccccgcgacacacacacatacctacctgagagatcagagccttcgttttcacaacaccccaggtgagacacacacattaaagctgagaagccggctgggcatggtggctcacgcctgtaatcccagcactttgggaggccgagacaggcagatcatctgaggtctggagtttgtgaccagtctggctaacatgacaaaaccccgtctctactaaaaataataataatttaaaaaaaagtagccgggtgtggtggcgggcacctgtaatcccagctactcgggaggctgaggggggagaatcgcttgaacccaggaggcagatgttgcattgagccaataatgcgccattgcactccagcctgggtgacaagagtgaaattccgtctcaaaattaaaaacaaaacaaaacaacaacaacaacaaaaacacaaacctgagaagccccggtccgggagcggactcctggctgtgttgctgagatgcacggctgtcgcgcagggcacagagcttttctggagcctgaggttgacactacaccttctcctgccacctgagactctgctgctagaagagggaggggagagagaggggcgaagtcggccagggcggccaggaggcagacaccaaacccgagctgggagccgtgtgttgctaggaccccagcgtcccctgctgagctccttccttggttctgaccaggagaaggaaatggggctcagtctcttaagaagccttccttggccagctccaaacccgggagggtccccaatccctcagacgaggatgctgtggcccacacttgcctcgacatgttgccttcccagggaccacatccgtatgagacaaactcacatgggacaggtggccccagagcaaaacgctaagacagtgtctaagaagaagctcaaggccttcccagaagcgctggcctcatgtgagaatcccacccacgccagaccccgtttcagatcctttgtgagggaggcaggcctgtgccccctgccctaccacaggtctttggacaagcaacgaagctccatcttctgctgtcacacctggcagccatttcagaggagccatggcctgcctgggttgtccctctgtgggggatctgtccaggctgcgacacccaccagctccccactctgtataactgagggccacattccctacaaaacagcccccaacccccctcccccgccacacacacatacagtgtgattaaagtaaaatgcaattcatgtaaatatctccatcaaggaatcatacagggaagacccaagtggccgttgggaacagactgggtgttagttttttaaatacagaggcataaataactgtacacaaggcagttaaatacacagtggtgtgacagcacctcctggtggtcacttgaagtggtgcactcagcagcgggttccatctttcacccacttgccaggcctggcgttgaagatttcgtctccaagggaccaggaaggccccagcttgagagaggaggctctgatcaatccagggtgctacttggtaggaggtcaagtaaagggcttgatggggaatgaagtgaaaaaataagatgtgaggctgggggatatcactttcctccatctccccaggccctgtgacctcggataatgcagagctggctccgtggttaagttctgtgccggcagctttaacccctcctacgggccgtcagagcgctgacatctccaggctcctgggctgcactgccgccttgtctgcttgtagggaaatacagcaccaaagatatcttcgtgatagcacttctggctcttttaggtggaaacagagaccaaagtgtcaagtccaggctgggatgagcccccggggttgcccagcttccctatcacatggacctccatgagccatctgtcttcccaactgtcatactaagattgtgcttgaatctggtttagactctaacggccctcagcacctgatctggtgtgggccctctaaccatctccaaagctttacttagcatacccatttcctgcccagcactcatcccccacccaagatactccaggaggtgtgagctctgagataaatatgtttgggaaatgccacatcctttctttccttccagccttgaagggtcctgatgagcagcagcatgctgaaggcttccagaagtcttgtagtaaagcaacgtgtttgccttgccttaactaagcatgtcccaggctattcgaccttggaacctttttgatgccaactgtctaccgacccattcaacgcatttggggaaatgcctgttatctcctcactgttcttcaaacacaccagcttaactcccacccccggggcctttgtacctgctgcccctccagaacagcccagagtgtttccttcagtatccacagggctcctcctcaccatctcaggtttattctcagatgccgccttccagctccgccttccctggccaccctatttaaaattacactccccagcgttctctgggctgtttcctgctgtttttctctgaagcactacagctcttccttgtttgggtttgtcagccccagtagaatgtaaagaatttttgcctgattcatttactgctctatccctagcacatagtaggtgctcaaaaaatgtttggttgaacgtacgaatgtgtcttagggagagtatggaagtgacaatcacaggctttggtaccacagagaggcagactgagctctaggctttcatattcactgctgtggtccccgtaggcccccttccctctgcaaaatggggtgcctccctcacaaaatcctcggcagcactgaacaaaatgtcacagcagaatctttggcaagtagtatgcccagtgtaagcccttgataaatatcactattatcttcatcaataaaatgcaagcccttcctgctggggggatgagggtgagcagacgccagcctgggtgtaaataagaagtgtgaggttcacacgaggctgacaaggggcagccttgctctcccctgtgttcacagccttgctttggccacacagatactttctgaaaggggggtttggggagaggccagggagactctcctgcccccattctacagatggaaaaatggaacacattcccccgacttctcaaagctgccaactggtccaggatgtgcagtagggccttctgacagcccacccagctcagatctcagccactgctaagattctcttggggcccagaacttttctgggcctgactcccctgggtctacctgccacccctggtcctggctccaacggcctgtgcccttggccggcaccttcagcccacacacccactactataccttgagctgaaagaaatagtcctcgacctgctcctcattcaatttcagcttggcagccaccagctgcttcagggtgtgggccacatcccaggccatgcgcatatcccagcaaacatagaggtggcctggctcctcgtggagtacacggagcaccttgctggccagctgctgctgcaggatgtcctgaacatcgacctgaaaccagaggaagtggtgggttcagtccccagctgctggggacaaggcttgcaggcaggcctgctgtcctcagggaagtggggagagggcactaaggggtgaggagtgagtcccctcccagccaggaccttgcatggggccaggcttaggatgaggcgcacagatgcccctggggctgggctgggattagagagataaatgctggacacagtcctgccctcgaggggctgaccatccagtggggatcccagactgtctctgaatttgccatgcctcaaagaagcatcagtgaagccagtccccctgcccagggctctgtctatactctggaaaaggtagcctctcaatgcagactgtccatcaggtccctgcagggtacggatcccgggcttcgcagttagaaggtccaggagtcagtcggggactctctgctcctgctccacacaggatgcccagtggccccagcactgggcacagagcactggacccgagaggtgccctgatgggacaaatgtgtgaggaccgagagtctgttctgacacctccggctcaggagacaacgcggccctgggggcagcagagcctgtctgagggccgtggtggaagcgttggccgccctccagtcttgctgggcttgacacagccagcctggatcacctctccctgggcagtcgcatgtcccaggggtcctgctggggaccttcagcaggctaagctctgggcttaacccgcgtgtgacctaggttagtcctgaacctctccgggcctgtcgcttatgctgtatgagagggtgtaacgctcttcatagcatcactctgatggttgtgaactacctgcattttagagctcaagagctgaagtctcagggaggcgaggggcccgtggggacccagggctcatactgaagcctgtgtgtgtaatggcttcaccagcttttaggctgcatttaccttagcttgccaggcaggagggaataggcgtgtgcaccgcatgcagcacccgcttccgggtcatctctagcatctcctcccggtaggtggcggtcctcatctgggcggcggcaccagaagaccagggtcctgcggccttccagcactactgccgggagtcccgggctgttgttatcatgttggccaccagagggcgcaacggctccaagcccaactggaattctcacttaactcccacaagtatcctagctagttaatagcattatccccactttacagatgaggaaactgaggcccagggcattcagatcactcatccatagtcacacaactgaaaatgcagatgcgggattccctcagcccatcggagctcaaaagcaaggactttcccattatccccactaccaggagagggagccccggctccggtgccggagacgtgaaggcggccattctaacccacaaaggcccgcacagggaggcaaacttgggagatcttccctccagagaggtccaggaaccgttcgtggggctgcggttctgattctaggcaggcgctgcccctggtgcccctgccacctgggaagcctccagccttacccttccgctgggagtcatggagccgctgctgccagaaactgtggaagggagcgatacctgtgccaggcctgacaaggatgcgaggatgggagggatcctcggggaggtggaagccgctgacacggaagaggacaggagaagagggggccagtcctcagacaccccaggcccacgcacacacaggatggctggggagctgggcctgtggggggtggtcgtgaggagatggagaggacaagaagctcctatttgatttcccatgtcctg

SEQ ID NO: 96473 - DNA, 29524 bp, Homo sapiens
gaggataagaatgtgtattctgcagccactggatgaaatgttctgtaaatatctattaggttaatttattctatagtgcagattaagtgcaatgtttctttgttgatagttgatattctgtctgggagatctgtccagtgctgaaagcggagtgttgaagtcttcaggtattattgtgttggggcctatctctgtctgtagctctaataatatttgctttatatacctgggtgcttcagtgttagatgcatatatgtttacaagcgttatatcctcttgctgaattgtcccgtttatcactatataatgatcttctttgtctcttcttgtttttgtcttaaaatctattttcctttacatataagcatttcccctaataaaatctttgcacatataatttcatcttagcaagtgctttcctgagaactagactaacacacaggacatctgagaatttctttgggtcctattcatttgcaataatccaagtttactaaagttcccaaagttgcattttttaaaaattgaaaatgggtgttgtattagtctgttctctcactgctaacaaagatgtatcccagactggataatttataaaggaaaaaggtgtggtttttttttttttttttgagatggaatcttactctgttgaccaggctggagtgcagtggtgcaatctctgcttgctgcaacctccacctcccaggttcaagcaattctcctgcctcatcctcccaagtagctgggattacaggcatgagccaccatgcctggctggtttttgtttgtttgtctgagacggagtctcactctgtcgcccaggttggagtgcagtggtgtaatcttggctcactgcaacctctgactcccaggttcaagtgattcttgtgactcaccctcctgagtagctgggattacaggtctctgccaccacacccggctaatttttttgtgtttttagtagaggtggggtttcagcatgttggccaggctggtactgaactcctgacctcaagtgatctgcctgcctcggcctcccaaagtgctgggattataggcataagccaccatgcccagccaggaaagaggtttaattggctcacatttcagcatgcctggggaggcctagggaaacttacaatcatggtggaaggggaagcaaacatgtcctttttcacatggcaagaaatgccaagtaaaaagggggaaaccccttataaaactatcagctctcatgagaattgactcacatgagaacagcatgagtgtaaccacccccatgattaaattacctcccgctggatccatcccaggacacattgggactatgcgaactataatgcaagatgagatttgggtgaggacacagccaaaccatatcagatggcttatagaacacacacacagacacacacacacaccccaaatttaaaaaaaataggaaaatatatatttttaaattttattattattatactttaagttttagggtacatgtgcacaatgtgcaggtttgttacatatgtgtacatgtgccatgttggtgtgctgtacccattaactcgtcatttagcattaggcatatctcctaatgctatccctcccccctccccccatcccacaacagtccccgaagtgtgatgttccccttcctgtgtccatgtgttctcattgttcaattcccacctatgagtgagaacatgcggtgtttgattttttgtccttgcgatagtttgctgagaatgatggtttccagtttcatccacgtccctacaaaggacatgaactcatcattttttatggctgcatagtattccatggtgtatatgtgccacattttcttaatccagtctatcattgttggacatttgggttggttccaagtctttgctattgtgaatagtgccgcaatgaacatacgtgtgcatgtgtctttatagcagcatgatttataatcctttgggtatatacctagtaatgggatggctgggtcaaatggtatttctagttctagatccctgaggaatcgtcacactgacttccacaatggttgaactagtttacagtcccaccaacagtgtaaaagtgttccaatttctccacatcctctccagcacctgttgtttcctgactttttaatgatcgccattctaactggtgtgagatggtatctcattgtggttttgatttgcatttctctgatggccagtgatggtgagcattttttcatgtgttttttggctgcataaatgtcttcttttgagaagtgtctgttcatatccttcgcccactttttgatggggttgtttgtttttttcttgtaaattcatttgagttcgttgtagattctggatattagccctttgtgaaaatatttttttaaaagaaaatggatggcttatagagataagttaggctctcccctattttttgatttactgataggaaaaggggtaaaatcagattcttagcttttatgctttgcctttctttaatccaagctcatcagtgtttttgtcatttgttctgtaatgcctagcacataacaggtcctcaagtatttagaaagtaagtgaatgaaccagaagtatgcaattagagaaagaaggtaatagttacttgctgctagttagcagttctgacaaaagcaagggaagatattgaaaacatgagcaaaaggaatttttaagtgatctgagtctttagaacacgagctttaaatgagaatgacctggattcagatactggctccaaacctgtccatcaccttaggaaaaattattagtttcctggagggatctgaatttgcagccactagtattgaactggaaggaaacctagagatcacacctgatgtaactccatccattttctagatgaggcaataagcagattcatagcagctgaaatccagtgtggtcctcaaatctgttaggtgctaggcactatggaataagtaaatgacaaacactgatgaactgtgattaaagaaaggccgaggcgggcagatcacttgaggtcaggacttcaagacgagccctggccaacatggtgaaaccccatctctactaaaaatacaaaaattagctgggcatggtggcatgtgcctgtaatcccagctacttgggaggctgaggcaggagaatcgcttgaaccccagaggcggaggttgcagtgagccgagattgctccatggcactccagcctgggcaacagagtgagattctgtctcaattaaaaaaaaaaaaaaaaaaaaaaaaaaaaaaggaggccaagaatgaaaactgagaatctgattctatccctttcctattagtgaatgaagaactaggggaaagactaacttattttctaactacatttactatgtattccacagagtcaacgatataaaatgacataccaaaagtaccaaataggtgcccaataatgttatctcttagatcatctttccctgatcttgtctagtacggagaaatgaagaaacacacattaggttgttttttattttattttatttttttaagagataggctcttgctctgtcacccagactggagtgcagtggtgtgatcatagctcactgcagcctccaactcctggactcaagcaatcctcccccacacactaggccttctcaacagctgtggatctcatttccttatctagaaaatggagttggatcagatatgatccctaggtttccttccatttcttatactagcggctgcaaaccgagatgcctgcagaggccagcagatgactgcactgagaccatcaccctaggtagggaccatgatgaactggagtgcaccagccttctataaaggacatacatagctgcttttgagtagcagttgattgctctcactgtgcaaggccaaacatgtctacggatgtttttgatgtacaggtcatcagtttgtgacttctgccaacagttccttaagcattttttaagacttaaaatggttttggattaaacatataaaacactcattgcataaaggcagtgagtatcacatgatcttaggcaaaaggatcacgtaggtgctcaccacctaacttaaaataacaaactttaaagattcttagtccttcagaggtaaacattattctaaattaacattccctctttaaagtttttaccatgtttgtatccttaaacctatcattaatttagcaattttcttaattttacatacatgcaattatgcaaatgtattctgttgcttccctcccttcctgccgatcttatttctgaggctcaaccatgttgttgcttgtcactgtaattcattttcaccagcagtgtttcgttatatgaatacaccaagatatagttttccattcaacagtttgggacatttggcttgtttgcaacattttgctactacaaacagctgcaatgaaccctttggtacaagccaggtttttccaagagcggtgtgtttgaaagcgtgagtagcgacccattactgagtcatgagaacaatttagtgggtcagccagcactgtttttaagtgaagtaacctaggttagatatcagatgcatttcatattgtatagtgtcatttcacgaaatgtttgaatgttgtcaacatgtatacactctttgtgtgtccatgtaaagtggtcctgcaatgtatacttccaccagcagcatctggtctgctctacatctgcaccaacactcaatattaggcttctaatttggtttcagtctggttggagtaagacagattatcattttggttttaatttacatttccttggttacttgaggcagagaaacttttcctgttggtgtaggtggattatttttttaaaaggataatttgttcttccattgtagaaacttgactcttgacatgaacccaactttaactcaaaaagactgcccttaaactgcctgcattagctgagaagtgattactgatatcttgcgctatataatgaacagaactcatgtcaggttgagtacaattcacaatagcaccgaaaagcatggaatgacccctggatgagacaaccttaggcaacatgggatatatccctaaactttgggatgtattccaacacttttgataatcttctaattattattactatacttttttttttttttttttgaggtggagtatcgctctgtctcccaggctggaatgcagcagcatgatcttggctcactgcaacgtccacctactgggttcaagcaacaagtagctgggattatacctgcccgccaccatgcccggctaatttttgtatttttagtagagatggggtttcaccatcttggccaggctggtcttgaactcctgacctcataatccacccacctcagcctcccaaagtgcttggattaaaggcgtgagccactgcatccagtctattattttttgagacagtcttgctctgttgcccaggccagagtgcagtggtgtgatcccagctcactgcaacctccacctcccgggttcaagtgattctcgtgccttaccctcccgagtagctgggattataggcgcccaccaccacgaggctaatttttgtatttttagtagagatgggggtttcaccatgttggccaggctggtctcaaactcctggcctcaagcaatccacccgcctcagactcccaaagcgttgggattacaggcgtgagccactgcacccagccctgagaatctcctaattattgaacactactatagcatactgatttctctaacaagatggtctgttcttttcaaatggctctatgaaaaaaaaaaatttaaaaatgtaaaaagataatccatgcaacaattacataaaaaagtaaagctgtattggggaatggatgctaggaattcaattaggtccatttattggcctgcatgtgccagcctgtcaatgcctatgattcaaatttgtgcctcaggagaatctgaaattatcacaggtcttacttaatgttttggagttgtgtgcaaataatcaagaccatacatgtgaaatctttgaatgccaagtctcttctgtactttcttttattaacatcatagtctttgcatcaagatacatagcaatgatagcaggtttctttttaaagcttagtattaaatattaaatatmtttccccatttaaattttacattactctgccaagaaaaaaaaaaaattaaaactcaagttacttgaagcctggacacacttccatgattagccgggctaggtaaaagttggkggctttattcttcctgctctataagcagatccaggccctaraaagatgggaccagggtatataattgtttttgaaaagkgtgctacaaaaatggatggcctgttataagccaggatacaaagttaaggatrggggtaagggagggacattttcttccagaagaaaagacagaatttctgaagagtcccagtccataattttcccaaaatggttggaggagagggtaaaatctcaacatgagtttcaaagtactgtctctgtgaggggccggtagatgccttgctgaggaggggatggctaagtttgaccatgccccatccccagctaggagaatggaaatggaaagtttattgcccagtgggtgtgaaagtgggctgaagcttggttggtactgaattctctaagaggtttcttctagaaacagacaactcagactcttcctctcacttcagcaaagaagttatttttaaaagcacttgggaagttcctcctccaccccgcaggtgggaaggctcagagaagggtgtcatcagtacagccgccttctaggccgtaacggaattcctgaaggttggagactccatagaagtggacaaaggctgctgccaccaccaggacatggaaaatctgatgagactggaactgtaggaataaaaagaaaagagcctttaggataatgcaaggaggaataagaaacaagtaggagaaagcatttgcttcttctagtttatcyttaattaaacaaatttgttaataacattaaagtggtatatttagaaagttttaaaaacacagtccttgtcagagatacaccaaaatgttaatattgatgatttaccttcaatgcacatatatgtacctccaaacactatatgatcccagtctcataccaccttttcctcagccctttaactttgggctgttcactcaccatcacaggacctgctggaagattcatttcttacccatatgtcaaattttccaggaaagaagcgctcaggaattcgagcagcataaaggccagctccagtgatgtacatcacagccatgaggaagaaccagcccatctggcccactgtggtggccttgacaaagccctcagcgatagtaaagtgcatggtgggcacgacgccactcaagccaagtcccaggaacacgcctgaacagaacagacataagactgtcaaacaaggaaacagccaccgcatggaaggcactgctgtcttactctggaatttcratgtttatgataattagctatttttggatgaatagtacatgtttaggaaacttagctwcaagatggataacactcaacagatatttcttctatgtcctgaatgggaagaagctgtgtaagtgcttactaccttttaagcaccaagaacaaagatctcatattcttcattatctgttaaggaatttaggtaaaaatggtatgtcaagactctctgatggctaacttgggtacagaacttagatgtcaaggcttcagttgcctcccaagtcagagaagcataggataggcttcctgttaagatcataaaagtcttacataaccagaactctgacctcctgagtagacagatatacccagattagcagttatcctgtagctgctgggacacacaagtaaggcaagagcaagggaagaatgggtatgtgtctcatcattacactacacataactgaagggcagggaccacctctccatctttgtaaatacctttgtttaagcacagtgcatggcacgtggctggtgcttgataaatatttaattattattatttttttcttttctttctttctttcttttttttttttgagatagagtcttgctttgttgcccaggctggagtgcagtggygtgatcttggctcactacaacctctgcccccgaccaggttcaagtgattctcccgcctcagcctctcaagtagctggaattacaggcacctgccacaacgccgactaatttttatattttaaataaaaacagggttttaccatgtcggccaggctggtctcaaactcctgacttcaagtgatccgcctgcctcggccccccaaagtgctgggattacaggcgtgagccactgctcccggacaatatttaattattttaactgaaggttaaaacatagcagatattaattgtaaagggactaaagactagtggtaattggtggtgttgctgcaagtaataaaagcttaaaataagagtccagatgagatgagacaacacaaagatgtttatgcttgtagctattactttgttacctgtttatgctcaaggtattttcattcaccaaaccaggtattccattcccttagtaaaatgcctctgagtgttttaattttaatcccttggtctgagcttgggactcgggtcactaaaattactgtgcttgctacatttttaaactgtcacaaaccaagtataagagtagctacatctgtgcttgcagttaattgaccagctgggtaatgatctgtcctattggcattctactgaaatagtatgacactgggrgttgagaactgagctttgaaattgatgctgttttgaaagttctgaaacacaaatcagggtttgggtggggttctcaagctgcaaaccttaaggctcaaataggtttgagcctatcaggcctaaggtctaaatacctctgaggtgtacgtacatcttccgacctacctgctcttgtctgccggtgcttaggagtggcaaaccggtcccactgcgccacaatgatggcagaaatgcccaggacacagacgatggagaggtagatgagccgtggctgtggggagcagtagaaggaataatagagccaggggacaaagctccccataattagaagagcaatccctgaatagtccagtctaaaaagaaccacaaaaatgaaacaaatcagtgggggaaatgaatttgtatggctcatttaactagctctttctgttctccacctgctcccagatttaaccattccctcaatctatcctgtattgtagaytcccatacaatctatcctgtattctggattaaaattccacaaggtcacttctattttacgatggaaaaatctctaagaatccccattcaaagaactctatccctttcccttactagtgaacagccgtatctcccatagtagacacttgaatttagaaattccatcacaatccagctggttcccagcatcacactcaggaaaggctttgaaaattctcctattctgatagaatgagttctaaaaacaaaattcttaaattgggagtagtattaagggatactctagctttttctatcttagttgactttttaaatgaggaaaatgtaccttcttactggtgttgttagaaaaaacaaaataatacaccactgtcgccaccaaaaccaacaataacaacaaaaacaagcaaacaaatagaacctcaggctcacggctgggcaagagagaaagcacacgatgatggacatctggagcttccagcaatgcatgggcagcaaagataagctttacttgactgctgggtaggagcaccagcagaatgaagcatagactatttaccacaccctactttggcttgggctaatagtaagttacgcttgtacaaggtcttggaaagcagccagtgcactggcactctaagcctcacaaaagatagtgcttttcaggtagaaaatatattccacaattggtctctccatctgttgaagaggatgcagtaagtctgttcatgaagtgtttaagagaawagcttcatcaccccactatcgccacagaacagagagcctttcctctggcatatcaagaaacctttaggagtgatatgagctcctatcacccagtaagcactgggatctcaagatgtgacaacagtgcacagtattttcctatggtgttcttttaactcacttggaaaaagtccgagagactttctctgaatgacaatagacggtgtgaaagagccaggagaagctgaggcagagcactgcacccaaaaagaacatcccaaaaaccaccttctcctgtagaggggccatgaagtacatatttggtctgagcatggtcaagattcccaaaaagagaaacagcacgaaacctgcaggagggtaaaataaaaaaaacctgtaagaaaaaagggaatgtgtacactttgayggttgatgtttttgaatcagagagctacaggcaacatcactaatcatcagggaaatacaaattaaaagcacaatgaaataccaccttacttctgcaagaaaggccattattaaaaagtcaaaaaacaacagatgttggcatggatatggtaaaaggggaatgcttatacactccttgtgggaatgtaaattataaaytagtataacctctatggaaaagggtatagagattccttaaagaactaaaagtagagctactatttgatccaccaatcccactaccaggtgtctacccaaaggaaaagcagtcatatgaaaaagacacatgcacatgtatgtttattgtagcacaattcacaactctaaagatatggaaccaacctaagtgtccattgaccaatgagtgaataaaggaaatgtggtgtatgtacaccatggaatactactcagccataaaaaggaatgcaataatgtcttttgcagcaacctggatgaagctgaaggccactattctaagtgaagtaacttaggaatgaaaaatcaaatactgtatatgttctcacttataagtgggagctaagctatgagtacgcaaaggcatatagaatgatataatggactatggagacttagaagcgggagggggagataggggtgtgagacagaaaaactacatattgagtacaatgtacactactaaggtgatgggtgcattaaaatctcagaattcaccagtatataattcatccatgtaaccaaacccccccccacccctttgtaacccaagagctattgaaataaaaaaaaaatcagaaagctatgaggtttagctgtgtaattgcagtccaatgtttcaaagaaagtggcactggtcacagaaacccagacaaaaaagaccattttttgaaatgttggcattttacttttacagttggaaattacgaagtacaaggaattgtctccacctagaacagttctgccagggatcacaaaaaaatatctagtcccaatttctttggtttctaggccttttactctcagtcttaaagatcagtgatcaagggtcaaccaaggttattagcttaaagtcattagtagtttaaaggtagaatcccagctgccaatcgatctgaacaactttgttgggctctataatcccttcgcagttagggagacaacaaattccacctttccccatcyaaatcactcaccaagcagatgggtccagatgttgccagtttctgtatgaatgcggaagatgctcttgaagcaagcccgaaaggagggcatgggaggtctatgaccatgtagcagatagtcgttgtcctttagccagtcagggagcacatcatatgggatgaccctccaacgtccctcccagacctagaacatatacactttctctgggtagggcactagatagtaccttccccaaggacaagcagtgatggagaactagtctaagaagatgtcagtcaggctctgaatggtcctaggtaatagtggagaaccagcctggactgggggatatccaagacatagcatgaatggggctagcagagtcctgactcatattttgaccattaaaaaaaaaaaaaaaatcctggctgagtgtagcggctcatgcctgtaatcttagcactttgggaggctgaggcaggtggatcacctgaggtcaggagttcaagacctgcctgactaacatggtgaaaccctgtctctactaaaaacacaaaaaattggccgggcatggtggcgggcacctgtaatcccagctactcaggaggctgaggcaggagaatggtttgaacctggcgggcgggggttgcagtgagccgagattgcaccactgcactccagcctgggcgaccgagcaagactctgtattcaaaaaaaacaaaaaaacaaaaacaaacaaacaaaaaatctctttgtctttgtttcatgttagtttatctggagaagttttaggtaagtgtttctcaaccttttaagaaaatatggtccaaccaggctgggcgcagtggttcacgcctgtaatcccagcactttgggaggctgaggcgggcggatcacctgaggttgggagttcgagactagcctgaccaacatggagaaaccccgtatctactaaaaatacaaaaataagccaggcgtggtggcacatgcctgtaatcccagctactcgggaggctgaggcaggagaagtgcttgaacctggcaggcagaggttgcagtgagctgagatcgtgccactgcagctgggagacaagagcaaaactctgtctcaaaaaaatatatatatatatatggtacaacctcctttaggctacttgaaatttcaaaattgatatactgaataaaaacaaaaaaattataaacgttgttttaaaaaacgtacagatccctcctttgcccctctccaggagattctatctcatgtctcatccctcccccaattagattctaagttcttaccacatctttttagagtaggggttcttaatctaggatccatgcactatggacaggatccagggaatagatggaaaaaattgtatttccatttacctctaagtaaattgagcattttcctcaattataagcataagcaacaaaccacagtattagtagaacttgtggctttgtcaccaatagaaatcagatactctcacacattagttctgcaggtatctcaaaatactgtttctattcatcattacttagaaattacaaattttaataaaatacattagtgctcatcattcatgtatatttaatgtgttaacaaaggcattcatattactgtcatattgaaatattttgatgacttccaaaggcrccccttgcatagaaaagaatccgttttaagaatatattttgaacaatgcctcacagagtaggcagtaaaaatttagccagtcttcacattgatttacctcatcttaaccaaaaaacaaatccactccttcccaggaataaaagctcttcgacccagtgcaagcttgctggctggggacatcccagacaggcctgctgcccttccccttccaggacagaagctcataggccataccttgtacacaaactcttccatcttctccatggcgtggtgggcttgcaggggaagtgtcagtacccgcacctcctcctcttcttcctggggcactgggcatgtttgctcttcttcagcctatgggggaaaaaacccacaacaatccagggagtcatctcataaattgtactattccagagcagagagacccagaaaaacccaaacctaatgccttctgcccagcctctttcctacagagggtcttgtggtctcttctccaaaagcatacacactgagtttacaacactagttagaaatttattaatacttcgtaaatgctggagtgaacattctatgcagtgcgtaaaagaaggactgtcacagagactagcattgggggaatacaccagctctaggtactgaatgacatccttttctttaggatagtggttcttaactttcctcagtttcccaaagagttctcttttctaagccattacattttctttctttcttttttttttttgaaatggaatatccctctgtcacccaggctggagtacagtggtgcgatctctgttcactgcaacctccgcctcccgggttcaagcaattctcatgcctcggcctccaagtagctgggattacaggcgcccaccaccatgcctgactaatttttgtatttttagtagagatggggtttcaccatgttggccaggctgttctcaatctcctgacctcacgtgatcctcctgcctcggcctcccaaagtgctgggattacaggctgagccaccatgcccagcctacgttttcaaaacaacgaaaaagacacagagtctcagagagttccataacaataattctgttcagagttccctgttcactgactctagggatgctgtcatgattgaaactttgtatctacagcagctcccaggagtaccagggcctcagaactggttccatggaaaacagcggtactgactccagggcctaaaaaagcgcacccagagggccgggcgcggtggctcacgcctgtaatcccagcactttgggaggccgaggcgggcggatcacgaggtcaggagatcgagaccatcctggctaacacggtgaaaccctgtctctactaaaaatacaaaaaattagccgggcgaggtggcgggcacctgtagtcccagctactcgggaggctgaggcaggagaatggcatgaaccctggagggcggagcctgcagtgagccgagaacgtgccactgcactccagccagggcgacagcgagactctgtctccaaaaaaaaaaaaaaaaaacacacccaggagagcacttgcctgtgaaagggagagaactttctctctctctatcccaaggctccgaatcatggctatagaaagcctggcagttcaactccttttctgggctatttctctcctgttgctgatggtcactagtaaacacatggtccatcttagattttgtgctacagcttccagccagtctaccctaacatccattctctctcttcctaagtaacaaagcccacggttttgttcagggtggcaatgttactgcaattttactcaggctgcactttctaacctccactgcagctgaatatagttatgtaagtaagttctggccgaagtcttatgaggtacttcctgatagtccctttatttatttttgttttttctgagagggggtttcactcgttgcccaggctggagtgcaatggcacgatctcggctcactgcaacctctgcctcccagattcaagcgattctcctgcctcagcctcccgagtagctgggattacaggcgactgccaccacacccagctaatttttgtgtttttagtagagagggggcttcactatgttggccaggctggtctcgaactcctgatctcaggtgatccacctgcctcggcctctcaaagtgttgggattacaggtgtgagccaccgtgcccggccctgatagtccctttaaaaggcaaagagttggccgggcacagtggctcatacctgtaattccaacactttgggaggctgaggcaggaggatcacttgagcctaggagtttaagatcagcctaggcaacatggcgagatcttatctcaataaaaataaaagggaaagagagggcctttcttctcgtttccctttcatggggggtagaatgtgggtatgatgggcacatattaagagtgatgggagagcaacacaggtgcctgacagtggtggatcctccatatcagccctggattggttacttctgaaattcttttgcttgagagacttctgtcctgtcaaaactgtaaggatttttgtgtgttatatgaagtcaaacctaatcctaattgactgcttccttcattcattcagatatttactgattatttattggactgcaggccttgtgctaagcactggtgttacaaagatgagtgcattcccaaaagcttacaatggggaaagcagacaacaagatgtttataacagtatcatagggacttggatagagacatttccaggatgcaatgttcctccttttggacggtgagctcttaaaaaagagaaaatgacagagttctaaggagagaaactgaacaaggggatgactcctgggaagatgacttactttgggtggrttggcgattacccgtttgcccttctcttctagcaggggtcccagttcagccagttccaccgtgtcagcttccctgttactggcaggagccccattcccctgtgccaccacagatcctttgtgggaagacatctggctggtacctcaataccctgcagcttcagcttggggaaaggttggggtctctcagccccagggggcagagatctccctctgatkgtagacactaaaagmaaayacaaacatgaaggattgacaatttattcctcttacagtttcatttctatactctaatactgaataagaagctaatcaactcatatcctgtccccaattctaaaggccagttaattgcttaaatgaaatctattcctgtcctccctctttaatgtcaacctttacccagaacctcactaatcttataggtaaggctgaaaatgtaacacctagttgcttgctttcatatgatctatggttactgcaccaaactgtcaccatagaaaaacagctacccaccctcaactccctcccacaggtatggaaccatttagtgagaagaatctcatctatcactcccaaagctcactctgcccaagaaaggcctagctctgagaccgaggaataaaaatataaagccaacatctggctgcaattactacaagatcatccaggcttagaaatgaattaaatgccaactgaactcagttagaccttatctacaaatgctctgataaatgtgtcatacatacaaaaggaacttggttgtgggacagatgcctagtggttaatttctctgcgaagtctactaattctattacaggattatagcctgagttcaaccctgggataacaagctttcatcacaatctgtcctgcaagcaagcaagaacttacctggaagcaggaaggtgaagacaaggaggcagccccaatttaccctttgccacacacatacctaataaccagctccacaataacttgtttcaaccaccacaacccataatctaagccctactcaaatgagtatttcagaaactagagacaggcacacacaaaatcagaaaaacccagaattccattttctaggaaaaatctcagacactttaggttttcctgggttggattttcacagtagtctttaaacaggcctcagggaaatgcaaataaaaaaagagggaaagagggagaaagtttccaaagatttccactatgctgtaaattattagttctctccccacctctacccccatacaaaggactttattagttatagcaatagcagtagccagaatattagcattttcttgcattggttacccaagccccacccaaacccaaataaccacattgcaatgcagggagggccaggtaacaactgcacatggagtgggttgcattccgggagaggaaacttaagcttagggagccccaatcttttatattgggcagtaaacataactttgctcctgagggagacactatatcatccatggctattcactatatacaaatatctttgatatcttgtgtcagttcttttttatctaagagtaatcacaattccttctcagggattataaatctctttctctgactccctaactctctctgtctctccccctccttccctcctggagctgggacacccttcttttcctgcccttggacatcagaaactccaggttctcctgccttgggattccgggacgtgcaccaatagccccttgggttctcaggccttcagccttaaactgaaccagttatggactttcctcattgtctagcttgagatggcatagtgtgggacttagcctccataatctcatgagccaattccccgaataaatcccatctctatccatatgtatgtatcctattggtgctttctggagaacacttactaacacatcaggtaagggcaatcctcaagcttctaaacagtcatgagtcatgctatgctcaacccacaagcayagttgaaagcaaccggcaatctagtccaagagagacaaaaacaataacttgctatacagcagacctttatatggtgtcaacacatagacagttcctcttcctttaaatgtgcaagactctgacgagatgccagcacacagtcatagtgaacaattgagctaaggagaacaggaagctggaagcctatgaaaacctcgaggatgggcaacccgtgtgagagggacacaaggaaatctttctcaataggctgacctcaaaacatatttcctcaaagtgaagtactactgaatcagcagctttactaaaaaatactttatatcgcaagcaaaaaaaaaaaaaccaaaaaacaaytttatatcacaagcaaaaaacataaatatttttgggcatcttagataaatctgaaaagaggggcacacttagcttgttacttactaagttactgttggaagtaacttagatcaggctaccagggcagaaacaaaacaaaacaaaacaaaattctggttctgagatgcaatacatggatcataaaataataaatatactttattttagttagaacccatttcaaaatgaatgaatgaatggggcagattccagcttgccagcatatgacttagcttctagccacttagataagggcttatgtgcattttcttgtgcttgtggtggcttctcttatccctttccccagagtaagtcaacacattcattgaatatttagcaagtgtatttaggactagcaccctaaggcattctaagacactgtgcaaaatacaagacactgtgcaaaatacaagttgaacaagttatagtattgttttcaaagagccagataacataggtagtttgtgatatgcacaaaaataagtgatacaatttgattgctccaggagggcagtggagggagagaacccctcaactagaatggtcacacactaaatttagtaactttgagtgctatgtaactattttactagaggcaatgagaataatatagagaaaatttaagttgggcaattagggtccaaagatcatgtgcagaatccagattggcattcttactaatttcatcatttgatctgaaaagtttttatgccctcaagtcttctggctatcatcaaagtcttttcccttttcagtccaaatcatttactattagttcttccgattccctctagctcctctatcactagctcctataccacctctctacatcttctagacccagagtcaccaaaacctgagaccccagttaactcacaaaccagccatcagctacaactcatcatacaaaatatatcatcatgcattaaagtacatacaatggaggtcaatggagatcatgtcatcatagtgagcaaagtccattgtccagtttggtcttctaaactgtagtaacacagagacaggaaagggagagatagggatcggacgtctggcaagaaagaagagcaaataatactaggatctgaaaataccacttctatggggtggatcactcacaaacaatggagaattacaagtgtgttttagtctatggtgtaaaatcagaacaaacccctaaggtgttagaacgatcctaggtgagccaaccttctgccagctttctatgtccttacgtattttagaggaaatgcctttcccctcaagcttgccacacccaatactgcaaattatatttgagccaaactcgactgagtgcatttttgatgagatttcttcaactcaagctaataaacctttaccactaagctttccaactgggtaaacctaggatattagagagtaaagctgtggagcagggaggttgtttgtactcctataaataagataatcctgtgccaaacatggggaaaagattgatttttaatcaccagccagttagctggagagttatttcacttatagtttttggagacatttatattgtgaaccaattcccaagttttccaggctacggcacacctttcctggaggcaaagacacaaagtttctaagagtttagttcctgggcctttagagagtctatgggtrgcctctatccatacctagcttgattcttgtcctaaagcaagaccagtctagcagtatagataaagaatacagccatttttcccctatctactgtctcttaggcaggataatttcacagctttgttggagaaatatgaatcaaagcaaaggcacatgtttgaaatcaccgaactacagtatatagggcctcagctctcctactcgatgccaagcgtcccagactctgaagtggaaaaacagtctgacttcctttgtagctcttccccaacagaagtctttttttttttttwaaagggtcttgctctgtcattcaggctggagtgcagtggtgtgatctcagctcactgtagcctcaatgtgccagactcaagcgatcctcccaccttagcttcccaagtcttagtaaccgggactacaggcatgtgccaccatgcccagctaattttatttttttgtagagacaaggtctcactatgttgcccagccttggcatcccaaagtgctgggattacaggtatgagccactgtgcctggctgaagaggtgtttttgagccctgacagacaggcaaactttgctaatgtcatgacaaaaaaaaaagtgaacagtatacaggcatatgaaggattttaatgccagcccattttttctttttggagtcagggtcttgctcccaagttcagccagttccaggcccaggctagagtgtgtggcacgatcatagcttactrcagcctatactcctggactcaagcaattctcctgcatcagcctcccaaagtgctgggattacaggtgtgagccaccgtgcccagccaatgccagcccccacttttatttttggagacaagggccttgctctatcccccagggtggagtgcagtggcatgatctgctcactgcaacctccgccttccaggttcaagcaattctcttgcctcagcctcccaagtagctgggattacaggcacctgccaccacatccggataatttttgtatttttagtagagacagggttttgccatgttgaccaggttggtctcgaactcctgacctcaggtgatccactcgcctcagcctcccaaagtgttgggattagaggcatgagccactgtgcccggcctatgcccccaacatttctgagcaggaaaatgggaatcaacttttagcatggtgagaggaacaaaatccaggaggtgacattagggacaaatggacataacaacgttgatgagtactggtccaagaaaaaaaactcaccataattcacaaagcgtctagatataaagacgactgcttatcttacctgtgtgataataagtagatgggacaggataatgtagcaggagtgttaaagggtttcagtttggctttgtattagaagtcaaaggaaatttcctatgggaatagagaacaaatacactggcctagaaagaagggcaatttctaaccttcattaatctgagaataccgattgattacttacaatacgcatggtgttgtggccacagagacaaggcaaagaggagtcagagggttgaaatggttgttggcctctaaatgggggaaataactttcctaatatcactacaaggcttagtgccattatgtgcaggaggaattcaaaagaaaagtgcaactttagttgaagtgatcagaaaaagttttgtggaagattttatgacaggagattgatagatagagatggaaacagggcattccaggagggtatatggtgtgaacatgccatgaaagaacacagtccccagggcagtaaacaattcatttttccatagagtcctggaaaggkaaaatgaggccagacttaaaaaactgaaaatagcctaaaagcctacttaaggtggtgtactttataaatcagcaatggggatcagtggattaatgttgctccctgttatttttctgagattctctcctacctgcaggcaaagtcttgaccattgagaatagaaagctttcagtttctactctacaattaggtatagttttgcggaggtctaccataacatgggccttcacaggtaacatcagtttttatgactgatttcccaagtgcaaatcacaatatgggtacataaaagttattcctggagtaaatacatttagtagctgcaagccggtaccctgacattgcaatctgtttagcaccaccctaaattcctggcagtatacagatagtatacaacctcaggaaccgaagttgcaccatcgtagcctacccaactactaggaaaagagaaaagcagtgaaccgaccccactattacttcatttcagaaaagaaccagccattacaatcatttgttttgtagatggcagcctatgtattctccgctgtattttctagcccgtcttctgaatcacttgagggaagtactatggttaatctagtaaagtaccatggcctcctagcgctcctttgacatctgaaacggtgtaaactgaaattggccttgtcagtttcccattctcccaaagagcaccagaaactgagggaaaaaaaacacttatctattttcttaaaaatcgaaggcttgaagaccaaaattctcaaacagaagatagaatacatcaatcctagatacctaaggtaatgaaatttcattttcccccaaagtaccttcgattctgccccgcatttcagccttcaggattaccttaaccctgcagagcgatcaccaacctcccttcccaccccatcaaagtgagggcactgtcaggacttgacctgccaaagattgttggtggaggaaccttagggcttcctggcaacccaatgcggctgttccccgctgagaggcggttcgcgacctaggcccgcagccctccctccccacgcgcggcggcctcggggccaggcttaactctggctctctggtcccgatctggggaacccatgcatctccaccccgtggggctaaaggcgcagcactcacaggactgccgggagtcgggggacagccggggaygagcgcccaccgcacctaggccgcctcggaggcggcgcgcagtgggaggggccggaaatgtttacaacctgaccggctggatgcctggaggccaggcggctccttggctggggcccgagccccctggcaagtcggagcgggttcccccaacagctgtctcctccgcaggcctgggtcggggcccccggggtccccgcgctcccgccgagtccctgcccaccgcgcagcccctgggagacttacagccgggcaggcgggctctgctgggggccgcggtcccccgcgctacatcccgcggcgctggaggcggcctgcggccgagcggccccgatcttcagcgccctccccgcgccggaaggggcgcgcgacctcccgcgtcacctccgcagccgcgtcacctcctcgcgggctctgcctgggccctccaatcctaggccctctcgcggagtcccaatcacaggcccgcgcccgccggccacacctcccgccccgggccccgccctgctgccccgccttccctgccgcctgcccacctccccgccgcagccaggtaacctccacccgccccggggtagaggacgttcgtcggattctacactccacctcgttatcgcagcctgaagtgcgtgatggagaagaaatttcagagaatgagacagaacgtcgggagggaatgctgaattttctaccatacaccttatctcatctcctctgtccccaaggctagtcgtttcacctctgaaacacttcttaatctcttcttcaaccgcatggtccttccttcccttccacaaactatttattgagcccctaccatgtgccaggccctgggctagacctcagtctgcctcctgttattttcttatcagagagcagaattgtttctaactactcttgctggtgaacccgtgccccagttcctgctcccacaggcacctagagtgcagatcgcgagacgacatagggtagtgcagcccttgtctgaaccacacaacacagaaggggatttcagggtctggccattttctcatttctcccaagaatgaaatagtattattttattcccacttttcagatgaggtaactatcatttggaggggttcactaatatgctcaaggtcacagactggccagggacagaagcttggctctatgtgactctagagccccatgctctggagccccagatacagcaatacacagttgctgaaaagcagaaaagcaatgtcaatcttcctcttgtgagcaaacctttaactcacaggattatcataaggattaaactatctgatgtagatagagtacttggcacagtacctcaatatggctgttaactcaaaaaaatttttaatttttcttttttagggacaggttcttactgtcacctaggctggaatgcagtggtgcaatcatatcatagctcactgtgcaactagtgccattctagaggcagagaaagtgactcattgtaatctgatataggtgcttcagggacgtggggttaattctcttggtcctagttaaaagcatgggctctggagtcacatagagccaagcttctgtcccaggccagtctatgatcttgagcacattactgaacccctccaaatgataattacctcatctgaaaagtgggaataaaataatactatttcattgggtctttgtcaggattgagtgagataattcatgcaggctcttattatgaggcctagccaatggtaagtgctttataaatgttagctattaccgtgttgccatttgtataaaaccctcagaaacttttcactgtccacaggattgagtccaggtttcttcagcatagtgtttcgaggctctttgcgagctggctctaacttctaaggcctcatcattctccattttccctctggcatgttgggccttggtgaactagttctctgaagtgaacttctctttcattcctccaggctgttgcacatgctgatccttctgttggactgcccttctcattgtctgctgcaagatgccagcagtttacaatgcccacttctaggtttgactttggcctcagacaatcctaaattcacatttaggctctgtcagccactgaccagctgtatgacctttggtaaattattaatcttcagctcacatgattatcataaggattaaattatgtgatgtagatcgagtacttagcacagtacttggtacatggctgttaactcaaaaccatttttgtttgtatttttagggacaggctctcaatctgtcacctaggctggagtacagtggtgtgatcataagatcatagctcactgcagcctcgaactcctgggcttcacgggatcctctcaactcagcctcccaagtagctgggctacagattcgtgccaccatgcccagttaattttttatttttgtagagatagggtctcactatgttgcccaggctgtcaaaaatgttacctctctttccccccttcctccctttctgaatctttctcaacctcttcccagctgcactttgtatgtacctctgctatggtattagtcacactgttataattatttgtcacttgttggccgggcgcagtggctcacgcctgtaatcccagcactttgggaggctgaggcgggcggatcacgaggtcaggagatcgagaccatcctggctaacacggtgaaaccccatctctactaaaaatacaaaaagttagccgggcgtggtggcgggcgcctgtagtcccagctactcgggaggctgaggcaggagaatggtgtgaacccaggaggcggagcttgcagtgagccgagattgcgccactgtactccagcctgggtgacggagcgagcctccgtctcaaaaaaaaaaaaaaaaatgtcatttgtctgtcttagactgtgagttctttgggggtctaagaccagtgttggtcacacttttatcctcagggcctcgcatagtgcttggcacatgccagatccttaataaacatttgtatgttgagtggatgagacaaaaacccatgcaagacaaggaatggtgatcttccacgcaggaaattctctttacaagcctgcttcactatctgagcccaacgttcctaagcaagattttccttcctggaggtgaggtggctgagactgtgttacagagcccagtgccatacacatattagctgatcaagaaatgttggatggaacaccaccaacagaatttactgaaggttctgccctggggaggagtgaattctgagggtcccacaaatctttctctcagaagccccagaaacagcaatagacagttgctgaaaagcagaaaagcaatgtcgaccttcattctgagcccaccacattgttttgttgcaatgggagtaacaaagaagaatctggagaggctgccctagtcctaccctgggaaagggagtagattgggtcatgctacatagcagaggagaagggtactcaggacagatgagcctgggggaggccaactctatctgggcatcaacaattccggccagggctggtgatgtcaggttactttttaaagaagaaggcttcccttccaaacagaaagacaacactttgatttgtgtgccaggttccctgaaggataaatatggtgaaggataggccaagagaaggaagaaggggaagagtggcctatcaagggaacactgtgaggggcagctgggctcaaaaatgtcccctctaatgtgtgttctccttcccccacctcgagagcctccagggagaagcggagctctggctctgctgagacagctgctgagatgatcactgagtctgctggcagctcacatttcagcacatggtacaacttctcaaaggttctttggaacacctgggagagttgcatggtggcaaacccttcctccctaggtcctcggggatttggaaacaaggaccccagacacaacaaccctttcaatatcacacaggggcctcagccccatttatttgcacagccaggggttcctgccacaaacagcagttttcgattatcagtagctgtttccctctagcctgggcaggggctgagagagacacacacagaaatatgatatttcagactcctttgagatctgaagaaatcatttcctcctttcttgccatctccataagaccacctctggaagtatgctatgctcaacttatactcacacatacagatttgctcataggttgaacagtgaagtttaagtaaaacccattgcacagactgttcctttcatcacagacacaaagaaggtgagagtaagatgctatcaaggaactagccaatcttggaccaagcgtacatgctcccttccttcttactccatggaagagactgctccatgggcctctcctggacctgttgccacggggagatttaggaggccatccaaggagtgactgagccttggccctcttccatggctacaggaatattgttcctgcaggtactatccagatttcagctctagatgtaactgaaaaaacctgaaactctgaggaaaggaatctaaggcttatagtgcttgagtactgatggggaacaactgcagcgaacagcaccagggaagctggaggatgctcagtaggtgaatcgcatcttttgtgagtagcccagtttgtccaagttgggatggcaggccagctgcaccattgggggtggcccacaaagcagtaccagcacatcatcccctggagcgggcaggtgttcccggatcatgtcggcagtcacaaagcccttgctgtaggcccaatctgaagtatggggagaagaaagtacttaatactccagatacatgctggcaagggggtgtggtgccatgagactggggagggccctgaaaggctctggagaaagtgtcaagtggtagcagcagctgggaatgggtatactcagcctgcctcaagctgagccttagcagcaccgccatccctgtcacccacctggtaaacaggaacccaaaggaaagggaccaggagatcactgtgtctgtgcactcagacttccgagttggcagtgtgaggcaaggttgatttcaatgaagccagaattcacaaaggggcaaggctttgattttgacgatgaggggatagtgggatgtccagaaatgggaaggataccttttgggggatgatccagagtgaaccagagcttaaagcgattgggatagcgggcctgcagttcctctaagtcctcccgcaagatgatatccttttctgtctgaaatgcaaaggggaaggaaagtctttaggagtcttctcaggcccacataaaaagttttctgctatacaactttccaactaagaaaaagaatgttaagggaaagcaaaagttctaggaaataagcaagacttgcagtgcttttagggagttaggatgaggagaagaggggaacagcctttatctacacattatgaaggaacaaagatgaatatttaaccaagaagatctaagtttctgtgctccagactagataccttaaaagttttcttctttccttggggaccagggaaggaatttgattcagtgctctgtccttttcctccttattgaaagaggaccctgtgccttacagaggggaccttgggcagaggctaaaacagggcactgggccagttctgcccatccataccacgtctctcagccctacccacacagcaactttgaagtcttagggtggaggaaaacaaaccaacctggttggcaaaaagcagaaagcactgggttggatcttcagggactttcaggatggcccggatcagctgtagcattggggtgattcctgcatgaagataccccacagtgaaatgtagtggccacactctctgccctgtcctggctccttagctgaccagccctttcatcttcattctgctcattcaccactccactccattttcctttagcattctcatcctctaaactcttcctgcatattctccaacatctgtatttccgggcacccttcaaattcatctaagttcatattgtagaaatctttcttaggaactaatctaagactcttctgaaagtcctttggaggctaggactccagtgtcacaaatgactacaagtacctccggattcaatgatgagggttctagaacactgtatttgcagaggttaagtgcatgtacttaggcactaggcagagccaaatactaattttgctccaggccattaccagtgaaataaccctgtggaaatcatttagcctctctggaaccccattgtctctctgtaaaaggaaaaggctagtacctacttcatagatacctatatatgtgtctaatttttgtgtctaatatatagtagtgtattagactacacagtgtctaatgcacagtagtgtccaatgctaattttctttcttcctagctagtcattcctagctgcttctctcttc

SEQ ID NO: 96474 - DNA, 22335 bp, Homo sapiens
ggggtgggggttcctcagaaggcggggaagagggggtgacagagccaggcctgtcctcagggccacttttctcccttccccagggacagcctcagagtcttttccagcctctgccagattttctccgaggaggataattattcccagagtcgggagctgctcgtgcaggtgagagcctggtttgtggcattcccacctctccttgttccctactgctcccccatgtctcttttattttgtcaccaccaggaggtgaagctgcagtctcctctggagccacactccaagaaggccccgaggtctggctcccggggtggggtgagtgactagcggggtggtgggcgtgggggtggtgattatgaaggggtgaggagtatgttttgggggagcagcctgaaggatgggtaagggaggcacagaggggtgaggagaatgaaatctgttctctgaggcaatgaggagggcaagtgcggagggatggagggccctcacgtcaatggcaggcacttctgaccctgacccctgacttcagggtgtggtcccataccttggcaccttcctgaaggaccttgtgatgctggatgcagcctccaaggatgagttggaggtcagtggtgtgtgtgtgtgtcattgcaatgatgtaacaagtgggctgcagggtcggacagacccccccgccccttgcaaggggctgtaaggcacaaatagctgagtgtgggacagagccagatctgtttctgtgccaagtcgcctcagtgatctgtaaatgggaaactagaaatagcatctacattgatctgttataagggttaaatgaatttgtatttgtcaagtgcttagaacgtgcctgaaacgtaagcacatctaggttttgtgatgggctcctgctctattgctagagtttgttaaataaacaaatactgagaccttggacaagttccttatcctctctggataaggaatcctgtcgaattggatactatccagtcctctcatctgcaaagcagactcgttgtctacctgagaaattcaatttaaagggtcaagtggagtgcttaggccatgatagattgaggaggaaggcagggagggatcgaagagtcagagaggctggagggaagtggttgtgagttggatgtggctgtgtgtgtttaagagaggggatattctctctctgtggccggaaggtagggttggaactttcaccccatccccattttcctcgcagaatggatacatcaattttgacaagcggaggaaggtgagcggagtgtctgggctggatgctggacttccctatccatgttccaggaaggggagggggaaaagtcaggggtccctgagttttggctcctgcagtttgagggctccttcccaggagtttgcagtcctttctgagttgcgacggctccagaatgaatgtcgtggctataacctccaacctgaccatgatatccagaggtggctacaggggctccggccactgacagaggctcagaggtgactggcgggtgaggttgggactccagggttctggccaggtgtgggggattggtgtcatgtcctgagctctgcctattgcccccctaacccagccatcgtgtatcctgtgaggtggagccacctggttccagtgaccctcctgccccacgggtgcttcggccaacattggtcatctcgcagtggacagagtgagagattcactggctggggggtggtttcttgggacttccacttttctctgatcctcccaatctcctgccactgcagggttttgggctctgttggggtccctaccccgcttgtgtcctgtgaccggcccagtactgggggagatgaggcgcctacaactcctgctcctctgctgactcggctggcccaggtgagctctgctcctgactctgaccttgacgctgaccctcactctgtaaatgtttcttccttaaacctccctgccttcatgccagtcccatgttgtttgttcctagcacatgaagtggccatctgtctcgtcactagactctgccttggaaagcagtccatccctgcacagtccagctgaccccagccacctctccccaccagcctcctcccctaggccttctcgaggtcaccgccgctcagcctcctgtggctccccgctgagtgggggtgcagaagaggcctccggggggactggatatgggggagagggatctgggccaggggcctctgattgccgtatcatccgagtccagatggagttgggggaagatggcagtgtctataagagcattttggtgagggagccttgggatggagttggggtgaaggatggtgtcttgttggactataaatgttgtctgaggtttgggcagccaaatggaattgaatgtagttttaattttgacctttggttttggcagttatgttttatttttaattttatcttctaaactctagtcttcaatagaagctgaaatttgttttattttgatggctattttgcattagttgctacaccttaaacttttggtcgccgtgttaaaatttcagaatcaacagcagtttccccacagggaagcagctctgtttcactgggcaccatgtgggctggcttatggggtataggaagccaccatattgggttttcctgttcattttaaagccttggacacaagtaacattttgtggttgggttcagtggctgagggtagaaggatgggaaatcatggctgattgattgctcttttggtctcctgttctgccaggtgacaagccaggacaaggctccaagtgtcatcagtcgtgtccttaagaaaaacaatcgtgactctgcagtggcttcagagtatgagctggtacagctgctaccaggggagcgaggtcagaggccatgagggaaaggcagactcgggaggagagtggagtacttccacatctgggcggctgtggggggaacaactgtgtgtgtgctttacatccatcccctgaaccttcagagctgactatcccagcctcggctaatgtattctacgccatggatggagcttcacacgatttcctcctgcggcagcggcgaaggtcctctactgctacacctggcgtcaccagtggcccgtctgcctcaggaactcctccgagtgagggaggagggggctcctttcccaggatcaaggccacagggaggaagattgcacgggcactgttctgaggaggaagccccgttggcttacagaagtcatggtgttcataccagatgtgggtagccatcctgaatggtggcaattatatcacattgagacagaaattcagaaagggagccagccaccctggggcagtgaagtgccactggtttaccagacagctgagaaatccagccctgtgggaactggtgtcttataaccaagttggatacctgtgtatagcttcccaccttccatgagtgcagcacacaggtagtgctggaaaaacgcatcagtttctgattcttggccatatcctaacatgcaagggccaagcaaaggcttcaaggctctgagccccagggcagaggggaatggcaaaatgtaggtcctcgcaggagctcttcttcccactctgggggtttctatcactgtgacaacactaagataataaaccaaaacactacctgaattctactcccctgtccttgcagtacatatgaactggctgctatgagtgggggtggggaattggctgaaggtagatgccatggaacaggaaggggcacaatgttttctgtccccatgaacagagcaaaaagtgaggtattggtgaaaaaagtttcctcagaacagtttctctccagtaacctctctaccactggtcccttgctgcaaatgtgtataaaacaattttaggacaaggaaatggcagaacaactttatggacaacatataaacttgggaggacttataataccataaagcattacatgctgggattttaagtcagtttaaagctacattcaagcaaattctaggaagacagaggctgaaaagtactaatagagatgccagggctgttggcaaggagggtaaccacatttcatcctggggcctcaggttagagaactgtgtattctttttcaattaaaccgacattcctagcaatatggtatgttgcaaatgcccttccaaaagaatcatgccaaccaagatgagggagagttaagggttgtatatacaggcaagaagtaggtttgaagacatttaggatttcactttcaagaaagaacactgtgccacaaagagattccaagtgcaagagtttgaacctgagggggtaatacaggtggtgtgtgttaaggtggaaggggctgtggggatatgacagaagtgcctggtcaggaaacagagccaggtgtttttacattttattagctacagtatagatcctagagctgcctcattccctcccctcccctcccctccccccaccatggggtcaggccttgccaggagcccctgcctttgctgcctgggcccgctggaactcctgctgcagctgagcaagggtctccctctgttgctctgactgccgctcaagatcccgaagctgggattcgtatcgcttactaaggagagacaagggagacaagcagaaagggagaaattagtaggactcactatggagagtgctaaacgcaagaaagagataggtggaaaacttgagatccaggggagggagaagaaggggggttaaaagggaaggaaagggttggaggaactggaggactaggggccactatggagagctgttctgcaatggttcaacacctctactccaatggttcacttgcatcacagggtgcagcacacggtggtggaataaaaactcacatttcagctgtgatatagtccagcctcttccctactgtggcccgagcctcccccagctcctgtttgactagcaccggacccagaagtttaaagaccacgttggacccatccagcagggccagttcctgatggagggatgggacatatgtgatcagaaccatggctagtacaggtccctcctcgccccacaaatcccagtccctcacctctttcacgatattattttctgttagttgtgcttcaagtttctgcctccccgacatggatttacttaagtctggggatgagaggaaaggcaatttagaaacatcaaatgtgccacctatccccacaatcctagtcaggtggatatggatctgaggaagcagaaaaggatgggggcagcgggtgagtgaacagggaagagtactgagactgaggcggggaagtctctgcacgcgagggcccagatggggcaacaaaccttatctcggtaatggctttgggttgtaagtgcattgggcgagaccataccgaccctgttcccttacccttctgtagctgttgatatttctccacttctccctgtagcttcttctggatcagctccgccatggcggggatgaaagcctactgggtgcgagacaagggcgctgggtctcactctctggaaggtacctgagctcccttttctgatctggcctgcggaaatgatagcactcttgagaggtagccctgaggggcaccgcaacctcccccccgtcccggatatcgactccaccctgtccccaggagatggtgggcgaaacgcaagaccccaagcctctcaaccgaaatcctaacctactcacgttcttccttcagtagtaataaacccggaagtaaacaaggaatgctgggaaaagactgtgccggaagtttctttctgacccttgatgggaagtgtagttctgacatgtttagggagtggagttctgctaaaaagactagactaggacatttttaggcaagatggggaaactaatccagaaaaagaaaccgcaccgctacttagcccctggctccggacctgcctttcttttttaagtcactcttgcataagctgccgctcgcgataaggtgccaaaaactgttccgcccctctaaggagagcgtgccctcactcaagatggcacctagagagcttcatacctggtacgctgctgattggatgaaggacagagggcttccgggagttttcaagccgamtgtgtggcagctgagargagttttgcacgtggatcgccgttcgggtgggcgagatggagacagcccccaagccgggcaaggatgtcccgcccaagaaagacaaacttcagaccaagagaaaggtagaggcctccctgggtgggaaacgaagtttttagctgtggggtcggggggcggggcgtgagtgcggagttcctgatgtgcctgtagaaaccgcggcgatactgggaggaagagaccgttccgaccacagccggagcctctccagggcctcctcgtaacaagaagaatcgggagctccgtcctcagagaccaaaaaatgcttacatcttaaagaagtctcggatytctaagaagcctcaggtcccgaagaaaccccgagaatggaagaacccggagtcccagcgcggcttgtccggggtgagcgtgggacctgatgggtggcgaggcaggccgcctcgttccttgagagtgagagggttggggtcaatccaaggctgtctgctaattgcgtcctcstttcccctagrcccaagatccattcccaggccccgcccccgtccctgtggaagtggtccagaagttctgtcgcattgacaaatcycgaaaggtgaggtccagccggagagttgggaagtgctggaggcagggagtgtctgggtgagttggatggaggctgggacaggtagctctcctgtgaccccacttatcctgtggttcttctgccactcctccccaccaacaatgttacagctaccacattmtaaagccaaaactcgaagccgacttgaggtggctgaagctgaggaagaggaaacaagtatcaaagctgctcgttctgagctgctgcttgctgaagaacctgggtgagtgagccctaatctggacccccattccctgccttwtgggactgtcttttctcgtttttatgttggtatacttgcttcatattgggaagctttactgccatcctaacccttgctttcaggtttctggaaggggaggatggggaagacacagcaaagatatgccaggctgacattgtggaggctgtggacattgcaagtgcagccaaggtgagcctgaggaggtaaaggagccaagggattgattggtggtgcaggacaatagaggaatgggggctagaagaaggcgttactgcagggcactcttttttttcactcttctctttcccagcactttgacttgaatctgcggcagtttggaccctacagactaaactactctcgaactggaaggtaaggttgaattctagtgactcttgaactaagatgtgtttccttaaccacttcagccattcccagtgtatgtttgggttgctgatgaggggagggtccttcgatttgcttgggtgtgagggtaagcacctacagcaacatgtgtctgcccgcctggagagatggggctggcgtggggcagacctcaagttgtctgagtcggtggtcccctgccttaacaccctgcctgcccctcacctccaacagacacctggcttttggagggcgccgaggtcatgtggctgcccttgattgggtaacaaagaagcttatgtgcgagatcaacgtcatggaggcggtgcgggacatccggtcagtggcctcactgtcagcrgtcagttggggtgagatagtccattcctgattgaatgatagcctgtgacctcatttcccaattgaaccactcttcctctcccccaggtttctccattctgaggcactgcttgctgttgctcagaaccgctggctccacatctatgacaatcagggcattgagctccactgtatccgccgctgtgaccgagtaacacggcttgagttcctgcccttccacttcctcctggctacagctgtgagtggccatggagctcaggaactggktggaagcccttgggatgaccacctctcctttaggaccccagcagagggaatacagagggcaatcaggactgggtcattctctctgtctttctctctcagtcagaaacagggtttctaacctacctggatgtgtcagtggggaagattgtggcagctctgaatgctcgagctgggcggctcgatgttatgagtcagaacccttacaatgccgtcatccatctcggacacagcaatggtcagtacctggcttagttttgactctgaccatcctgacttgcttttcttctatatttgtacttcatgagtcccttaaagttacccttttatttcccttttttgttatctcttggtcttgagttcccatctttcccatgtttagtaacctcaggcttaggtgtgtattagcaactttggttcttcttctcttccaggtactgygtctttatggagtccagctatgaaggagccactggcaaagattctctgtcatcgtggtggggtccgggctgtggcagtagattctacaggcacgtaagtcactggtggggtgaggtgttaggagtcataggtgggcagaaaggtgtggaaggcagtgtgctttaggagcacagagtctaaagccaggatgcccaggtttaaatcgcagtgttaccacggatgggccttgcaagtataggcatatttcataacctctgtgtgccacagtttcctgaccccgaaaatggaaatatgagtgtccatttcaagggtccacaaactttttctgtaaagagtcagatagtaaatattttatgatttgctgataagaggtaaaatcaaagggtaccatgtaggcatttaaataccaagagaaaacaaattatcacaacttttttttttgagatggagtctcgctctgacacccaggctggagtgcaatggcgcaatctcagctcactgcaacctccacctctcaggttcaagtgattctcctgccttggcctctcgagtatctgggactacaggcgcctgctacaacacctggctaatttttgtatttttagtagagacagggtttcagcatgttgttcaggctggtctcgaattcctgacctcaagtgatctgcccgcctcagcctcccaaagtgctgggattataggcgtgagccactgcgcctgacctttttttttttaaatcttttgagagagacgtagtcttgctctgtctcccaggttggagtgcagtggcgtgatctcggctcactgcaacctccgcctcccagattcaagcgattctcctgcctcagtctcccaagtagctgggattacaggcacctgccatcatgcccagctaattttgtatttttttgtagagacggggttttactgtgttggccaggctggtcttgaactcctgacctcagatgatctgcccgcctcggcctcccaaagtgttgggattacaggcgtgagccactgcgcctggcccacacatttttaggttataaaattaaacgtaatatggccaggtgcggtggctcacgcctgtaatcccagcactttggaggccaaggcgggtggatcgcctgaggtcaggagtttgagaccagcctggccaacatggcgaaactctgtctctactaaaaattcacaaaattagccgggtgtcgtggcgggggcctgtaattccggcaacttgggaggctgaggcaggagaattgcttgaacctgggaggcaggggttgcagtgagccaagactgtgccattgcactccaacctgggcaacaagagcaaaactccgtctcaaaaacaaacaaacaaacaaaacataatatgagactggacacagtggctcatgcctgtaatcttaacagtttggtaggctgaggtgggcagatcacttgagcccagaagttcgaaacaagccatgtcacccatgacatggcaaaactctgtctctacagaagatagaaaaattagccgggtgtggtggtgcatgcctgtagtcccagctactcaggaggctgaggtgatcctcccacctcagcccaggaggttaaggctgcagtgagctgtgatcatgccactgcactctagcatgggcaacagagtgagacccggtctcagaaaaaaaaaataataataatcaaatadatttgtgtaatacagatctactaatgggaagaactgaatttctctttttgaggttaacattttgcctaattgatgtacaaagttagtgttccagatggtcaaatttgactgtagatattcatgttcatgctgatctgtagagattgcaagtatttcatctttgaaaacatcttttcacacaggtaatgataggtgatatgtgaggtgcttgaaatgctgtgaagcacttacgactgtgtcactgtgacttgtagtgtacaaagcagcagtgcaaatcaggatgctgtagtcgctgtcgtgaccactcggctgtgtgttgtagagcaaaagcagccacagtattaagtaaatagtgtggccccgttccaataaaactttatttgttggatattggaatttgaatttcatacggttttcacagtctcaaaatattcttttgattttttttcaaccacttaaaaatgtaaaaaccattcttggcttgtgggctatacagaactagatgatgggccaggtttggcccatgggyagtagtttaccaagccttggtttaaagccctcatataagctgttgtagacattaagatgagttaaggcatatagtttagcacagcgcttagcaaaatagggagygctgtgttcatcattgtcattcaagatgatcgttctctccaggtctggctgatgtgaggggtggaggtggtgtctgctttggatttctgctgttcctgagggagtatctgcattttccacagcttttctgtctgatttgtattttcctctgattccttttgtcatcaggtattcactgggcacctgctgtgggcagggctctgcgctgaggttctggagayaaaaggatgaatcgttgagcctgccctggtgtggtgctcccgttatcctttaggtataaaaacttgtggctattttttttttttttttgagacagagtcttgatctgtcacccaggctggagtgcagtggcacaatctcagctcaccacaacctctgccccccggggttcaagcgattctcctgcctcagcctcctgagtagctgggattacaggcgcccacgaaccacgcccagttaattttttaatgtttagtagagatggggtttcaccatcttggccaggctgrtcttgaactcctgacatcgtgatccacctgcttcggcctcccaaagtgcargtgttgggattacaggcgtgagccactgcacccggccatggctatggtttttgagaatgattggccaggtgatgcatttatttattttattactatttttcgagacggagtcttgatctatcacccaggctggagtgcagtggcgcgatctcggttcattacaacctccgcctcctaggctcaagtgattgttctgcctcagcctccaagtagctgggagtacaagtgcatgccactgcatgcgctaatttttgtatttttagtagagatggggttttgccatgttggcttggctggtctcaaactcctgacctcaggtgatccrcccacctcggcctcccaaagtgctgggattacaggcatgagccaccacgcctagctcaggtgatgccattagtttctacacagttatcctctgtcatcccagactcaatgtgtccatcactggataggtcaccgcctcctaaagtttctcttgacctgctctcatctcccagaattttcctgtcacccagaatttgactcaggtacacaccaccacacctggataatttttctattttttgtagagatggggtttcaccatgtagcccaggctggtctctgtcttgaactcctgggctcaagcggtcctcctacctcaacctcccaaagtactgggattacagagtaattactgtgagccaccacatccagcttggccaccagcttattcaaagtctccaggatgctgggaccaccccccccaccacccgctccctgtttttgcataattgtatcttttttttttgagacggagtctcactctgtcacccaggctggagtgcaatggtgtggtctcggctcactgcaacctccacctcctgggttcaagcgattctcctgcctcagcctcctgagaagctgggactacaggtgtgtgccaccacacccggctaatttttgtatttgtagtacagatggaatttcaccatgttggccaggctggtcttgaactcctgaccttgtgatccacccgcctgtcctcccaaagtgctgggattataggcgtgagccaccgtgtctggcctttgtaattgtatctttgtgaatgagtgatttggttctgccctttttactccatatttataccagcctggctctaggagagtcagaaggcctgcccaagggtttctgccctctctgggccactgggccaaagctgtagcttgccctccgtgggctacctgggtcagccactcctgtgcttagggcttaatcactagttcgctgaggcctgaagtttaatcaacaccttgakgctaaacagctctggtccttgtgatcttcagcccatccctgcttttctctggtcctcctcaggagcttgtcaggccacgggggctccagtgatgaggctgaccatctttcttaagaggtgttctggtagcttgtattatgattggattgcgttgacttctcaaagccgaactgctgcttactagtagtacagtagactcccatttggcactgggctggtctttacccaggggtcccatagatgggtgtgtggaggggagaagagccagcatgcatccttgagttgttagttcaccaaaggatgtgaccctgtgttccacgagcgctcggtaattcctggtttgcactgatggcctttctctttggtaaagtcagggcgctgattatcttgtcggaagtatccagctggtcctctcttgggctccatcactgtgcaagtctctgctcataagaactcttcagttcccttctcctgggttcacagccaaggcaaaaaagagactccttggcctcttggcaaacatacatcccctacctggctggtcccccttcagcttccctctctaaggaacaacttgaacatagaaactccaacctcacctgtaatcccagcactctgggaggccaaggtgggcaggtcatttgaggccaggagttcaagaccagcgtggtcaacatggcgaaaccctggctctactaaaaattagcggtggtggcgcatgcctgtaatcccagctacttgggaggctgaggcacgagaatcacttgaaccagggaggcagaggctgcagtgagccagggtcatgccactgcactccagcttgggcaacagagagaccctgtctcaaaaaaagaaaaggaactccaacttctgaaagtaaacaacttatgcagtacatgattcctggagaggatttggtcaccaaccttccctccttccttccagggaaagcacacagaggggcagggcaagggcctccagtgcattacttcaccacttccctgagtaggtcttctcaagtccttggagccttcactttgtgatttgtcactgccagagagcaatgttgggatcatgagctgtgggtcctcagtctgactttaaagaaacctcacaaattgtctgctcctgattttcctgaccatgtttcccaccaatcctaacaaacctctgcttccctctcagtctcaacactctggtgttaatgcatttgaacctgctgtgtatctacttcctgtaattttttgagaattatctagaatggctcaaatcccacctttcccatgaagcctttctgaccactgcacatgctccttccccttgctgggctgtgtgctgcatgtgtgtacagggggacatcacatttgggtgcagcctgtcgtgtgggcgttccttttgacgcccgtgtcttgagagggctgtgtggtgttagcaggttagaggcagatgctaaagagacaggcctgaccattcactgacctagctttcctttccctgagcttcagtttcctcacctcttaaagggaaataaaaatagtatgagttgtgtgcagcttaactgagaggatgcctgtggagtgttcagggtgatggcagtggttattactattaatctttttctccccagccagacttgatgcctggacttggccacagcttgcttggtaaacccatttactgacatattaattgatccctcttctctcaccaggtacatggccacctctggcctagaccaccagctgaagatctttgacttgcgagggacgtaccagcctctgagcactcggaccctgccccatggagcagggcacctggccttctcccagaggggactgctggtggcgggaatgggtgacgttgtcaacatctgggcagggcagggcaaggccagcccaccctcccttgaacagccctacctcacccaccggctctcaggccctgtgcatggccttcagttctgcccctttgaagatgtgctgggggtggggcacactgggggcatcaccagcatgctggtccctggtgagtgggccaggggatggggcttgaagtgaatgamctctgggtggaagtttgggccagagacatccaggaactgggggcttagttgggctggagctgttggactgaggttcttccttatggctccatgcttctccctccctcccttcaggggccggtgagcccaacttcgatggcctggagagtaatccatacagaagccggaagcagcgccaggagtgggaggtgaaggccctgctagagaaggtgaggctcccctgctggagagggtgagrtyccccccattgctggagagggtcaggttcccccgtsctggagagggtgaggttcctccttcctggagaaggtcaggttcccccstgctggagarggtvaggttccccactgctggagaaggtcaggttcccccctgctggagaaggtaaggtttcctcttcctggagagggtgagattcccctctcctggacggggtcaggtttccctctgctggagagggtgagattccccctgctggagagggtcaggtttccctctgctggagagggtgaaattccctctcctggagagggtcaggwtcccccctgctggagagggtgagattgcccctgttggaggtgaggttcccctgctgcagagagtgaggcccctgctgctggggaaggtgtggtttggggttggaggtagagaaagctctcctgatgtctcatgctgggggtcttgggtagaggggttcagcagcctccctggcttctctttttggtgctaccctcctgtggctccttgctgagtcctgtccctctgtgacacccccaggtacctgcagagcttatttgtctggacccacgagccctggccgaggtggatgtcatctccctggagcagggaaagaaggagcagatagagaggctggtatggagcaggcccctgaatgcccaggcccgtcttctcccccacatcctctccccaccatggcttgtccccagaagtgcggccagcaggtgggtgctgccagttccctgactccgaggctgtaacagatatcactcctgtcccctccctcagggctatgacccgcaggctaaggctcccttccagccaaagccaaagcagaagggccgcagctccacggcaagcctggtgaagaggaagaggaaggtcatggatgaggaacacagggtaaatgagcattggcatgggccgggccttccacaggctgcaccctcctgcttgtgcctctgcccttgtcagcctgccacttctcactctgtgcctgtgtcctccccgtctccggtccccaggacaaggtccggcagagccttcagcagcagcatcataaggaggcraaggccaagcccacgggggcccggccatctgccctggacagatttgtgcgctgagccagactccagggttgcctgggaacagtctctccccaagatcacctgtagggaaatgagtgttccctggaacaaggaggtgggggcagtgtggccccttccccaactgggggtggacagctgtctcctggggtgggttggtattaaagaggaaagcgattttttggataatgtgtctggatcatcttgtggacctgttcccctcccccttgccaagcatgaggccattctaggatcggaggggtcagtgtcctgcctctacccccaccccataccttgtggctgctgtggccttagctttgccttttaggggccttcctcctcagagaggctgtcctctctcccatgtccctggagatgtccttcccatgcagcagggtctggcagcctctgggctctccaggtttgtggtgttctgggggtcctggtgaagaccacactgcactcgaagaagtggagacaagtttattgaggagcttgacacccctcttctgccctagcttgagagaacaactgcagcatttttttctttttctcttcccgatgaccatcttttgggctggcgggccaggcccctgggtgtctcccatatcgctgtctttagtgagactgaggatctggtataaggaaacagatcagctgcagccagtgagggcccctgcgttgggcctgggagagagaaggtcctgttcctgcctttcctgtggccccaggcactctcagctctgaagccaggctattgctcgacaccgcaggatgcccaggactccctggaaccaggagcaaaagggcgcagtcctttccccgtcagagccacccaccagcttccaggcttcctgcatcttccaggggtccagcctgtgggacgtcagcaggaatttcccatagcagcaccggtctagcgggtagtgggtggcaccagccagcttgacacactgtgttggggcgaggcctcctcgtcgggcacttacccccacaaagacatcctctaatgggagaaggggtgcccggctggccaccttgagaatgagctgcacagcagacgctgacagcacataccccgtgcctgaggcatagggtggaaaggggccccaggtgtgaggccactgctcctctgatacgcggtgcctgccccccggtgtccgagaggggttcacgcgccagtgcacccggcccaagtacagaagaggcacttcctcgctgtgcaaaacctggcctccttcctgctcagcctctctctggggttccgtgcttctctcccattgcccccaacggccccctcgcaagaccagctctgataccagttcagggacgttgacatacacatcatcgtccgtcttgaggacgtatcgggccatggggcagtgtttctcagcccagttcagcccgctgagggtctttagggtgaggttgcggtaggagtcctggaaggcggcctgcaagatatccccctgggctgctgactccgaggccaggtcactcccctgggaaccccacacggggtgctgtgcgttcggctctcccagcaagaatagcgtctgtaccctgagcccccgggcctcgcgcagcccgccccacgaagcccgaatggcgtttctctggttcaggttctccggagccgtgcacaccaggatgagcaggaagggaggggccccgggaccactgcaagcttcctggttggggatcaagaggcggggcagggccaggggcggccccggtgaggcgggggctgggagcagggaggctagtgagaggctcagcagctcctcccccaaccccgaaggcccgaagagggtccagacgatcaccagcagcaaagcggcgagaaggaggcgccggaagagcctgagctgcatggtgcggcgtactccgaggggatccgtaagagcgaagggcggagactagctccccgggcctgggtcacggccggggacttaaccgaccacgcccgggatgcggaggtctgagcgcgcgaccgggaccagcgcaccctggggggcggggagaggcggtgcagctgcggaccgcggtcgaggcatgctgcgggggtggctaccttgtcgccgcggcctcgccgccagcaagctccgctccatggctggccgactgcggcactcacggcccctcccccgcctcgccccggcggccggtctgccgcccgcttccgcgttgcgcgctcccatccccgccggaagcggcgtcggagcagcgcggcagggcgcggaaacccgggcgggtggagtggcaccaaacggagtgagaccggtctgtccagccgctccccatcccaacccaccgacgtactccaccagggagaccacacccttcataaccaacgtccgcgtttttgcctttgttgcttcggtcacagcccgaaggattttcccttatgactagatgaccccttaaaagaaaacaaaaacaaaaacaaaaaaacccagagtgaccaagacctgcaaactcaccttaactgcaactggctaggctcagctaacccactccacaatgatgctgcacaccaaccccagggtgttggtctctaaactggtctgggtcagcccctcaaggctgaactgttttaccctcacatttctctttacagagagggacatcactagctacatatagggagactggggggtctgcagcatcaccactgctaaaactaatagcactgtgtgggcaactgagtagggcagctctaaatggaaaaaggacccagcactttaacattccctattagaatggacagaaaggacaggaagccataggtatataaactatttattaacagacaaggcctacagacttatttcttcttggacacacccacggtgcggccacggcggccagtggtcttggtgtgctggcctcggacacgaaggctgcaggtaaaaagagaagagtcacaggtcatgcacagcagaaacaaaaggttggggaaaaagaagagcgagtaggaggaatgctgagtcgaggtaggcagggagatgagaccccccactcacccccagaagtgacgcagccctctatgggcccgaatcttcttcagtcgctccaggtcttcacggagcttgttgtccagaccattggctaggacctggattcagaggagggggcaagggatgttttatcccctgacctcctatgcccaattctgttaggaccctccacccttcctctaatcctgccctcatttcagtacacacctggctgtattttccatcctttacatccttctgtctgttcaagaaccagtctgggatcttgtactggcgtggattctgcataatggtgatcacacgttccacctggcaggcagaccaaggtcagatctagatggacccctttctgaggctgaccccacccccagcccccttccttgtcctcacctcatcctcagtgagttctcccgccctcttggtgaggtcaatgtctgctttcctcaacaccacatgagcatatcttcggcccacaccctgaatgaagtgaggggtttcggaattagtgttgaatctgatttttaaattcctttatagcctcattcaaaaagctcacaaaggtaggatctgcaataatctattttgcaatcccctaggtcaccctttcctcacccacctttccagatataaaccgttcgacagaaggttaactttgggccggtcgcagtggctcacgcctgtaatcccagcactttgggaggcccaagtgggcagatgacattgagggcaggagttcaaaaccagcctggccaacatggtgaaaccctgtctctactaaaaatacaagaaaagttgctgagcatggtggcaggtgcctgtaatcccagctacttgggaggctgcagcagaatagcttgaacctaggaggtggaggttgcagcaagccaagatcacgcaaccacactctaacctgggcgacagtgagaccccgtctcaaaaaaagaaaaaagtaactttgttcaggggtatgactgaatcatgaacacagaatttagtattacagacaaccctttgaaagcaggcagtatcttttttttcccccattgctcagcatatgtagttgtcactaagtgccttctgattcttgcatttaggagaacaaggggcctgccactccaagctgatgcagtaaaccagggtcttatgagttacaggctttgattaaggtattgggctgtcagttcctcagaatctctaagggtcacaattatttaggcaaatcactgtatccccataatcaaagtattccaagatcacaaactcaattttgtcagtgcccagaactgactgcccaagttattataaaaagaaactaatgcttacattggtagcatcacatcaacaccagcactagcacccatgccatctgaactcatgaaccaaagtgatttggagagtgaaggaggaactgaatactgagccctgcccctcattttgtccaactagaacatcagaatgtggccctatttggaaataaggtcgttacggaaataattaggtaaaatgacgttatatttgattagggtgggctctagatccaatgacaaatcatgagagagacacgaagaggaccatgagatgacagcaacagattggagtaatgcagctacaagccaaggaacactaaggattactgacaaccaccagaagacaggaagaggcaaggtaggattcttaagtgcctccagcgccaagagtaattttctgcttagtttatatgaacttgttacagtaggctccaggaaactaaaacaaatggcagttcctatctgcaagaaagagatcaagggttggcttcaccgtggctcatgcctatatgcctgtaatcccagcactttaggaggctgaggctggaggatcactgagcccaggagttcaagaccagcctggacaacacagcaagatccagattagccagatgtggtggtgcacacctgtagccccaactacttggaaagttgaggtaggaggattgacttgagccctggaggtcgaggctgcagtgaagagtgattccgccactccagcctgggcgacagtctcaaaaaataaatgtggctgggtgcagtggctcacgcctataatcccagcactttgggaggctgaggtgggtggatcacctgaggtcagaagtttaagaccagtttgaccaacatggtgaaaccccatctcttctaaaaatacaaaaattagctgggcgtgtgcctgtaatctcagctacttgggaggctgaggttgcagtgagataagattgcaccattgcactccggcctgggtgacggggtgagactctgtctcgggataaataaataaacatgaccaagggtcaaattattaggttgattcagaagagagcagggtctttcaaattttttattaattaaatgacgaggtttcaccatgttgaccaggctggtctcgaactcctgacctcaggggatccgcccacttcagcctccgagtgagccactgcactaagcctcaaatttaattatatgtttacaagtgaaaagatttacttcaaaatgggtgtgggaagagatatagatgaaataagatttctaatttttagttagatacatccatgaaggttattctctattacacttatgaatgctgcacctctacttaagcctcacagccggtctctgaaataagtacagtatttcacactgccttattagtttcacagagcacccaacagaaggaatttccctctacaaattcctcaacagagccaacagtatccctactactatccattccctaacgtcgcctaagtacctaccatgcaacagaagccaagaagacaggcctagccctgcacgcatggacacatactggtaggctatttccacaactaactacacattctgacttaagggaaaaaaaaagaacgttatgtatctagaaagccaagaattcattaggtttgtggagagaaatactcaagtgaaataatattcttgcattcattgattcgattcttaaaagccaaagaaagatggatgtactccttcacacttcgacaggaaaggagtgtcaattatggctcatctgagtaaatgtcccactcagacttcttccaccctccatctacaggcttcttcacactttttatctgttggtatttctacttatccctcaagatgcccaataatcctccaattctcagggaatataaatttcgcaggaagggttgctgttatgatggtgggatgggtaaagaaaccgaatctagaagaaatctcacaagctcgtggttcaggaaaatcttagcgaattcgggtgagcaaccatacctcctccccact

SEQ ID NO: 96475 - DNA, 72167 bp, Homo sapiens
  misc_feature (1)...(72167): n = A,T,C or G
cccggccaggctttactttcaaatttcttttttttttttttttttaagacagggtctccctctatcgcacaggtggaatacagtggtgcgatcttggctcactgcagcctcgacctcccagactcaactgatcttcccacctcagccttctgagtacctggaaccacaggaatgtggcaccacacccagctgattatttttattttttgttgaaacagggtttcagtcgggcgaggtggctcatgcctgtaatctcagcactttgggaggctgagggaggcagatcacttgaggccagaagttccagcccagcctgggcaacatggtgaaaccccatctctaccaaaaatacaaaaattagccaggtatggtggcatgcgtctgtggttccagctactcaggaggctgaggcaggagaatagcttgagcctggaaagtggtggttgcagagaggcaagattgtgccactgcactccagcctgggtgacggagcgagactgtctccaaaaagaaagaaagaaaagaaaagaaagagagacagagaaagaaagaacagaaaagaaaaaagaaaagaaaagaaaagaaaaaagaaaagaaagggagggaaacagggtctcactttgttgcccagactgtttcaaaattctttcagcatcaacacacttttcagtcatgctttggccagggaggcagacacggtggcttagaaagtgtgtgacatccagccatgctggtgattctcacagtgctaacctggtattagctctgtcagagacagtctggacggtcggggtgaggcatgatgggagatctgcgctttaggccagttgcttcacctctctgaggttcttacccagttctagaaagaacagaagtgagcttcctcgttcctgcacctgggcagggaggcctggcagataaaggggagctgaagatgaatgacatgttttcataatcgaggactcatttgtgtcatgcattcctctaaaccctttattgtctaattttatcctcgcaacgttcctgggacactggccccataccaagagacagaacagggattcaaaccaggtctctcaggctctaaagcccaaggccatcatgtaatgacagagaagcagacttgaagatcctagagacaggagttcccagagacccatcttgcacctgcagtttcttatttttttattgccaaacccaccctgttccccaaaaaccacagcatactgggcagacagggcccctggccagtctagtctgtgacctgggttgggatgtgctggctgctgtgaccctgataagaggagggggcccagagccctcactgatctctgtttgcttgtcctggactttgtctcacagagcagcttctgggaagagtttattgtccttaggccacggtcaccttctggcctgtcttctggcctttgtagaagagaagctggatcgacatgacagtgtacatttgaagttctgcttatttcctgcaccagtatcgaccaagccctgcagtgtgttgggcacaatgccaggcactgagaggccaccatacagaaacctgagtgccctgctgtgttcagtgagctgatgtcaggggaaaagggaatcagacaagtcaaagggagcccactgaatcccaaggagtgatgagaagctgaagagatagaaatttggaggggcagaggctcatctcctgcagggattaggagaaggttcctggatgaggtgcctggaaaaaagagcagtgcttgggaaggggaaggcgggaagggagggagagaaaagcagacgggcaggtgggatgtatgctgtgggaaggtagaggtgtctgggatgggagcaggagctgatgaagagggtagggaaggtggctgggaagggggttgggaccagctggcgcaggggtctgaaagtgattagccttttgggtgggagatacttaagatattttaagcaagggtgtgatgagttcaagactgggctgttgagagatggctagcaccaagcctggtccatgtaaagtgctagaagcatgtttgcacagggggagggtggacaggagatggggagagctaactatgacctgtgcctgtcatgcttcttagcatcacgtccgaattcatttactgctcacaactccccacaagagacagatattattgttactattatcctcatggtacagagaaagagacgttggcccaccatatgcatgtgggaggtgggggccagggtggacagaaagcagctatggttgctgaggattgagaatggggagtgtagctgtgctgctggtgccggtgggacagcacatgggcccagacctgctctgagcgccacccacacacagccaactgtctgcttgatgtgcccacagcccctccatctggtatgtccaaactgaactcctgacctttgtctcctcctccccacaccccgttactaagccagatcttccccctgttgtccactccagtcaaggccaccgccatctagttggccatccaagccagaaggctgggtggcatcctgggtgcctcagtctccttgaccacctaccccacctcccaccctctgaatatccctctaatccattaacttctctccccatcccccgtcaccacctagttcaagctgccctcatccctcatttagacggctcatctcctccttctgctctgctccaggcagcagccagagtcaccatttagaaaggtcagtctgccgcaggcctttccctgtctcgcacaccctatcctgagtggtatggcccctgctgacccctctatgtcacctagcccatggcccctctgagtctctcagcttcaactgcagagacttcttttagatccaggtaggcaggtgcttctccattcattcattcagcaagcggcaattccttcatttatacctgctgggtttagggtgttgaagcagacaggcctggcctcgtcctcagggagttcacattgcggtgtggaggtaaagtcacaaaatgaatccactggatcttagcacatgttgctcctctgcctgaaaaagtttttgtttaaacttccactcatgcggtgcttgcttggggcaacctctcctggatggccaggctgggcctggcggcttttctgaacagtactgacctcagttggcaagggtagcttgttagtatgcatggccgtctccctcttcgacagtaagccccacatgggcaggcccttgtctgtcttgttcatagttgtcctccaggtccaggctagtagacccttgctaaatgtctgtagaatgaatgataggtttttttttttttttttttttttagaaggagtattgctctgtcgcccaggctggagtgcagtgacatgatcttggcccaatgcaatctccgcctcccgggttcacgtgattctcatgcctcggcctcctgagtagctgggattacaggagcagtgtgccataattttttattgtggtaaaatatacaaaacataaaatttattatttaaccatttttaagaatacagttcggtggcataagtacattcatgttttgcatccatcaccaccatccatctccaggactttttcattttccccagctaaaactctgcacccattaaacaccaaccaccaattccctcctctctccaacaactggcaaccaccattctactttctgaatctatgactttgactactacaggtacctcacataagcgaaatcatacttttgtcctctgtgactgccttattttgtttagcataatgtcctcaggggtcgtccatgttgtagcatgtcagaacatccttcctttttaaaaatttatttattttgagacagagtctcactctgtcactcagctggagtgcagtggcaggatcatggctcactgcagcctcaacctccgaggctcaactgattctcccacctcagcctcccaggtagctgggactacaggcatgcgccaccacacccagctaattttaaaaattttttgtagagaagggggtctcactgtgtttcgtaggctggtctcaagtgatcctcccaccttggcctctcaaagtgctgggattaggtgtgagtcatagtgtgtggcctctagagcactaactttaaaaagctacaattacaaatccttcctctgtccctctgagatatatacctatgtatttcctacaacctaggaatgtctttctcaaggacctgaaatccattcctttggaatgtaatcatcataaaggtagggctcatgtctcccagtctatgtgggagaatagaatcctaacttccctaattgccagctagcagacacagttggcctaatcacatttacgctaagcactccttttaatttttcacttcccagactctaagtgagcccctgcatgctcccctgcctactcccttattcttcctttggaatgcccaatcacccctgcgcaaatggaatggagttcagctgcttcccctactgtcagtagttactgaataaaatctattttcatcattttaatgcctggctttgtttatctttaataatatcattaactagagttcaatctttatttatggttctttttgtttggttttctagtgaagatgaaattgctttgagtaaaatgtgcaaatactaaatgtaccattagataattttgacaaattcatacacccaaatctcctatcaagatatatatcaaggatgaggagaaatttgaacccctgtggattgctaatgggaatgtaaaatggttcagcttgctgtaaaaaatggtgtggtggtttctcaatacattaaactagaattagcatatgatccagcaatttcacttctgagtgtatacccaaatgaattaaaaagaaagcagggactcaaacagatattcgtacacccatgttcatagccgaattattcacaatagccaaaagatggaagctatccgtgtccatgactgcatgaatggataaacaaattgtggtgtatacatataatggaatattatttggccataaaaaggaaagaggccaggcacgatggcgcacacctgtaataacggcattttgggaggccaacgtgggtgaattgcttgagccgaggagttcaagaccggtctggggaacatagtgacaccctgtctctgaaaaaaaataaaataggattagccaggcatggacgtgtgtgcctgtagttgggaggatggcttgagcccaggaagtctaggcagcagtgagcaccattgcaccactgcactccaagctgggtggcagggcgagaccctgtctcaaaaaaaaaaaaaaaaaaaaaaaaggaaaaaaaggaagcgctctgggaaagggaggctttggctggaacaaatggtgaattcttttggcacccctgagctttcttgggcaggcattttaaaggggcctaggcccacctagagatccgcccttaggctgttaacttagcatgatgccatgttagagtttagtcaagtctcttagtgcagtggttagggtagtcgttaaatgctgaggagtctttgtagttctcaattagcaggcgagtttttagggatgaaaggtactgataatttactttgaatgtatcaaaaaataggatggattgctggatgcagagacggcatgtgataaagcggatacagcaaatgttactggtagagagtctgtcacccagtcattagaacatgagctccaggagggcagggactttgttggcctggcacataggcggtcaacaaatatttgcagaatgaacgaacaatacttgtaacggccttaggacaaacaagtgcacaaaaagaggaagctttccctgactctgttgtggcggggatccggacggtggaacggacgcacagaaagtgcgcggagcctggcggagtcgctctggcctcctggagcctctgctctatggcgggtcctcccggggctgcggaacctctctggccgctcgtggcgtccgctctatggccgtcctttggggacgcaggagcatgcgcagaactgctcccggcccggatcgctatggcagcggcgtcgtcgcgggccgggccccagcaatcccgcccgggcccggctgcctcaacagccgcccccactgccccctctcgggcatgaaccgagcttcttgttgccgcccgctgccctacccgccgctgccgccgcatcccgactctgggccagcgctgggaacatgcccctggccgcctactgctacctgcgggtcgtgggcaaggggagctatggagaggtgacgcttgtgaagcaccggcgggacggcaagcaggtctgcaggggtggggcccggcaaggggcgggggcgggcagaagtgcgccgagggcgccgaccggtagattaggtcgggggtggtcgcaagaggctcatctcggatggcgtttcctcagggaaatggtcccagaccaagacgaggcctggcctccctgtaatatgcgcccagaactacttctacttctttgttgtgttaaatttttttccttttaattttcattttctttaattacaattctaagttttatgtaaaaattttcagtctctgcctatctacttctttgttgtactaattggcatgcgtgatctacacacctttctcccaaccccgatactctcatgagagccggtatcatgcattcccaggacttaatacagcgcctagcaagcattattccttgaatgaagggccccaaacgtctctactgtagactgctggattcacttaaaactcgactcattttcttcccgccaaaccttctctcatgtcttccgtttcagtgaatagtgacaccaacccaccagttgcccaagccggacacctggagtcatttttaagcctccccacgcaccccaacactgattatattcatctatcactaagacaataggcctcctctcatctctactgctaccaccccaatccaggacaccctgttgtctctagcaaagctatggccacggtttcccaactggtcgccgccacttgacttgcttttctccaatccatcactttcactgcagcctcagtgatctttctcaaatttaaatctgatgttgtcactcctctgtttaaaacactttatcccattactctcaggataatgaaccaattattcaatgtggtttattaatagggtgacaatataatgtacaaactgggacaattttgaaactgaaaggcattattaatagttacaccaggacagtaggactgctccaggcaagctgagaagagatgttccccctaaatatagggcccaattgcctgttcttccttgtctctggtgctagttgctttgcgtggaacacaagctcatgcataagaaatttattcagtaggcattgggggaatcattggattttggggctgatgatagggaactagcaatagctagttatttgagctttagtttacacttcacaaaacacatttatctatgtgttgaagaaatgaattgtatggtctttgaaatgattgagggcaatgtattaggtattagaggctattgatttcttttaagtgtgaataattttgtatgctgaagatcagtgactattaaacttatggggccatggatccctttgagtatctaacgtaatccacagactattctgtctgcaaatgtatagtcaagctatattttattcacctttttgggagagcttagatattaaggaatttctttttttattttttattttttttgagacagagtcttgctctgcctcccaggctggrgtgcagtggtgcgatgttggctcactgctgcaactactgcctcccaggttcaagcaattctcctgtgtcagcctcccgagttgctgggactatgggtacacaccaccacgccgggctaatttttgtatttttagtagagacaggtttcaccatgttgaccaggctggtcttgaactcctgacctcaggtgatccacccgcctcaccctcccaaagtgctgggattacaggtgtgagccactgtgtatggccagatattaaggaattgctaacacaggttttataattgatccaatggtatgttatcttgaactcactttttttagtcattaatgaaattgtgaaatgcagatgggaaaggtaatttttgtggccctacactgctataaatctaacttataagaagtatcaataatagcaaatattttccccgattttgtgcttggtgaaaaacaaaatgaataggttatctgacaggctccacaaggttggttttgagggtattcttgagagcccttagataactctgaggccacaaatcttacgtttatttgcacattgtaaaaatacatggtttgtttttagtatgtcatcaaaaaactgaacctccgaaatgcctctagccgagagcggcgagctgctgaacaggaagcccagctcttgtctcagttgaagcatcccaacattgtcacctacaaggagtcatgggaaggaggagatggtctgctctacattgtcatgggcttctgtgaaggaggtgatttgtaccgaaagctcaaggagcagaaagggcagcttctgcckgagaatcaggtggtagagtggtttgtacagatcgccatggctttgcaggtactgtgtagactaatagcatcctagcttgttcccagatggcaagaagatggcaggtgtattttaggaaaatttttcttcagatacttacatatagaaatgtattttttggaaaattcatttgtgaagttgacccagtcactctttctgtagcattggaacttttctaagtaagtgatacctatattaaaatagacatagatttcatgtctgattgcaggggaagcccactcaattaccatttatagcaaagtcaattttaaggaccctgaggcaaccaagagcatagagtgactatgtttgttatccattggtcagtcgtgtcatgctgaaaggtggctaggctaattgatatgcccagtgatttcatctgtcagtctgctggggtacagtagatgggaatgcaaaacaagttttcttttttttattttttagaattgggcagcacatcattccttaagatggaataagtgttcctacaagtttgtgttttaatatgcatataactcaaaagcgagacgtttatgaaatactattttggaactgggtagacttgtccagaattaattgaccatgtttaaattctgagatactttctctctttttttttttttcttttgagacggagttttgtttttgttatctaggctggagtgcaatggcacgatctcggctcactgcaacctccacctcccaggttcaagcgattytcctgcctcagcctcccaagtagctgggattacaggcgcctgccaccatacctggctaatttttttttttgtatttttagtagagatggggttttaccatgttggccaggctggtctcgaactcttgacctcaggtgatccacctgcctcggcctcccaaagtgctgggattataggcgtgagccaccacgcccggctgagatactttctctaaataaaaatgctcttgctgtacttgaaaatattattaagctgaggatttcatgggtctgagaggactgtgcgtctgactttgtataagttgtcctaccatcagtggagtttgtaagcattgttttttttttaagacagagtgtcactgtcgcccagattcgagtgcagtggcacaatcgtggctcattccaacctccacctcctgggttcaagtgattcttgtgcctcagcctcccaagtagctgggattataggcgtgcgtcaccatgcccagctaatttttgtatttttttagtagagatggggttttgccatgttgcccaggctggtcttgaactcctggcctcaagtgatccgctcacctcggcctcccaaactgctgaacactgcgcctggcctgtaaacatattttttttttttttgagacggagtctcgctctgtcgcccaggcyggactacggactgcagtggcgcaatcttggctcactgcaagctccgcttcccgggttcacgccattctcctgcctcagcgtcccgagtagctgggactacaggcgcccgccactgcgcccggctaattttttgtatttttagtagagacggggtttcaccttgttagccaggatggtctcgatctcctgacctcatgatccacccgcctcggcctcccaaagtgctgggattacaggcgtgagccacygcgcccggcttgtaaacatatttttaaactggattcatgtaatgccaaaatggtataattgtcaagctaccagggaacagttttgatgggtactgggtaagtcaacacatggaacttaattttctcatttcaaaaattgtaaattagaccttttatttagagattataaagcaataatgtttggtaggtatttgcttgttgaataaggaattgtatggttggttactctttacggtcaaagactctaactcatgccattgctgatggtatataataagccaggaataaatacataattaagtctatttatatgtaataaaatcttgtttctttcctcagtatttacatgaaaaacacatccttcatcgagatctgaaaactcaaaatgtcttcctaacaagaacaaacatcatcaaagtaggggacctaggaattgcccgagtgttrgagaaccactgtgacatggctagcaccctcattggcacaccctactacatgagccctgaattgttctcaaacaaaccctacaactataaggtaggattgggctctgtatgctggcttaccttgtctctgggagagtgcttgtaatttcagaagttaattaagtcagagaattatctatgaattggtttaaggaaaatgttttctttttttaaagggaaaaaaatgtaaataagctattctgacatttaaccgtttactgtttttattttctagtctgatgtttgggctctaggatgctgtgtctatgaaatggccaccttgaagcatgctttcaatgcaaaagatatgaattctttagtttatcggattattgaaggaaaggtaaagaataatctagaactaattgaccagtatttctatagtgcagctttataaatagctactagcaaaatcattgatgattttgatgagtcaatgagtaattattgagattgggttgatagttaacaatggtgggtcccttctgtggggaaggtcagactagaggaaaagggattgatggatcatttcttaatattaatctgtaagccagcttaatggctcaaaagaattggctttttgaaaacctatgcctatagtcataggatgtgccgatgccctgagaggctatttgtctcttcttctaagcagcctatgattcaatgagctacatttaaaatgagtttactctgtttgaacttgtcgttcctttgataatcatcacaacaatcagtaactagttaagaatcacagaaagcattgtgtctgatatagactccagagtgactggctttgtatgttccatgaggctagttgccctttatagattcaggcatccatgtatcattaaggtttttttttttgtttttttttttttgagatggagttttgctcttgtctcccaggctggagtgcaatggcatgatctcagctcacagcaacctctacctcctaggttcaagtgattcttgtgccttagcttaccaagtagctgggattacaggcacatgctgccaggcccagctaatttttgtatttttagtacagacggggtttcaccatgttggccaggatggtctcgaactccttacctcaggtgatccgcccgcctcagcctcccaaaatgctgggattacaggtgtgagccactgcacctggccaatgtactgttaagttttaaaggccataaatcatctattgattttaatactatcccacaacttatttaatttttcaatttgaagcatattgaaaaacacacacaaaagtaaaattttcccataatgccactacttaagaatcaaacaagaagggagtgaaattctcttctctttctattcccattccctggaagatgaccattgctagcaaattggtacatggcctttctggttttttcctgtctttatacagacataactctgtgtgtgtgtgtgtgtgtgtgtgtgtgcatgtgtgtgtgtgtgcatgcgcacgcgcacacccacagattcttaaactgaaatcaggctgttcacatggtacataacttgtttttttgacttaatatatgaggaacacatccttccaagtcggtacctgcaagtttttttttttttgagacagagtctcactctgttgcccagactggagtgcagtggtgcaatctcagctcactgcaacctctgcctctcgggttcacgccattctcctgcctcggcctcccaagtagctgggactacaggtgcccgccaccacgcccgtccacttttttgtatttttagtagagatggggtttcactgtgttagccaggatggtctccatctcctgacctcatgatccacccgcctcggcctcccaaggtgctgagattacaggtgtgagccactgcacccggcccaagtcttgtattttttaacctgctgcctagtttcgtttcttttctttctttttttttttttttgagacagagtctcgctctgttgccaggctggagtgctgtggcgtgatctcggctcaccgcaacctccacctctctggttcaagcaattcccctgcctcagcctcctgagtaactgggattacaggtgcatgccaccacgcccagctaatttttttgtatttttagtagagatggggtttcaccatgttggccagactggtctcaaactcctgacctcaggcaatccacctgcctcggcctcccaaagtgctgggattacaggcgtaagccactgcgactggccctagtttttataagaagaatgcatgataatttattccacaaatcccctaagggacatttatgtttccaattgtttactactgcaagaacagtactgcattgaacatcccgatacataagtctttaggaaactcatactcttatttctgaatgagagtgtcatcagatgggactgctgggttggaggatatacttttataattttacaacttgttatcttacaactgggataccagtacacttcctgtagactaatatactgattgttttctgcttatgtggacatatgactataaataaatattgggaaacctctaccagcttttactttgtttcacaagaccattagtcataattacaatattatttttatttgtagctgccascaatgccaagagattacagcccagagctggcagaactgataagaacaatgctgagcaaaaggcctgaagaaaggccgtctgtgaggagcatcctgaggcagccttatataaagcggcaaatctccttctttttggaggccacaaagatgtaagatacttcccttgcaaatagctgggctaaatagatggggtgaaagagggtggcttctgtaatattcatatgcaagaattaatggtgagttttcttaaaaacaagaaataaaatggcatgattacatatgtagaggaggcaaaattctaccctcttagggtttcttggctgagcttgagaattaaacttataatttaacaggagaaaagcatgtagatttctttaatacctgaataagttttatgtgacacaggagccctcataaggaaatgaagacctaacttctactaaaaatacaaagaagtggcaaaacctaaatgctttttgcttgattgaacaaagagaggcaattgtggaaaagtaaactaggtggagaggctaaaggaagataagaattattttaataaggtctgtttatagaattctctcagtttcagctttccattcttgataataagaatgttactttccttctggtacagggaggacgtatttcatatgggagttttatcttctgctttctggaagaaaaagggaagatcagagtgcccttcttgcacttacttttttttgtttgtttttttttgagatggagtcttgctgtgtcacccaggctggagtgcagtggcatgatctcagctcactgcaacctccgcctcccgggttcaagcaattctcctgcctcagcctccccagtagctgggattacaggcacccgccaccgtgcccggctaatttttgtagttttagtagagacagggtttccccatgttggccaggctggtcttgaactcccgacctcgtggtccgcccacctcggcctcccaaagcttgcacttactttttaaagaaccttagcccaaaataatctttatgccaaagtagcatattttggcgtggcatattctcccagtcttcaaatacatgttgaaatttgcttaattgctaaaatcagaaatttggagaaccactgtcacattcctcagagggttctaagacatatagtgtaaatttttttttaaaggacatatgcactactctgggctcactgcctatgagttagtcctgttctcaaggagcagccaaataataataaaaaaaaagagggcatatgttttagaaatcatataattagagattatctgagaaacctatacatcttactgtgtaagatagtaatatttaaaaagtagtgctcacatttctgagagcttgcataaagttccctcttcattcacattaacttcccaagagaattccttgctttggcttgcagatcctacctttactaaacaggtgttccaggatctaagacttagggctggacaaaactattacaatctgtttggcttctcctcttgccttgtggcatgttaaatttggaaagagaggaggcagtgctagagatgcctcagggaataaagaagaaccatctttttgtgtacataatttcccaccaagcagacctttggccttccagtgtactgatctccatgctcctcttgaattctccagaggtttagcccagttttagaaatgacatactaaaatagttggggatgttattcctgtatgcatttattctataagcaggactaagtgtaccaatcagttttactctcaaagttagccaagcagttgtggtattattacagacatgtaaaatttgaaaatgaaaattaacctgatactcccgtatgtgaggcaatctcccatagaatttttattttggaataattttgtataaacagaaaagttggaaagatagagtggagagttcctgtatacccctcatctagtttcttctgtgattaccagattacataccctaatgcatttgtcaaaactaagaaaccaacatcgaaatattactattgacttggccatgcatggtggctcacgcctgtaatcccagcactttgggaggccgaggctggcagatcacctgaggtcaggagtttaagaccagcctggccaacatggcaaaaccccgtctctactaaaaaaaaaatacaaaaaaattagccgggcgtggtggcgtgcacctgtagtcccagctactcgggaggctgaggcacaagaatcacttgaacctgggcagcggaggttgcagtgagctgagatcacgccactacactctagcctggatgacagagtgaaactctgtctcaattttttaaaaaaagaaagaaaaatattactattgactaaattccagactttctttggctttcaccagtttttttctctaatgtctcwtttctgttccaggatccaatccaggatatagtacatctaatcaggggtctgtgattgtttctcactttgtttattttttatgaccttgattgtttcaaagactactggtgaggtgttttgtaggatgccccttagatttttagaaaactattctctataaatggtgcagttctgtaagggaattcattgtatacacacactcccacatatacctaaaaacccttaatcttcagtatattgataataactctttcttttcttctttataaagaaaaacctccaaaaataacattaaaaatggtgactctcaatccaagccttttgctacagtggtttctggagaggcagaatcaaatcatgaagtaatccacccccaaccactctcttctgagggctcccagacatatataatggtacgtttctttttaaagggtatgtgttttagaaactgcacttagaaaaatgggccatctaagcaaattattttgtgtgaaatgattatgctttactagagattctgttgtacaattaattccttactgtaaagaaagaatactggttaaggtgattgatttagctttatccaaattgggctgtcaaattgttcacaaagtcagtgctgtaataactttaagaattttttaggtgaaatttatataacaaaattaaccattttaaagtaaacagttaaggctgagcgcggtggctcatgcctgcaatcccagcactctgggaggccgaggctggcagatcacctgaggtcaggagttcaagaccagcctggccaacatggtgaaccctcatctctactaaaaatacaaaaattagctggctgtggtggcatgtacctgtagtcatagctactcaggaggctgagggaggagaatcgcttgaacctgggaggtggaggttgcagtgagccaagactgcactactgcactccagcctgggtgacagaatgagacactgtctcaaaaataaaaataaaaataaataaaataaaataaataaataaagtgatcaattaaatgtggccagtacattcacagtgtagtgcaaccgtcacttctatgtagttccaaaacattttcatcaccccaaaggaaatctcttcctcattaagcagtcactcccattttgtccttcacccagcctctggcaaccaccagtgtgtttcctgtctctatgaagttacctgtcctggatatttcatgtaaatagaatcattaaatatatccttttgtttctggtgtcttccacatagcatattttcaaggttcatccatgtagcatgtatgaatacttcatttctttttaggtctggctaccattatgtggatataccactgtttatccattcatccattagtagacatctgggtttttttcaccttttggctattgctatgaacataagtgtgcaagtagttgagtacctgttttccgttcttttgggtacatacctagcagtggaattgctgagtcaaatggtaatttttggtttgactttttttttggtttgactttttgaggaactgttgcactgttttctacagtggctgcaccatttgacattcccatcagcagtgcacaagagttccagtttctccacatctttgccrgcactaattattttctgattttttgattctagccatcctagtgggtgtaaagtggtatcctattgtatttttgatttgtatttccctaacgattaatgacatacagcatcttttcacatgcttgttggccatttgtatgtcttctttggagaaatatctgctaaagcttttgcttttttttttttgatacagggtcttgctctgttgcctaggctggagtgcagtgctgcgatcacggctcaatctagcctccacctctctggatcaagtgatcctcccacctcagcctcctgagtagctgggaccacagcatgccaccatgcctggctaatttttttatttgtagagacaatgtcttactatgttgcccaggctggtctcaaactcctgggctcaggaggtcctcccaccttggcttcccaaacaaagtgctggaattacaggcatgagccactgtgcccaggctttttttttttttttcttttttctttttttaagagaggatcttgctctgttacgtaggctggagtatagtggcatcatcatagctcactacagcctctgaactccttgactcaagggatcctcctacctcagccttccgattagctgtgtctacaggtgcacgccaccatacctggctaattattatgattatttttgtagaggtgggtctcactatgttgctcaggctggtcttgaacagttcttctgcgttttcctcccaaagtgctgatattacaggtatgagccacatcacccagcccctgcccagttttaaattgtgtttttgtctttttgttgttgagttgtaggagttctcgatctgtgttccagatactagtcccttgtcagatagacaacttgcaagtattttctccattgtataggttgtcttttctttccttttttagttaaaatttttttttttgtttttaaaaatttcttttgttttttcactttcttgataatgtccttttcacaaaagcttctaattttgatgaagtccagtttatctatttttttattttgttgtcatagctaagaatcccttgccaaatccaacgtcttgaaggtttatgccatagtttcttctaacagttttatagttttagctcttatatttaggttgtcgatcgaatttttagttttaattttttcattatgataaagtacacataatgtaaaatttactattttaaccatttgtaagtgtacaatttagtggtgttaaatacatctataatgttatgcagccatcacccctcatcttcataactctcatattgtaaaactgaactctgttaccattaaacagtatctccccattccctactaccccagtccctggcaaccactgttctaccattctactttctttctttttttttttttttttttttttttgagatggtgtcttgctgtgtcacccaggctggagtgcagtggcatgatctcggctcactgcaacctccacctccctggttcaagcaattcccctgcctcagccccctgaatagctgggattacaggtacacgccacaacatctggctaattttttttgtatttttagtagagacagggtttcaccacgttggccagactggtcttgaactcctgacctcaggcaatccacccaccttggcctcccaaaatgctgagattacaggtgtgagccactgtgcctggcccaccattctactttctgtctccatggttttgactagtgtaagtacctcagataaggagatcttgcattatttgtctttcatgactgccttatttcgtttcacataatatcctcaaggttcatccatgttgtgacatatgtcagaattaccttcctttttaatgctgaatagtattctgttgcatgtatatcccacgttttgtttatctggttcatctgcagatgtacatttgtgttgtttccaccttttttgctagtgtgaataacgctgctatgaacatgaatgtacacttatctctttgagaccctgatttcttttttctttttttttttttttttgagacggagtctcactgttacccaggttggagcgcagtggcacaatcgtggctcactgtaacctccacctcccaggttcaagcgattctcctgcctcagcctcccaagtagctgggattacaggcatgtgccatcatgcccagctaatttttgtatttttagtagagatgggatttcaccatgttggccaggctggtctcaaactcctgacctcaggtaatccacccgccttggcctcccaaagtgctagaattacaggcgtgagcctctgctcccagctaagaccctgatttctcttttgttgggtatataaccagaagtggaactgctgactacatggtaattctaactttttgaggacctgtggtactgttttccacaacttctgtatcattttacattcctatcagcagtacacaaaggttccaatttctctacattctcaccagtacttgttattttctgggattttttagtaatagccatcctaatgggcatgaggtggtatctcattgtagttttgatttgcatttccttagtgattagttatattgagcattttttgtgtgcttattggccgtttgctatctttttgggaggagcgtctattcaaatcctttgcccatttttgagttgggtcgttcattttttgctgttggattttaggagttctccatatattcaggatgtcaattccttatcacatatatgatttgcaaatattttctctcattttgtgggttacctttttactctgttgatagtatcttttgatgcacaaaatttttaatttttgtgaaatccagtgtgtctttttcttgtgttgcctgtgcctttggtgtcctatccagaaaatcgttggcaaatccaatgttgtgaagcctttgccttatgtcttcttctgagagttttatagttttaggtcttacatttaggttttttgttcattttgagttaatttttatatatggtgttaggtaaaggtctgacttcattattctgtatatggatatctagctttttcagcactatttgttgaaaaaactgtcctttcctcattaaatgatcttggcatctttgtcaaaaatcattcgaccacatatgtgaaagtttatttctgggttccccattctgttccattggtttctatgtctaatgtctgtttttatactaatactacactgttttgataatgtggttttgtggtatgttttaaaatcatgaggcatgagtcctccatctctattcttctttttcaagattgttttggctatttgggatcccttgagattccactgaattttaggatggatttttctatttttccaaagaatgtcattgggattttgatagggattrgattgaatctgtagattgctctgggtaatattaatatattgacaatattaagcttttctcaaggagatgcccaaatgtaaaaagagaaaaaaagaaagaacaatgttaagtctttcaatccatgaacatgggatgtgtttccatttatttatgtcttctttaaatttctttcagcaccattttgtagatttcactatgtaagtccttctttcgccttttggttaattcctaattattttattatttttgatactattgtaaattgaattgttcttgtaatttgcttctcagattgtttattgttagtgtatagaaatgcaactgatttttgtatgttgactttgcctcttgctaccttgctcagttcgtttattagttccaacagtttctgtatgtggaatctttagggtttcctagacacaagatcatatctgcaaaaggagataattttacttcttcttttctaattttgatgccttttattttttttttccttgcctaattgctctggctagaacttctagtactatattgactagaagaggtgaaaacaggcattcttgccttgttcctgatcttagaggaaaagctttcagtctttcaccattaaatgtgatgtttactgtgggtgtttcatatatgacttttattatgttatgaatttttttttctattcgtagtttgttgaatttttttttaatcatgaaaaggtgtttttttttcacagccctgaaaatcatcacataagggtgttgatgatcatgtgttttttttccttcattctgttaatgtggtctaatagtacatatgaagcatataattcattgtccttaattagattcacagtatcatgcagccatcaccactatcttccaaaaccttttcatcatttcaaacagaaacttggtacccattgagcaataattttctattccccgtatcgtcaggccctggtaagctctcatctactttttgtctatggatttgccgatttgcctgttctagatattttatgtaagtggaatcatacaatatttgtctttctgtttctggcttctttctttctttttttttttttcattgttaagaagttttgtttttcttttttcttttttttttttttgagacggagtcttgctctgtcgcccaggctggagtccagtggtgcgaccttggctcactgcaagctctgcctcccgggttcacgccattctcctgcctcagcctcccgagtagctgggactacaggcgccygccaccgcgcccggctaatttttttgcatttttagtagagacggggtttcaccatgttagccaggatgttctggatctcctgacctcgtgatccgcccatcttggcctcccaaagttctaggattacaggcrtgagccacggtgcccggcccacagttttgtttttcaagctgtccattgccattggtcagcttgaactagtccagagtccagcaggaaagtgcatggtgtaccagattcaccatctcttaagttgctactgttttctcttctttactgaaagattgtactgagccaggctttacctatgacaggccggcgacacgtacacttattgtgctgttcttcaggcttttctgagtcagcatcttttctctggcttcatcatgtacagaaggattccatggagaaaagctaattgcatgagtcttctattttaaattggtcagacagacgagtaatacataccttaacactgtcaaccactttactcttaaaaagctgaacatctttctcatacagtattgcagcctctgggtttagggggctttttgtatcaatcttgtagaaaactctccctgcatattgttagtacttgccaaatttggttatgattccacctccattttccaaatgctcttcacatccagttcatctgaggtggcatcacctagtaggtgaaagatgggaataccaaatatcaagcatggatagtcaccatctggatagtaattagggatggatgtaaactgcaaacttaaatacaccatcttttgtttttgagacggagtctcgctctgtttcccaggctagagtgcagtggtgcgatcttggctcaccgcaacctctgcctcctgggttcaagtgatctcctgcctcagcctcctaagtagctgggattacaggcatgtggcaccacaccagcaaattgttatatttttggttagagacggggtttcaccatgttagccaggctggtctcgaactcctgagtgctccaccgcctcggactctcaaagtgctgggattataggtgtgagccaccgcgcctggcctaaatatgccatcttgataaagtctgtgccctatgaatattagtccaaaccactttaatacagagggataagatggctgcacatagacacctaataacgtctgctccgcaaccaaggtaaattcagcaagaagagagtatttcaggtggacgagtctgtaggaagcatgcatgccatttgttgactgtgctgctgggacaggctccgtaggcttagttatgggcaaagcatttttgggaatagaaggcagctgtttctttggcatagttcatcaaagactggtttttgcatcccctgccartgttttcagcttcagatcgtttccatgtagagcttgtagacatgctccagaaagagtacataatgtgtactccaaacaaagaaattcagtagtatgtcatcagactcttccgtcctcagcattcaatttaccagccttccgggcattgtgcctcacctctgtgccttcaatgtagagttcccagctgcctatcacctttgtggcccagcggcatctctggccacagtgccagtcctgcccctgcttgctccctgccctgtcctggcttacttcttttcttttctgagacaggatctcaactgtgtcaaccaggctggagtgcagtggtgtgatcacggctcactgcagccttgacctcccrgctcaagcaatcctcccactcaggcttccaagtagctgggactacaggcacttgccaccatgcccagctaattttttggtattttttatagaaatggggtttcgccatgttgcctaggctggtctcaaactcctgagctcaagtgctgggatgataggtgtgagccaccacacttggcctggcttattttacttagcatgttttcagggttcattcgtgttttagcatgtatcagaacttcattcctttttatagattagaaatattccattgtgtgtgtgtgtgtgtgtgtatatatatatatatwttttttttttttttttttgaggcagggtttcactcctgttgcccaggctggagtgcagtggcgggctctcggctcactacaacctccgcctcctaggctcaagcaatcctcccgcatcagcctcccaggtaactgggactacagacatgcaccaccacacctggctaatttttgtatttttagtagagatgggatttcaccatgttgcccaggctggtctcaagctcctggcctcaagtggttcacttgctttggcctcccaaactgctgggattacaggtgtgagccaccgtgcctggcagtatttaccacattttgtttatcccttcatctgctgatggacttttgggttgtttccgccttttgactattttaaataaagctgctgtaaacattggtgtacaaatacttaacttaaatccctgctttcagttccttggattacatacttaggagtggaattgctgagtcatatgttaattctatgtttaactttttgaggaacctcttgttgcattttgagttgattttgtataagatatgaggagtgctataataatttccaaacatcttttcattcagggtgaaggcaaatgtttgtcccaggagaaacccagggcctctggtctcttgaagtcacctgccagtctgaaagcccatacctgcaaacaggacttgagcaataccayagaactagccacaatcagtagcgtaaatattgacatcttacctgcaaaagggagggattcagtgagtgatggctttgttcaggagaatcagccaagatatttggatgcctctaatgagttaggaggtatatgcagtatttctcaagtggaagaggagatgctgcaggacaacactaaatccagtgcccagcctgaaaacctgattcccatgtggtcctctgacattgtcactggggaaaagaatgaaccagtgaagcctctgcagcccctaatcaaagaacaaaagccaaaggaccaggtgagtgatatgcacacatgagatactggttttggagagaagactgaaagtgcagttacaaatatgtgggttctgttgtcattttaggaaaatcagtaattctatgtatcagtttaaacatagaagaatatttgcatcaaaccaaaaagaaacccagtaccctataacagtcactcaccattccctcttgcccacaactcgtggcaacatttgtctctatggatttgcctattctgaggatttcatataaatggaatcatacaatttatggctttgtgtgtttggcttctttttttctctttttttttttgagacagagtttcactcttgtttcccaggctggattgcaatggcgcgatctcggctcactgcaacctctgcctcctgggttcaagcagttcttatgcctcagcctcctgagtagctgggattacaggcatgcgccaccacgcccagctaatttttttttttttttttgagacagagtcccactctgtcgcccaggctggagtgcagtggcgtgatctcggctcactgcaacctccgcctcccgggttcacaccattttcctgcgtcagcctcccgagtagctgggactacaagcacccaccaccacacctggctaatttttttgtatttttagtagagacgaggtttcaccgtgttagtcaggatggtctcgatctcctgacctcgtgatctgcccatcttggcctcccaaagtgctgggattacaggcatgagccaccgcactcggccgatgcccggctacttttgtgtttttagtacagacggggtttcttcatgttggtcaggctggtctcgaactcccgacctcaggtgatcagcctgctttggcctcccaaagtgctgagattacagacataagccactgggcctggcctgccttcttttacttaacctgatgttttcaaggtttatctatgatgtaggatgtaccaacattttattccttttttaaaaaaatttcattttttaattttttgagacagggtctctgctgctcaggctagcgtgcagtggtgcaaacacagctcactgcagccttgacttcctgggcttaagtgatcctcctgcctcagcctcctgagtagctgggaccacagacatgccctgctaatttttttatttctatttcttgtagagagatggggccttgccatggccatgttgcccaggctggtctcaaactcctgggctcgacagtcctcccaacttggcctcccagcgtactgggattataggcatgagtcactggaccctgcctcattcctttttattgccaaataatatactgtatttgtatttgtgtgcctgtgtgtgtgtgcatgtgtgtgtatacacacacatatatgtattttttgtttgtttgagtctcactctgtcacccaggctagagtacagtggcacgatctcagctcactataacctctgcctcctgggttcaatgattctcgtgcctccgtctcccaagtacctgggattgcaagtgcataccaccatgcccagctrattttagtatttttagtagagatggggtttcaccatgttggccagactggtctcaaactcctgacctcaagtgaatcgcctgccttggcctcccaaagtgctgggattacaggtgtgagccaccacacccagcctatatatattttattcatccattcatcagttgatgtacatttgggttgtttctactttttaggtacttttgttttctaagaggaaggttatatgtggataatgcggctatgaacacttgcatacaagtttctgtgtggacatatattttcagttctgttgagtatgtacctaggggtagaattcctgggtcatatggtaactctatgtattaaactttttgagaaactgcaaaattgttttccaaaacaaccatataattttatttctgccagcaatatatgagggttccagtttatctgcatccatgctaacactcgttactgttcattgttttgaacatagtcatcctagtaggtatgaagtggttgtgatttgcatctccctaatgaccaatgatgttgaacatgtttttctttttctttttttttgagacagagtcttgccctgtcgcccaagctggagtgcagtggcacaatcttggctcacagcaacctccgcctcctgggttcaagtgattctccagcctcagcctcccgagtagctgggattacaggcgtgtgccaccacgcccaggtaatttttgcagtttttctagcagagatggggttttaccatgttggtcaggctggtcacgaacttctgacctcaagtgatcagcctgcctcgacctcccaaagtgctgggattacaggtgtgagccaccgtgcccagccttgagcatctttttatatactttggccagtatttctcctttggagaaataatctatttgaattctttattctagataccagttacttattagatacagcatttgaaaatattgtctcccgtccaggaatggtggctcacgcctgtaatcccagcactttgggaggccgaggcaggaggatcccttgaggtcaggagttcaagaccagcctggccaacatggtgaaaccctgtttctactaaaaatacaaaaattagctgggcatggtggcacgagcctgtaattccagctactcaggacgctgaggcaggagaatcgcttgaacctgggaggcagaggttgtagtgagctgagattgacccagtgcactccagcctgggtgacagagcaagactccatctcaaaaaaacaaaaaaggaaaataaaatattgtctcccatcctcccctcccctcccctcttccccttctgcaaggccttgctctgttgctaaggctggagtgcagtgatgtgatctcagctcactgcagcctccacctcctaggctcaagtgatcctccaatcttaccctctcgagtagctgggactacaggcatacgccagcacgcctggctaattttttctattttttgtagggacagggtgtccctatgttgtctaggctggtctcaaactcctggctgggctcaaatcatcctcccaccttggcctccaaagtgctgtgattacgggtgtgagccacctgtgcctggctgagcatctaattaatatgcatcagacatagtcctaagtacttttagtgtattctttcagctaatcctgaaatagtaatacaatatggctgtgggtattagatccatttttaaatgatgaaactgggctcagggaaattaagtttctcacataagactgcatctaatgccaagctcaatggtctttttattgtgctttttagggtacatccaaataactgatgtttacttgggaaataaatttgtattaaattggaattcatttaaaacattggttcattttcagaatggaaaacctatgaaaagttatgaggagatttttaaaaataattgaatcaaacatcagtagtttcagattaaccacaatttaagtgattgaattaaaacaattatttttatttggaggaagagaaaaaaatcagaacatttggataactgatgtcggcattttgtctttgcctgtcaacactgcaaataaacattcattttgagaaagacaacttctcattttctttttaatttattaaaaaattttggccaggcmcagtggctcacacctgtaattccagcactttgggaggccgaggcgggcggatcatgaggtcaggagatcgagaccatcctggctaacacagtgaaacgccgtctctactaaaaatacaaaaaaaaaaaaaattagctgggcgtggtggcggccacctgtagtcccagctactcgggaggctgaggcaggagaatggcgtgaacccaggaggaggagcttgcagtgagccgagatcgcgccattgcactccagcctgggcgacagagcgagactctgtctcaaaaaaaattaaataaaataataatttttttttttgagacactcttgctgtgtcacccaggctagaggacagtggcatgatcacagctcatggtagccttgacctcctggactcatacaatcctcttacctcagcctcctgggtagctgtgactacctggcatatcactacatctgactttttttttttttttaaatggagatggaggtctcactctgttgctcagactggtcttgaactcgtggcctccagtggtcttcctgacttggcttcccagagtgttgggattacaggtgtgggctaccacactcagcttcttctcattttcatttacaattttaaaagtaggcatggagcgtttggccatttggatgttcaaaagacttcattattttgtgtttttgtgtgtgtttgcttcattttataatcattattttttaactgttgcattatgmtttaatttcattgcacaaaaatttgaaattgcaactgcttttcttttcttttctttttttttttttttgagatggagtctcactctgttgcccaggctggagtgcagtggtgcgatctcagcttactgcagcctccccctcccgggttcaagcaattcttctacctcagccttctgagtagctgggattacaggtgcgtgccaccatgcccagctaatttttgtatttttgtagagacgggggtttcacgatgttggccaggctggtctcgaactcctgaccttgtgatctgcctgcctcagcctcccaaagtgctgggattacaggcacaagccaccatgcctggcccgcttcttttgttttctaagaggaaggttatgtatacctctatattcaattctgcattgttatatttgaaccatattgtgaactttacattgtgatgggtcattttagaacttccatgtaacactaaattgcaatatggaaaccagtttttaaaactgaggaaagttttcatgctaaaaaacaaaagccactttttatggacaacttactttggattacaatgtaccaggttgctgctatactttaaaatgtcattttattgtttttaaggatcaagttgctggtgaatgtattatagaaaaacagggcagaatccacccagatttacagccacacaactctgggtctgaaccttccctgtctcgacagcgacggcaaaagaggagagaacagactgagcacagaggggaaaagagacaggtccgcagagatctctttgctgtaagtcattttgctttggtttgggaggtggactttgggaaactcaatttctatttagagcaattaacaattgccaaaaaggcatgtaagaaatgcaaggaacataatacagaagggtgacaatggcaagatgctaaatagtagttttcaaatatcagtgagttcgaagcagagtaaggattttatcttctccagcaaagatggacagatcattttgaaagttaaaggaataggctaatgwggttaaacctttggccccatctgtattgtactgatgaacagttctttcttcagcttctccacagaatcatgttgacatctcatttctagaaataacttcaacacgtatcctctccataaccttcttagatgactgacttttggcagagtctttccaaaaaaatgcaatgttttgaaggttttaagagcaaaccacggacaaatacatagagaacctgctgataggggaacattggaaggggctatatatgaaactgataatcttcttttttaattatttaagttccaagagtcgcctcctcgatttttgccttctcatcccattgttgggaaagtggatgtcacatcaacacaaaaagaggctgaaaaccaacgtagagtggtcactgggtctgtgagcagttcaaggagcagtgagatgtcatcatcaaaggtttgtgggaacatatgctggatttttaaaaaccttataaccagacgtggtgtatcatgcatgtaatcccagcactttgggaggctgaagcaagaggatcaattgagtccaagagttcaagactggcctgggcaatatagtgagaccttgtctctacaaaaaatttaaaaattagcgaaatgtggtggcatgtgcctatagtcccagctactcatgaggccgaggtgggaggatggcttgaacccaaaaggcggaggttaaggtgagccgagatcatgccactgtacttcagcctgggtgacagagcaataacctgtcttaaagcagaaaccctccaaaaccttcttataaagctttttgtttgtaaagtcttgtgtatattatgaagttttgtattaaaacatcttagctctgcttcttgccaaacactggaaggaacagatgggacagatgtgatctcagcagaatctttttttttttttgaggtggagtctcgctctgttgcccaggctggagtgcagtggcacaatcttggctcactacaatctccgcctcctgggttcaagcaattctcctgcctcagcctcctgagtagctggaactacaggtgccagccaccatgctcggctaatttttgtattttagtagagatagggttacaccatttggccaggcttgtctcaaactcctgacctcagatgatccgcctgccttggcctcccaaagtgctaggattacaggtatgaaccaccgcacccggcctcagcagaatctttgattgaaatggacagattctgtggtttcagagatggtcacttccagtgaattaaagaaaccaagtaggccaggtgcggtggctcacgcctgtaatcccagcactttgggaggccgaggtgggcagatcacaaggtcaggagatcgagaccatcctggctaacacagtgaaaccccatctctactaaaaatacaaaaataaaattagccgggcgttgtggtgggcgcctgtagtcccagctattcgagaggctgaggcaggagaatggcgtgtacctgggaggcagagcttgcagtgagctgagatagggccactgcactccagcctgggctacagagcgagactgcatctcaaaaaaaaagaaaccaagtagattccgaatatggcaaatgtgaaagtccccatttgcccttccaaaaatgagcacctcccagaaacgagggctgtgatcattgtgatcatttttcactagtagctataaccctgctgtgggctggtttccaatggacactcctctaagtccagcgcaagaccttttttttttttggtcttgctgtgtcacccaggctggagtaagacctttttcttttttttttttttttgagatggagtcttgctctgtcacccaggctggagtgcaatggcgcgatctcagctcattgcaaccaccgcctcccaggttcaagcaattctcctgcctcagcctcccgagtagctgggattacaggcrcgcaccaccatgctcggctaatttttgtatttttagtagagacggggtttcaccatgttggccagtctggcctcgaactcctgacctggtgatctgcccaccccagcctcccagagtgctgggattacaagtgtgagccaccgcatccagctcagacctttttcttaatgctgaatgatacatcatggattgtaggtgttataaaaatagcaagtaggaatggargtgactctgtgactttcttttaaaggatcgaccattatcagccagagagaggaggcgactaaagcagtcacaggaagaaatgtcctcttcaggtaaagttgacttcttttcttcatctaattggcagttaggggtayggttcgtggacagaaacactggttctaactatgagaggttgaaactttccagcagcagtaaaacatgtaggaaatcgagttggaaaagattttgaaatttcttagtcaagtcttttaagaaatcatcatagggtgttgaatgtggttcaaatatcagargagggggatattaaagaaataacaagagggctttgagtggcagtaagtcctgggaggtttcagaccagaaatcaagtgaatgtttaacttttttccatgtccagtgtccactgttcagtgaattgctcccatcttaggaacagagggaggttgcttggggagtggtgctgccgtaggctgagggctatcattctttttaatattttttaaagatagtactagcagtttccatttattgaatgctgaccatgtcttaggcattatggtaaacatattaagggtattatctcatttcacatttacagtactgccaaaatatgcagcattatcctcattttgcagctaaggaaacagaggctctgaggagttaagtaacttgcccaaggtcacagagctggtggacctagagctaagatttcaactgaggtgtcagacaccagagaaatgataaatatgctgtttgacttacttttgggctagctcctgctggggtatgttccataccaaatacaaagcccttttcaactggggcagcccaccacaaacaactactggggatgtttgccttttcaggcccttcagtgaggaaagcgtctctgagtgtagcagggccaggaaaaccccaggaagaagaccagcccttgcctgcccgacggctctcctctgactgcagcgtcactcaggtgcattacgtactcctaagagagaaggtggacagtctacatctggcaggcctaatgcagtaaaccttttaaatgtcagctccatttatttttgggacagggccagcttgttatatcttttcactcttgataaagaaaggaactggtaaataatagtcaaaaggattatgattgacccattaagggaataaatttttcaggtactcttgtaaacaattgatagcctaattaaaaatatttcataggttggtcttaacaggacttcctggcctgatgcagtggctcacgcttataatactagcactttgggaggccaaggtgagaagattgctttagcccaggagtttgagatcaatctgggcaatatagttggaccctgtctctaagaaaaaaaaattacctggcaaggtggcgcacacctgtagtcccagccactcgggaggctgaggtggaaggatcrcttgagcccaagaggttgaggctacagtgagttgtgttcacaccactgtgctttagcctaggtgacagagcaagactctgtctcaaaaatataaataaataaataagtaaataaataacagaactttctaagggcttgcactaggcagcactttgctcaatctgctgtgataccaacatacccatctgtgtcgccagatttgagtctcacttgctaatcattcctcagtttcttatttgtgtcaatgtagtttaccttcttgcctgtagatgatgtagggacaccatctggtggctaaatgggtaattactaggtttctaacccatgttcacctctctgtataatactctgggaattcttcctgttctttgaaagtattggatgtattatttctttaactatatcatttagttatttcactaatagaggctgccttccatatctcagagttgtaaggtttatgtgtatttttaggtgatcctttaaagcactttaacagtctcacattaagagcaagctgaagctgggcatggtggcttgtgggtgttatctcagctacttgggaggccaaggaaggaggattgcttgagcccaggagtttgtggccagcctggacaacatagtgacacccctgtatccaaaaaaaagaaaaaaaaaaagacaagctgagtttgcctaggtaatttaaaatgccaacattcctatagaacaagccttctgcttaggagttgataaaccagaactagccatccactgtcctctggaaatttcttcacagctgagactctccaggacctttgtaaaacttcaccttgggcaggcgcggtagctcatgcctgtaatcccggcactttgggaggctgaggcaggcggatcatgaggtcaagagttggagaccagcctggccaacatggtgaaaccctgtctctactaaaaatacaaaaattagctgggcgttgcggcacgtgcctgtaatcccagctactcgggaggctgaggcaggaaaatcacttgaaccagagagtcggaagttgctgtgagccgagatcgtgccactgcactctagcctggcgacagagcaagactctgtctcaaaaaaacacaaaaatcaaaacaaaaaaaaaacaaacaaaataaaaaacttcatctgatgttcttcagttattcttgtggactttatgagtgaactgggatatcacgggtaaaatcacttcaatgtttttttctttttgccacaaatcatatgggaacaatttttgtatttgttagattctcctgttatattgcacctaggaacgtattgtgtctagttgttgcatctaagactggttcaagtatcacattctggttgtgttgtcatgtagaattttaattcttccaaacatttaataggaaaggaaacagattcattgtctgtctgaggatgagttaagttcttctacaagttcaactgataagtcagatggggattacggggaagggtaagttcttgtttttctgtctccctttataaactatttctgttttaatgaatattaaatgtgcattttcagtagtatttagatstctagtattcccactgataaaattataaatggtttgtggcatatgctggagctaaaagtgtctcttcttttttttttttttttttttttgagacggagtttcgctcttgttgcccaggctggagtgcagtggcacaatctccgctcactgcaagctccgcctcccgggttcacaccgttctcctgactcagcctcccaagtagctgggaccacaggcgtccgccaccatgcccggctagttttttgtatttttttagtagagatggcgtttcaccgtgttagccaggatggtctcgatctcctgacctcgtgatctgcccacctcggcctcccaaagtgctgggattacaggcgtgagccaccacgccccgcctggccattatttcttcacattttttttttggacttcttcctgccctcttagggattccaattacatgtatattaggctccttaaatatgtgccacagctcactgatgctctgtttatttttactttttaaaaatatattttattttatttatttattttttgagacagagtctaactctgtcatctagactggagtgcagtggcatgattttggctcactgcaacctctgcctcctgagttcaaggtattctcctgtctcagccccgccgagtagctgggattacaggcactcgcccagctacatttttgtatttttggtagagactgggtttcaccatattggcaaggctggtctcgaactcctgacctcaggtgatccgcccacctcggcctcccagactgctggtattacaggcatgagccactgcacctggcctrtttttactttttttctgtttcacatttcatagattctattgctatgtctttgagttcattaatcttttcttctgcagtgtctaatctgttaatcctatcccgtgtatttaatatattgtatctttcatttctagaaatttgatttgggtctttttttaatgtctttgtgtctctctttaacatgttcatgttttcttctaccttggccatatggaagatatttatactacccattttaatgtcctcatttattaattctatcagtcgtgtcacttttggatatgtttctattaactgatttctttctcttcacaaatgtatgatattttcctgcttctttgcccatctggttatttttgatgggatgctagacactgaattttacctcattggaagctggtattttgtgtttctttaaatattcttgagctttgtacttgagtatagttaagttactttgaaataggcagaatttgtacacagaatctggggctgtttcttttagactgtctscaaggttcctgtctcactttctagtgacagtggttgttctgaactctgtcctttctgtaggcccacaagattgtgagttctcttgtactttgatctgccyatggcctgctcttaggcttaaaggtgttgactcttctccaagatctgcctgcagattttgtttattctgcattccctttacgttgttgagttttgtattttttctagagtttatagttgttatttgtggaagggtcaggtcagtctgtaggaacttacttggacatttcaaaggataattcccgaaaggtcgttttgcacgtaattttttaatgaaaaattctcatgaagccaattaaataacaaagggatatttttttcccccaggaaaggtcagacaaatgaaattaatgccttggtacaattgatgactcagaccctgaaactggattctaaagagagctgtgaagatgtcccggtagcaaacccagtgtcagaattcaaacttcatcggaaatatcgggacacactgatacttcatgggaaggttgcagaagaggcagaggaaatccattttaaagagctaccttcaggtgatcagcttattattattttttgttttttagacggagtctcactctgtcacccaggctggagtgcagtagtgtgatcttggctcactgcaacctytgcctcccgggttcaagcgattctcctgcttcagcctcccaagtagctgggactacaggcatgcaccaccatgcccgggtaatttttgtatttttggtagaggcggggtttcaccatttggccaggctggtattgaactcctgacttaaggtgatcctcccaccttggcctcccaaagtgttgggattacaggtgtgagccaccatgcctggcctagtttattcttttacagcaaactggagagcatgtgtttattggagaactgtgtcaaaacaaggaactaatgcctataaatttttttgtgtttttaaaattatttcatttgcatatctccataaaaggtatatcctgtgttttgcaacagaggtattcctgaaaagttacatgaaaattaatttttaaaaataaatagataaatgtttgtggtttttcatgtgacttttcttcaagttagacagttgtggtgttttttaggtttaagagatggtagtgaagcttaagttcatatgtaaattttaagtcattaaaccaaactcttgtcagagggaaaaaagaatgtcagtataacaagatttttaaaaaaacagccctgctgggtacggtggctcatgcctatactttgggaggctgaggagggcagattgcttgagtccaagagtttgagaccagcctgggcaacatgatgaaaacttgtgtctacaaaaaatacaaaaattagccaggcatagtggctcatgcctgtagtcccagctactcaggcggctgaggtaagaggatttcttgaacccaggaggttgaggctgcagtgagccatgagcatgccactgcactccagcctgagcgacagagcaagatcctgtctcaaaaaatcagatgaaatgaaataaaaataaaataataaaataaaataccaaaaaaaaaaaaaaaaggcttggtgtggtatcatcatgcctgtaatctcattgctttgggaggccaaggtgggaggattgcttgaggccaggagttcaagaccaaccgggacaacatagaccccatcactgcaaaaaatttaagaattagttggacatggtagtgcattcctgtagttctggttacttggaaggctgaggcagggtgattgcttgagcccaggaattagaggctatagtgagctrtggtcacactgcactacatccctatgacagtgcaagaccctgtcacttaaaaaaaaaaaataggccgggtgcagtggctcatgcctgtaatcccagcactttgggaggctgaggtgggtgggtcacgaggtcaggagatcaagaccatcctggctaacacagtgaaaccctgtgtctactaaaaatacaaaaaattagctgggtgtggtggtgggcccctgtagtcccaaatagtcgggaggctgaggcaggagaatggcatgaacctagsgggtggagcttgcagtgagctgagatcgtgccactgcactccagcctgggcgacagagcaagactccgtctcaaaaataaaataaataaataaaataaaatacaaaattttaaaaaattgcagtgttcttgctatagtggtaaaagtgtttatttttccctttgtctttgttgttgccttttagctattatgccaggttctgaaaagatcaggagactagttgaagtcttgagaactgatgtaattcgtggcctgggagttcagcttttagagcaggtgtatgatcttttggaggaggaggatgaatttgatagagaggtgagtgtctcattaactgtatcaagatgcttatgttatagaattttttaaacaaccttttgaaatataaatcacacataacaattcactcatctaaagtgtataattcagtggtttttaatgtgtttacaacrttgtacagtcattaccacaatcgatattagaacattttcattacgccccaagaagccctgcacctgttagcagtcactccccatggtccgcactgccaaatctgaagtcatgaagatttatttttatattttcttctaagagtttttttggtttcagcccttttaggtcttggacacttttttttttttaaggaaaatttaaactttagcttgggcatggtggctcacgcctgtaatcacagcactttaggaggctgaggtgggtggatcacctgaggtcaggagtaccagaccagcctggccaacgtggtgagtggtgaaaactcatctctactaaaaatataaaaattagctgggcatggtgccacgcacctgtaatcccagcggcaggggaggctgaggcaggagaattgtttgaacctaggaggcggaggttgcagtgagctgagattacgctactgcactctagcctgggtgacagagcaagactctgtctcaaaaaaaataaactctattacctattacctaaaacatgagaactatgtacattctaaatcaaaaatttagaaattatagtgccagcagttaaatgtgaatcatactcaagaatttctatattggtagttttcttttttttaaatgaaatttcattttattctgataaagactaatgtatgcctaatcacctagtgataatccataagtttggtaattcacaacatttttagaaagcacataatattaacattcaaataaagcattatagaaagttttataaagaatgaagtgctagttgggcagggatgggtgggacaaaaagaaaagaatgaagtgtttactataattctttttttttttttttttatgagacggagtctcgctctgtcacctaggctggagtgcagtggtgcgatctcagctcactgtaagctctgcctccctggttcacgccattctcctgcctcagcctcccgagtagctgggactacaggtgcccaccaccacgcttggctaatgttttgtatttttagtagaggctgggtttcactgtgtcagccaggatggtctcgatctcctgacctcatgatctgcccacctcggcctcccaaagtgctgggattacaggcgtgagccaccaggcccggcctgctataattctttttaaaaaccttggttcatcttgaaagatcgatggatttttaaaatatcagaagaaaaggaaaataaattcccccccgccaaaaatacataagaaccacttactggcacttgtattttaagtacctgggaaaaaacaggacagatttttaaaggcaattaataacagctgttacaagggcttgtttcatttgatttagcaccaagtaaaataagagtaaatatgccacggaagacatagtcgggtttttcctccacttctcatattgccccacttctcctactagaccacacagtacatcagcaaccatccttgttgccccactaaggaatcactttagattccaatttttaaatggctggtcagatgacaccagtagagttctttccccttaagataaggtggcagtgaatgctaacaggtatcaatttatttgatcagaaacaaacaactccttcaggaaattaacttactttcctgatccttgttaacttatcatgtaaattctttttattggcacacctgtttactaattatgattgattgctatttttggcaaaggaacattccccaggcatgcctgagctatttactaatgacaaagtgtgcttactttacatagtgccatgggttttctctttttctcttatttttgggagggttgtacaataccttgttatttatcagggcagatctcatacattggatcaaaaagagaaactggtaagtagatcgtaaaacacatttcttaacctgagtaacatctgtaaacacagactttaactacattttgttgaaaaattcattcaactttggtgcttatccaagaacttataatgtccatttctgacataaataataaccctcagtacatatgtattttcaaaagaaaacaagtgatcttaaagtaatatttttatctatgctaattgttacatttttatagcaaattggaaattctgagtaaactgaaagtgtgtttaacaccaaaataaatttcgctctaacaaatgttttaaaagtttagacatctctgatgtttttgaagataactggataaaacacactaggtgatttcaaaagatgaatcttagtatctatctcatttgacacttcctttgtattcagaataaaattagtagaaataaaagtagtatacttttcaaagaattcatatatactggaagtcttaggaaaagcagcttctaaatggaaggcctaggaggtttgctcatcttactcgttacatgtatttctcctcrtggagtaactgaagagctttctggcttgtttgtggaattttagttggtaggaaagcatatacacagggccaaatcctcttggtttctgttctggagaatgtttccattacccctttttttttggtaatattctaagactggctttgtttcagttcacaagcctttagtctcttgatatccatctctggtttatcatcctcttgctgaatgagaggctccccagtcagatcatcaatgccaacagttttgggagggttgaattcaatgttgtagacttggccactggtgggatgaattgtactggtagttttgattaaactctctactccgatataactgttcttttttttttttttttttttttgagacggagtctcgctgtgtcacccaggctggggtgcagtggtgcgatctcagctcacctccacctcccaggttcaagcgattcttctgcctcagcctccctagtagctgggactacaggtgtgtgccaccacacatggctaatttttgtatttttagtagggacagggtttcaccatgttggccaggatggtctcgatcttttttttttttttgagttggagtctcactctgttacctagcaggctggagtgcagtggcatgatattggctcaccgcaacctccgcctcctgggttcaagcaattctcctgcctcagcctcccgagcagctgggattacaggcacccgccaccacacctggctaattgttgtatatttagtagagtagagacggggtttcaccattttggccaggctggtcttgaactcctgacctcgtgatccacccgcctcggcctcccaaaatgctgggattacaggcatgagccaccgcgcctggcctgtggtctcgatctcttgaccttatgatccacatgccttggcctcctcaagtgctgggattacaggtgtgaaccactatgcctggccaactgttctctctttatatattatttttatatatattatctttacatttgtaaggttacctttccgtgtgtggatcagtagatgagtactgaggcttgaatgcaaactgaattctttgccacatttattacatttataacgtttgtgacctatgtgagtcttccaatgttgtgttagctatgaagtacgactgaagactttgccacatttttgcatctgtaaggtgtgcagtgaattctcttcagtatgaatcttccaatgtcatgcaaggtgtaaattttgattcaccttgccacatgaattacacttgtaaggtctctctccagtatgaattatctgatggttgattaggtataacttgtgtccgaagaccttgccgcattcactatatttgtaaagtttctctccagtatggattagaagatgggccataagtcctgaatgcttgctaaatgctttcaacgtttgttacatttgtaaggcttctctgtactatgaattatttgatgccgtgcaattgaccaaagaccttgccacattcattacgtgtgtaaggtttttctgcagtatgacttctctgttgagtgagggaaaatttgtgcctgaagttcttgtacactcattacatttgtaaggtttttctccagaatggattacaagatgggcrctaagtcctgaacactctttaaatgctttaccacattcgttacatttgcgaggcctctctccaggatgaattctttgatgttgtgcaaggtttgaattgctgttaaacaccttgtgacagtcactacgtttgtaaggcttctgtccagtatgaattctccagtgatctgcaaggtgtggattgcaactaaagaccttgccacattactgcatttgtaaagtttatctgcagtatggattacttgatgattagtaagacttgcagacactctaaaaactttgccatcttaactacgtccataagatttttcctctaatgtgtgctttgtcgtcttgtgggagtgatgggaaatcaatgaaatcatttctgtatttatttaacactagaagaatttttttgaagtggtggaactgaggaactatggtttgtaracttttcaatttgattacttccataaattttccttccagcttaaaatagctgcaattcaggcagatgtgactgaaggttaatccaagttgatttttaataggctcattttctgtattacttcccaatgtacagcttctccctgtgttcacacctttgatgcattccctgccatctggattgtttgctatcttcaccctgcagagtccagagctctcgctttgtctccaacatggagataatgctcaggtcaggaagacagattcccagaaakaccaggttcctgtagttctcctacatnacttccctgtataaagccctctgtgcagggtccagttatttccactcctcctgagagaattctgtagccacatccatgaatgtcaagtgaygctgagtaagagtctttcctgattccttttctttccgcttctttctcttctgggcttcttcatcacacagcctgactcataagaaatcaatctgtggccgggtgtggtggctcacgcctgtaatcccaacaccttgggaggccgagatgggcggatcatgaggtcaggagattgagaccatcctgacttaacacggtgaaaccccgtctctactaaaaatacaaaaaaattagccgggcgcagtggcgggcatctgtagtcccaactacttgggaggctgaggcaggagaatggcatgaacccaggaggcggagcttgcagtgagccaagatcgcgccactgcactcagcctgggcaactgagagagactgtgtctcaaaaagaaaaaaaaagaaatcaatctgtgaggctgggcgctgggtggctcatgcctgtaatcccagcatgtgttagtctgttctcacactgctaataaagacatacytgagattgggtagtttataaagaaaagaggattaattgactcatggttccatatggctggggaggccttaacaatcatagcagatggtgaaggggaagcaagacacgtcttacgtggcagcaggcaagagagtgtgtgcagggggactgcccttcataaaaccgtcagatctcgtgagacttactcactatcatgagaaccgcatgggaaaacccrtccccatgattcacttacctcccrccgggtccctcccacgacacgtggggattatgggagatacaattcaagatgagatttgggtggagacacagctaaaccatactttcggaggacgaggtgggcagattgcctgaactcagaagtttgagacgggcctgggcaacatggcaagactcctgtgtgtgctgcggcatgaccttcactccacgtgatccacttccaggtctcattggacacattttgagttaattcttgcrtatggcatgatgaagtaaagctccaacttcattatgtatgtggctctcctgttgtcccgtcaccatgtgttgcaaagactattttctcaccttgttaaaaatcagttgactagagacacatgggcttatttctggactctcatttctattccgctgatctatatatctatccttatgccactaccacactttgcttactgttactttggagtaaggtttgaaatcaggaaggatgagtcctccactattattctttctcaagattgttttggttattctgggtcccttgcaattacatatgaattttagaatttgtttgtcaatttccacaaagaagccagctgtcttaaagaaattgagagaagaaagaaaagtatgtttgtaaattttgttgttgtaactctatcatttctggatctctttatttgttcctttggattcaactttccatgtggagtcatttccgtagcctaatacagctttgctcccacttacctcctttgttttgttattggcaaatatattacatttctatatgttataggctcaacaatatatacatttttttaaattgtaataaaatggagataaaatataccattttagccattttaaagcatacagttcagtggtattaagtacattcacattgttgtacaacattcaccaccatctatcatcagaacttttttcatgttgcaaaactgaaactctacacccatttaacaatagttccccatttcctgcccccaccagcccctggcaaccacccatctactttctgtctctctgagtttgactatcctaagcatttgcacaaagctgagacataaaatgttaaactggcccacaaagaaagctccatgctcagatgctttactggtgaattcttccaaccatctaagaaagaaagaacaccaatcctgcataaagtcttccagaatactttaagaggggatacttcccaccttatccacaaaaccagcacaactctgacatcaagactcaacaaggacactacrtgaaaaaatatcagatcaatatctctcatgaacagaggtgaaaaaatactttaatcatctggattttgttaaagattttcgaatgaatgttcataagggatattcatatgcatttctcttttcctgtagtgtccctgtctggccccagcaccagggcattgtcgtcagcctcataaaatgaaccaggaattaccccttcctcctcaactctctggaaaagtttgagaaggattggcatcatttcctctccaaagtgtggtagaatcaccagcaaagccatcaggtctaggaactttcctttttgggagtttgttgatgattgattcattctccttacactagttatgggtctattcagattttctatttctttgtgattcagtctcagtaggttttatgtttctaggaatgtgtccatttcatctaggtttatgcaacttgttggcatacaattgttcatagttctcttacaattcttttttattttatttatttatttttgagatagagtctcgctctgtcaccaagctagagtgccatggcgcaatttcagcttgctgcaatctctgcctcccggtttcaagggattctcctgcctcaggctcccgagtagctgggattacaggcacacgccaccacacccagctaatttttgcatttttagtagagrtggggtttcaccgtgttggccaggaggtcttgatctcctgacctcgtgatccacctacctcggcttcccaaagtgttgggattacaggcatgagccaccatgcccacccaattctttttatttctgtagagctggtagtaatgtatccattttaatttcttattttggtaatttgagtcttttttttttttttggctagtcaagtgaagcaatcttttttttttttttgagacacagagtcttgctcagccgcccaggctagagtgcagtggcatgatctcggctcactgcaaccaccgtctcccgggttcaagcgattctcccatctcagcctcccaagtagctgggattacaggcaactgccatcatgcctggctaatttttgtattttagtagagatggggtttcaccatgttggccagtctggtcttgaactcctgacctcaggtgatccacccaccttggccttccaaagtgctaggattacaggtgtgagccacygtgcccgccctttttttttaatttaaaatatttgaaacaggctttcgctccatcccccaggctggagtgcagtattgggggaacccacccccaatatttcaacgtaggttctttctattttccataaatgtcggccagctgagaaataaagagaaagagtacaaagagaggaatttttgtactgggcctctgggggtgacatcacatatcagtaggaccgtgatgcccacctgagccttaaaaccagcaagtttttattaaggatttcaaaaggggagggggtgtacaarcagggagtaggtcacaaagatcacatgcttcaaagggcaaaaggcagaacaaatatcacatgcttctgaggaaacaggacaaaggcaaaatcagaactactgataagggtctatgttcagctgtgcacatattgtcttgataaacatcttaaacaacagaaawcacagttygagagcagagaaccggtctgaccacaaatttaccagggtggagttttttccccaccctaacaagcctgagggtactgcaggagaccagggcatatttcagtccttatctcaaccacataagacagacactcccagagcagccgtttatagacctccccccagggatgcattccttccccagggtattaattattaatattccttgctaggaaaagaatttagtgatatcttccctacttgcatgtctgtttataggctctctgcaagaagaaaaatatggctctattttgcccracccctcaggcagtcagaccttatggttgtcttcccttgttccctgaaaatcgctgttattctgttctttttcaaggtgcactgacttcatattgttcaaacacacatgttttacaatcaatttgtacagttaacacaattatcatggtagtcctgaggtgacgtacatcctcatcttatgaagataacaggattaagagattaaagtaaaacaggggtaagaaattataaaagtattatttgggaactgataaatgtccatgaaatcttcacaatttatgttcctctgccatggctccagtcagtccctctgttcagagtccctgacttcctgcaacagtgcagtggcgcagttttggctctctgtaacctctacctctaaggctcaagtgatcctcccacctcagcctctagaatagctgggactacaggtgtggggcaccacgtgcagctaattatttttgtactttttgtagagatgggctttcactgtgttccctaggctggtcttgaacccttgggctcaagtgatccgcctgtgtaagcctcctaaagtactggggttacaggtgtgagctaccatgcctggcaccttaattttttaaattttttgtagaaacaaggtctgtctatattgcccaggctggtctggaactcctgacctcatgcaatcctctcatctatgtctcccaaagtgctgagattacagtcattggccattgtgcccagcccaagatctttcttttttaatgtaagtgtttacagctataaattccccccttagcactgcttttgctgaattccaaaagtttcagtatattgttttttattttcatttgtctctaagtattttctaattttccttttgatttcttctttgatccattggtgatttaagagtgtgttatttagactgggcacagtggcttatgcctgtaatcccagcacttcgggaggccgaagtgggtggatcacttgaggtcaggagttcacaccagcccgtccaacctgtgaaaccctgtctctactaaaaatacaaaaattagccagttgtggtgttgggcacctgtgatcccagctactcaagaggctgaggcggaattgcttgaacctgggaggtggaggtcggagtgagccgaggtcacactaccacactccagcctgggtgactccatctcaaaaacaaaaagtgttatttggttcccacaaatttgggaattttagttttccttgttactgatttctaacttcatcccactgtggttggagaagatattctgtgtgctatcttttctttaaaatctattgagacaatttgtggtctatagtatggtctgtcctggagaatgacccatgtgcacttgagaagaatgcatattctgttgttaggtaaagaattttagatgtaggtcaggcgcagtggctcacgcctgtaatcccagcattttgggaggctgaggctggtggatcacccaaggtcaggagttcgagaccagcctgaccaacatggtgaaactctgtctctactaaaaatacaaaattagctgggcatggtggtacacatctgtaatctcagctaccagagaggctgaggcaggagaatcgcttgaacccgggaggcagaggttgtggtgagctaagattgagccattgcattctagcctgggcaacaagagtgaaactctgtctcaggaaaaaaaaaaaaaaaaaaaaagttttagatgcctgttagatctagttggtttactgcattgttcaagtcctcttatttatttatttgagacggagtctcgctctgtcacccaggctggagtgcaatggcgccatctcagctcactgcaacctccgcctcccaggtacaagcagttctctgcctcagccttcgagtagctgggactacaggcacctgccaccacgcccagataatttttgtatttttagtagagacggggtttcaccatcttggccaggcaggtcttgaactcctgaccttgtgatccacccgcctcagcctcccaaagttctgggattacaggtgtgagccactgtgcccagccaagtcctgaatttttttttttttttttgagacggagtcttgctctgttgcccaggctggagtgcagtggtgtgatctcagctcactgcaagctctgcctcccggattcacagcattctcctgcctcagcctcccgagtagctgggactacaggtgcccgccaccatgcccagctaatttttttgtatttttagaagagacagggtttcaccgtgttagccaggatggtgtcaatctcctgagctcgtgattcacctgcctcagcctcctaaagtgctgggattataggcgtgagccactgcgcccagccccaagtcctctattttcttaattatcttctgccaggttgttctatccattattgagagtggggtattgaagtctgcaactattagtcatggtttgttttttacacctaaaaacaaaccatcaatatcctcatttgtacatttaggtgcataaatgttaataattgttctaatcttcttgctgtatatgtctccttttttgtctcttgtaacctttttttaatttaaagacattttgtctgatatttgtaaggccatccctaatctcctttggttacaatttatgtggaatatttttttcaaaatttttaattgcaatttttttgtgtctttagatatagagtctcttatagatagcatataggtggattctgggtttttttaaatccattctgccaatttctatctttggagagtttaatccatttacatttaaagtaattattgataaggagggacttatgttattttactaatttatgttctgtatgcattatagttttttaattgcttatttcctgcattactgtcttcttttgtgtttagttgattttttttgtagtgaaaaattttaacataatatgtaacatgtcctgtaactgttttctctgtggttaccatggagattatatttaatgtcctaaaattataatactctagtttgaatttatgccagcttaacttcaataacatacaaaaactctacccttttaacagctctgccccaaatccttctagttattgatgtcacaaaagtatatctttgtacattatatgttttttttttgttttgttttgttttttgagacagagtcttgctctgttgcccaggctggagtgcagtggcacagtctcagctcactgcaagctccgcctcccgggttcactccattctcctgcctcagcctcccgagtagctgggactacaggtgcccgccaccatgccyggctaattttttttttgtatttttagtagagacggggtttcaccgtgttagccaggatggtctcgatctcctgacctcgtgatccacccgcctcagcctcccaaagtgctgggattacaggcgtgagccgcagygcccsgcctgtacattatatgtttaaaaacaggatctaaaaattggtttttaaaatgcattagtctcttaaattatatggaaaasaaaacgtgaaattgcaaaccaaagttacagtaatattagcttttagtctaattgttttgtaatgtattagcctcttaaatcttgtagaaaacaaaaaaaagaaattacaaataattgttacaataatactagcttttatagttgcccatctgtttatctttaccaaaggtatttcttttacaaatatattttttattgttaatcaacaaatcataattgtacatatktatagagtacaatgtgatgttctgatatatgtatacaatgtgttttgattaaatcaagctaatcaacatatctgtcacctcaagtatttatcattttcttgtgatgaggacatttgaaattctcttagcaattttgaaatatgtaatacattattattaaatgtagtcaccatgttgtgcaatgtatctcaaaatacttaactcctgctgtataactgaaccttgtaccctttgaccaacacctgcccattctccccacccttcgcctctggtaaacaccattctcctgtctgttcctattaatttgattaatctgactgtttttagagatttttctttcttcataaagcttcaagttatttattgtcatmmtttcaacccacagaattcccttgaatatttctgatagggaagatctagtgttaatcagatttatctggaaatgtcttgatttctccctcacttttgaagggcatttttgccagatacagtattcttggtattttttcttttagcattttgaatatattagcccactgctttctggcctccacagttcctgatgaaaaaacccgttggtaatcttatcctttgtatgtgataagttgcttctctcatgctgttttcaggattctctctttgtctttgtcttttgacagttttgtgtgtgtgtgtgtgtgtgtgtgtgtgtgtgtgtgtgtgttttaagacaaagtctcactgtccccagggtggagtgcggtggcgccatcttggctcactgcaacctctgtctcccgggttcaagcaatttttgtgactcagcctcctgtgtagctgggatcacaggcatgtggcatcacatggggctaattttagtatttttagtagagacagggtttcaccatgtcatccaggttggtcttgaactcctgacctcaagtgatccacccgccgtggcctcccaaaatgctaggatagcaggtgtgagccactaagcctggctgtgtctttttacagtttgattataatgtatttcagtgtagactcttgagttcatcctacttggagtttgttgagcctcttggatgtttatatttattttgtcttttaaatatttgtctttcatcaaacttgtgaatttttcagctattatttcttcagatcatttatctgatcccctctctctcctctttctctgggactcccacattgcttacgttgggctgcttgatggtgttctataggtcctttaagctctgttcactttctgtagtcttttttcttcctgttcttcagacttgatacttttaattatcctatcttcaagttcactatttctttcttgtccttgctcagatctgctttttcattgcagttattgtacttttcatcttcagaatttctttttttcagaccgggcatggtggctcatgcctgtaatcccagcactttgggaggctgagccaggcagatgacttaaggtcaggagttcgaccagcctgaccaacatggtaaaaccccgtctacactaaaagtacaacaattaggcacggtggcatgcacctgtaattccagctactcaggaggctgagacacgagaatcgcttgaacccgggagatggaggtcacaggttctactgcccttcagcctgggtgatggagcaagactccatctcaaaaaaaaaattctttttttctttttatgtctttctctttactgatatttgttttatttatacatcattttattttattttgagacagggtctcattctatctggagtgcagtggtgcagtgatagctccctgcagcctcaaactcctgggcacaagtgatcctcccgccttagcttctcaagtggctggaactacaggcacatgccaccatacttagctaattttaaaatttttttgtagagacagggtctcattatgttgcccaggctggtctcaaacacctggtctcaactaatcctcctgccttgacttcccaaagtacttagattyyaggtgtgagccaccatgcctggccacataattacataactttctttttctgagacagagtctcgctctgtcgctcaggctagagggcaatggaatagtcatggctcactgcagcctgggctcaggtcatcctcccacctcagcctcccaggttgccaggactgtaggagcatgccaccacacccagctattttttttgtacattttgtagagacggggtttcgccatgttacccaggccactctcaaactcctggcctcaagcaatctgcctgcctcagcctcccagagtcctgtaattacaggcgtgagtcaccgtgcccggccacatcattttctaataagtctgccatctgatcttagggacaatttctattgatttcttttgtttttttcctttgaatggtccatacttattttttatgtcttgtggttttttgtttttgttttcaaactggacatttgagtttttatcatgtgataatttaggggtcctccatgccagtgatgtaggatttacttctcagtcactttgcaagccagggacctctggctggccatgccccacccaggcctcgctcagccatgctggtgtgccccagctcacttgtgttatagcttgtacccacgttcagcagtttctgagctctcggaccttgcccaagaagaataaggatacgctggatgttgaagggtgaggagggtggagaagaattttattgagtgatgaaacagctatcagcagagaggggatgcgagggtggtccccctaccttaaggtggggaagtccccctaatatggctgagtccagggctttttatgggctcagaataagggaggggtaggctgtaggtagtattagaaaaggcaacattcgattggttaaaaggcattattcagaaagtatcaattgggaaagggcgagcaaagaggaacagaagttcccactctggatcacaggtttcatccaggaccagcagtctggtctttcagccttcggactgatttggcttgaaggtggggtttcactgggaacctgccccatctgcctaggtatttggccacctcctgtcactatcaccagggattagtcacaggtataaacttaaggtccttctcatgtctgaatctgtgttttcccctgggcatgtacatgcatggtaactttccaaattcccctgtaaatgtggttactttttttttttttttttgagacagggtcttgctctgtcacccaggctggagtacaatggtgtaatcacagctcactgcagcctttgcgtcctggacttaagcaattctcctgtcccagcctccttagtagcttggacaataggcgtgccccaccacacttagctaattaaaaaaaawttttttttttggtagagacagagtctccctatgttgcccaggcgggtcttgaactcctgggctcaagcaattctcctgccttggcctcccaaagttctgggattctaggcataagccaccgtgcccagtggctttggaacatcctgctccttcaatgtatggcccccaaaagggggaaaagaaaaaaaataaagtggggagaaataaaggcaccagccttttaaatccccaggaagtcacttcagctagagggagggaggtttgcaacagtgtcagtgatggttgcaacattggtttcctgcttctatatctgtacttcagtgatcagaagcagcaatcagctatcagtacagagatccctgatacttggaggactggtttcttattgcctaccctggttcttgcaagcagcatgcaagctgcttcaggaacagcatgactgtctccactgggtgcagagtgcttggggctgaagtgaaccacaatttagcttctaagacttccgccagatgtttccagccttcaagagaatccagagtttttaaatagttacgtaaaagagattctgtcagtacaatttctggttgagtgaagagatacaatttttgcttgagtgaggagatgaattcctgatgcttcttactctgccatcttctatagtattgtttcatacagtagcttttcagattagttaaggagaggcaaaatgtgtttgtattgtgttttataattacctttaccagcactcttgtgttttcacattgctttgagttattgtgtagggtctcatccttttagcttgatgaacttcacttcgttttcctgtaatgtgggtctgctagccacacattctctgcttttgtttatctgggaatttccttatttcacttttatttttgaatgatagatttgctagatatggaattcttgtttgacagttttttggagcacttcaaatgttatccttctgccttctagcctccattgtttatgaggagatgttagctgtgaatgttattggtgttgccttctgatgagttattttcatcttgctgctttcaaggttttctctgtttttgactttcagcactttaaccttaatgtgtctgtctgtggatctctttgagtttatcctacttggaagttcatttagcttcttggacatgtagatcaatgtttttcaataaatttgtaaagtattcaggcattatttcttaaaattttttttttctgcttctttcttttttttgagacagagtcttgctctgtcacccaggctggagtgcagtggtgcgatctcagctyactacarcctccmtctccygggttcttggcatggtggtgtgtgtctgtagtcctagctgtctgtagtcctagctactcatctgcttcagcctcccaagtacccagaactacaggcatatgccaccacgcccagctaatttttgtatttttagtagagacgggggttcaccatgttggccaagcaggtcttttacttctgacctcaagtgattcgcccacctcggcctcccaaagtgctgggattacaggtgtgagccaccaagcctggacttttttctgctcctgtctctcctcttctggtgttttctttatacatatttggtgcagttaatggtgcccttcatttctctgagtctctgttcatttttcattttagctttttctccattatttggattgcataatttctgttggtctgtccccaagcttgctaattgttctgccagtgtaagtatgctgttgagcccctctagtgaatttttcttttcagttattgtactttttagctctagaatttccatttgggtctttaaattaataatttttttctgtttcttaatattctctatttgatatgacactgtcattatacctttctttactttttaaattatggtttcctttttgttctttgaacatatttataatggctactttgaaatctttttttttttttttctttttttttgagacagagtctcactctgtcacccaggctggagtgcagtggcgtgatcttcgctcactacaacctmcgcctcccaggttcaagcgattctcctgcctcagccttccgagtaactgggactacaggtgcgtgtcaccatacctggctaattttgtatttttagtagagacggggtttcaccatattggtcaggctggtcttgtactccaatgtcagtatctgagatttttttctgaccccaagaggcctcctcccagctttgtaatcgtctctgcaaactagcccaccctatagtttagtttacatctccaatgaattggcttatctcctcccagttgcctttctactgctgtatctaaaacacaggttcagttgcttgctgcttgcagagtccaattaacaagagcaaggtctggtataaagtgactttttattccaaagcttagcttagtggaagtagaggctttctgcctttaagagtactcctcctttggagcagaaagcaagcacttttaaagggggtgtaggccaggcgcgatggctcatccctgtatgcccagcactttgggaagccaaggcgggcagatcacctgaggttgggagttcgagaccagcttgaccaacatggagaaaccctgtstctactaaaaatacaaaattagccaggcgtggtggggcatgcctattatcccagctacttgggaggctgaggcaggagaatcacttgagcccaggaggcggaagtcacggtcggtgagccgagattgtgccattgcactccagcctgggcaacgagagcggaactccgtctcaaaaaaaagggcctaacatgaatgggacatggcgggttgcggggaagcgagcagttgtaggggtctgcgtgctagcttggtggcttatctaccaggtgatcaaggtggtgactgctggtttctttgtgggcaggcattgggttgtgaatctactgttatctctcgagacaacctcctagtgggtaagagttctgctctggagcttctaagcacgtagttgaactatccctgtagggattgtctgatgaagagaaggtaaaaggctataattgtatttctttttttttttttttttttgagacggagtcttactctgtcgcccaggctggagtgcagtggcatgatctcggctcactgcaacctccacctcccgggttcaagcgattctcctgcctcatcctaccgagtagctgggattactggcgtctgccaccatgcccggctaatttttgtatttttaatagagacagtgtttcaccatgttggccaggctggtctcaaactcctgaccttaggtgatcaacctgcctcggcctcccagagagtgctgggattacaggcatgagccaccatgcccagcctataattgtatttctaaagagctaagtaggaagtgggaaaaaggaggaaaagaagagagagaaaacaaagaatttaaaaataattaaataattgaggccaggtgcagtagctcacgcctgtgatcccagmaccttgggagactgaggtgggcagatcacttgaggtcaagagtttgagaccagcctggccaacatgatgaaaccccgtctctactaaaaatacaaaaattagcctggtgtggtggcatacgcctgtaatcccagctactcgggaggctgaggcatgagaattgcttgaacccagggagggggcagaggttgcagtgagctgagattgtgccactgcactccagcctggatgacagagagagactctgtctcaaagaataataataataataataatttaattaaagtggaggtactcagttacacttccactctttttgaaagcactctgaggctttaactccatattctgttgcaaatgaagtcagttcatttaggaagagatttggtgctctgttttatggcctgtttctattcccaagcaaagtttgtgagcatggctatggagctgtgggtggagacaatggcactcttccgagtgatacccccactttagaaacttagcacccggttttggagggagatggggcagtagcctctcrtcttcttggcatacttggcatacttcttggcatttcactaacatggaatcttcactttatggtctggggaagaggtgatttggggccccataattttttttttttttttttgagatggagtcttgctttgtcacccaggctgtagtgcagaggtgcgatctcagctcactgcaacctctgcctgctggattcaagtgattctcctacctcagcctcccaagtagctgggattataggcactcaccaccacacccagccaattttgtatttttagtagagatgcggtttcaccatgttggccaggctgggtctcaaactcctgacctcaagtgatccacccacctcggtctcccaaagtactgggattacaggtgtgagccaacacacctggcctgggccccataatttttagcagtcctgtacccaaagtagaacctacatcctagtaccctgggctaggtggaagaagggagctcccacttcttgcctgcaccctcctgaaatatagcctcaacaacaggcagcaggatgagatctgccaatggcctgccctcccaagaagataaccgttgaactggaagttgcagggaaacaaaggcctgtgttcttgccttcactggcctggagtagaatttttgtctcacttaggcgggatggagaaaggtggcagttggtcatgattcgcataccactgactcttaccattcttaccaaagtctagattttctcaaataaatgtttcttctgtcaaaagacaaaattataacacattttgtttaaagatctcaattgggtttattgtgattctagcattgggcaacacttccttctataaaatagaataagtgttctaatgagtgaagcagaggagattggctttatagacagaaaaggggttggataaagaagaaaaaaagaacaaaaagtggattggtctcagttaatagggttgctccagaaaaaaagtggattggtcattttagggtggggacagggagatagaataatggaaaaataagctgattggttaacatcaggttacttcagatgaaagattaaaacagagagagcttcatacgacgtcagttgaaactggcctctttgggaaattcattctctcgatttcttgacagctcaatttcggtttggtgagcatgagtgactcctttataatttttagtctggacagttgggcctggtgttatgagatctttggggtgtcacttttccagccagaaacgtctgtggctgatggcgcctttgcctgagttttacttgggcccactgggcttgttctgtccatggcctggcattgcactatattaccaacctgtatcccatgcctgccaagggagagtcaggcatggagcggcgaggggtgtgggagtgagcatggggtccagccactgtgcagtcagacacgctagttgctgcagcggggcgggcagctccaggtgccggcatgggtactggtcctctgcgaagctatggccagaccaggtgcacctcaagcagcttccactgctggcaccaggggacactggggaagcttggagatgccaggaaccacagtgccccaaagaggaagtcacagccctggcttggggagctcccaggtctgggctccttgaagggccacagctcttctctcctcttcacatgcaacgtggtgagaaaggggcatgtttcagctcctaacatgtttgtttacagttcttttagcctcaccattcatgggtctcgaattcttgtcctgtgaccaggaaggggtatgtggacaaatacagggtaagcaagaggaagaggagtttctttgagagaacagctcaggctggacgtggtagctcacgcctgtaatcccagcactttgggaggccgaggtgggtggatcatgaggtcaggagttcaagaccagcctggccaacatggtgaaaccctgtctctactaaaaataccaaaaaaaattagctgggcctgatggcatgtgcctgtaatcccagctactgggcaggctgaggcaagagaatcgcttgaacccaggaggcagaggttgcagtgagccatgatcgtgccactgcactccagcctgggtgacagagcaaggctccgtctcagaaaaagagagagaacagctcagaggagatccgcagggggcacctcctttccatagacagggtgtctcgtggagtatttagccccrctcatcttgatgagtattgagctctcagcagagggtagctcctctctgcagctggccgtcccattgtctgttctgctctggctgagcccagggcttttaggggacttaaacggcaggaagtacctgctgatttgtccatgggtaggcccagaaaaggcaccacaagttcccactctggtctatgggactagcagcctggtacccggcctttgctccctccctggccggaaggtggggcctcaccggggacccgcccccttctgcccagtagcctgtctgcctcctgcccggggcccaggctgttcatgccacggtacacgtgcaggccagtgccaagctgccctccactccccctcagcttactttccccatcctgcgcttgttagagcccaaagtccggagggggacaaagtggcagggggctggtgtgtcattgctgccccaaacatgcgcacacctggccaggctttgaccgcgcctgggcttaccccgctctgagattggagctgggggtgggggtaatagggagaggccaggcagtgggaacagacacccccgagcctgcgggggcagttggggccgctcgggcctggctctgccttggggcacctctctgcctgcccctttgcgcccgaccacgctgctcccccagcggcaggtgacagcctggccccatcctagcaacctccagggcagtgggctctgggcggggctcccaggggcgggctctggggactgtctgcttcctccccttgccctccccacagctgaagcaggtgtccggagtggtggagggtccgggcctgggggcgggtcccgaccatgcgaaggtgggcgtggcctggtcagctgcttcaggggcgcggggcacaggttccagtggtgccactgctcttctgcagctgctcctgccatcaccgctcacacctcccttctgctgccagcgcgatggtagcggctgctccggatggcccgtgactgccatcagtagtgcaggagtttagtccaaaacaatggcctcctataatttttatttaaaaattcgaatgtcattttctcttascaccgtttccagagactttgtttttttgagttgctctgtagcccgggctggagtgcagtggcatgatcacggctcactgcagtctctgcctcaccagctcaagtcattctcccacctcagcctcccaagtacctaggactacaggtgcacaccaccacacctggctaattttttgtagtctttgtagagacaaagtttcaccatgttgcctargctggtcttgaactcctgagctcaagggatcagcccgctttggccttgcaaagtgctggaattacagatgtgagccatggtacctggccactgagggtggtgggaggtttacagagctccttatggtgtcatgctggatgtggaaccaaacaggattacattttatatttaattatgtctttttaaatttgaaacatttcctcactttgtttttcctgactttgactttttttttttttttttttttgagagggagttttgctcttgttgcccaggctagagtgcaatggtgcaatcttggctcaccgcaacctccgcctcgcgggttcaagcgattcttccgcctcagcctcctgagtagctgggattacaggcatgcgccacyatgcccggctaattttgtatttttagtagagacrgggtttcwccatgttggtcaggctggtctcgaactcccgacctcaggtgatccgcctgcctcggcctcccaaagtgctgggattacaggcgtgagctactatgcctggctgactttgacatttttgaggaataggggccatatgtttattttattttttgcagcatagaataatttattgcaaaagaaaaataatgttttgaaagttagtgcagaataggcagtacaccctgagagagagaggattcagggcaggctgctcataaggatgagacagcctaggctgtgtgttttattaaatgtcccttggtttggatttttccagtgttttctcatgaatagatttaggttatacatttttggcaggaataccacagaagtgatatgccctcagtgcattgtatcaggaggttcacagtatctgtttaacatactaggtgttattttaattttgaacagttctttccacaagcatacattgaatgtcacatagtactttttttattactggtcaggttgaattttatgtatgctaatgatatggaagggggacagggaagtactgggtaagggagggcgtggcctctggctagggctccaccctcagatctgtgcccatggacctaggcgagaacaggcactgctggttcgtgcccaaatgttgcatttcccaagaccaccctggcctgccactcccccatcctgtgcctataaaaacccyggagaccctcgcaggaacacagataagaggttggatgttgagaggaacacattagcagaagaagacacaagcagctggacattgagaggacatcgaggggagcatgccagcggaaaagcacactgacagatgccagcatgccagcaggccatcgaccagcagaacgaggtggagtttggccagggtagctgggggagaacccggtccaccgagcagccagactccaggggaaaaccatcttccttctggttcccgcatctgctgagagctactttcactcaataaaaccttgcattcattctccaagcccacgtgtgatctgattcttccggtacaccaaggcaagaaccctgggatacaaaagccctctgtccttgmgatagggcaagggtctaattgagctaacacaagctgcctacagatggctaaactaaaagagcaccctgtaacacacacccactggggcttcagctgtaaacattcaccactagacactaccatggggtcagagccccacagcctgcctgtctgtatggtcccctagaggtttgagcagtggggcactgaagaagcgagccacacccccattgcacgccctgcgagggggacaagggaacttttcccatttcactaaatggttatttatatgattattttgtaaatatatgggatttacatttacatacatatataaatgaatttgctgaattatctatgaaattgattttgttttacctattctaatattgttgggttttattgattcaaagaactctttatatacgaatgctattaatcctttggcatgaatgttgcaaatgttttccctagtttattgtttgtttgctctttaatttcttacgacttttcgaaacatcttgaagtttaaaagttttatgtaaactgaactattagtattttcctgtatggtttccaccttggataccatgcttagaaaagcccttcctctaagattacagaaatattttttcctactacatactgattgattttctttttgtttctcaaataggtacgtttgcgggagcacatgggtgaaaagtatacaacttacagtgtgaaagctcgccagttgaaattttttgaagaaaacatgaatttttgagcatttgtcctaatctgctgccagaattaaagacctatttttagaggattttggcttaaaaagcaagggcaaacagtcatttggaagccactcaccactgttttatatctcttttttatatctctttggcgtttccctacagaaaagaaattggacagaacagaataatatgaagcaggatcacaaaagaaaaaaaactttggctttcatattctctttgtgaggacaaatctgttgtttgtttgattactgtttactgagccttaatccaccaagtttatatttagaattttatttttttaaggtactaattaacttaaacacagagctataaaatgctggattgaaaattttatattgtaatgtagagataaaagcagtaggagaaacaaatgacataatatgtcgtcataattcctgctattgttaataaccttaaggagtagttgataaattataaaattttaaaaagtcaattcagttctagaaatagatttaaagaatatgaagttctatctagtacttgagcagctgtatttcttttctacacattgatggacttttaatattttattctcatttaatataaacctcatctagggtatatacaaattaaaactgagacacattggctttgtaaatcagtatgtttttacataatggttttgttagatttatttttccatcagtgaaaacatttcttaarcacaaatttcatttccatttaagcaatttgtaagcaaagtccaggtccatttagtttttggatatatttaatgtttgtctcctgaagtttgtcttcatgtactgtaagatattagttgtctttccatgttttaaatgtatgattatatagcacatattttattagttgtttaataagaggtaatacccatctaggaaagaaattttatgaagttaaatacaagtcttgaatagtacattttcacttctgtattcgagggactctaaaaataaatattgctccagaaatgttttcaggtgttttttttttgagacagagtttcactctgtcagtcaggctggagtgcagtggcatgatctcaactcactgcaacctccacttctggggctcaagtggtattcctgcctgagcctccctagtagctgagaccacaggcgtgtgccaccacacctggctagtttttgtattttttgtagagacagggttacaccacattgcccaggctgatctcagaactcctgggctcaagcaatccactcacctcagcctcccaaagtgccaggattacaggaatgagccactgtgcccagccctgttttcagtttctataactaaaaatatatctatctttgaaaattacacacacacacaaatactctaatgaaatgttccctttacagccacttaacaattttttttttttttaagacacagtcttgctctgtcacccaggctgaagtgcagtggcccaatctcagatcactgcaagctccgcctcccaggttcactccattctcctacctcatcctctcgagtagctgggactacagttgcccgccaccatgcccggctaatttttttgtatttttttagtagagacagggtttcaccgtgttagccaggatggtctcaatctcctgacctcgtgatctgcccgcctcggcctcccaaagtgctgggattacaggcgtgagccaccgcgcccggcacacttaacagatttttatttagagtttactgtgtgccaggttctctgccaggagctggggatatagtggtgaataaaacaatacttcctgcccttttacagtgctcacagcctggtttctgataactcttattttcactttgaagggtttgctagaactcaacttgcaaaaccatcaagtcccaatgcccagttgggaacaaatctttggcaaacttggtatccttgagctattcacctttccgtgcatgttttggaaatccacatcgttctggagagtcatcagttttacttaatttttctaatgtattggtataaagtaggtattttattagaattaaaggaatctcacccatatcttttttttttttttttttttttgagacagggtcttgctctgtcacccagcctggagtgcagtgaggtgatcatagctcactgcagccttgacctcctgggcttaagtgatcctcccacctcagcccctcaagtagctaggaccacaggcatgcaccaccacacctggctaatttttaaaattttttgtggagaggaagtctgtgttgcccaggctggtctcaaactgcattcaagcagtcctcctgcatcggcctctgaaagtgctgggattataggcatgaaccaccacacctgacttcccccatactttcttattaattaccatactgtatatttttattttgtttaaacatcttttcttcccacttttatcgtttttacttgagtgcttaattcatcttcctaaattaatttaaaaactcatctttaagactgtgaattttcttccgaatatacctttggccacagttcagagactttgatgtgttactcttttggcattggttctaaaatgtcaatcattcttttttttttttttttgagatggagtcttcttgttgcccaggctggagtacagtggtgcgatcttggctcactgcagcctacgcctcctgggttcaagttcccctccctcagcctcccgagtagctgggattacaggcacacaccaccatgcctggctgattttcgttatttttagtagagatggagtttcaccatgttggccaggctggtcttgaactcctgacctcaggtgatctgcctgccttggcctccctaaatgctgggattacaggcttgaggcaccatgcctggcctaaagtgtcagtaattctgatttcggttttctcttttagaagttttgatttccacagacttacaaagctaaggaagttttatgtccttgctctggctacactgcagtgttactgaatatcacctgcacaacctttactgcttgcagttttttttttcctgttgctttgtacatgatccgttattcaaatggccttataggcattcaataaaggtgaaatgttaaatacaaaatcacttgtctattaaattttattcaaggttctatataagatctgataaatggaactttgtgatggaaatgttttatatggtagccactagtcacatatagctattgaacctttgaatcatggctagttttagagttttatattttaattttaattaaatagacgtgtctagtggcaccatattgtacaatgcagttctcattcaataaatcttaagtacttaacaatgcatcgtgtactcttctatgtactgggtagacagcagtgagcaaaacaaagtccccgttctcatggaactaatgttctaatgacaactattaattacataccatgaaatgtctcaaactcctgggctcaagtcatcctcctgccttagcctcctcaagtgctgggattataggtgagagccactgcacctggccagaagcacgaacttctaacttaggcttttattaattatcttccttgcagaataatcaacagaagaccctttagacaaagaacttgcactatgaggtttaattggaaacattaaaatggttaactcataatgaattataaaactttgatagttacattgtactatcatttatgaggcatttatttttcattatttacacctgaaagaaacttcatacttgtgtgttctgttccccatctcagagcaagattatgaagagaaggtctaaactacttatataaatcaaaacccaactgggctagaaatgaagtataaagagaactaaatctatacacagctgtgccataagagcattaggtggttttagctcttatctggggtatgaaagcaatttagctcatctcacagaaacaaaagcaggtgctgaatcatgaaaacctcaattatttttagcatgcctcttaatttttctttcccctggtttcttgtcgtctgtgcttgattcttgaacaggtaaccacttgagaggatgccggcgatagatgggccatggaggaagtgtcagctgggccagaaaagaggaaatgcataaattatagctattaaaagtttaaaaaatcattacgtataatgccaggttcccaaatgactcctatgctgagggaacaaaaaaacaaaaaaaaaaatccatattcctataaaggctctgtgccaccatccatgcaaaatactgtatgatgatgggaacaggctcactgcctatacaaatggctttaagacctaaaagaaaggtgggggccaggcgtggtggctctcgcctgtaatccaagcactctgggaggccaaggtgggcggattgcttgagaccagcctggccaacacagtgaagccctgtctttactaaaaatacaaaaattagctgggtgtggtggtgggctcctgtagtcacagctactcgggaggctgaggcaggaaaatctattaaacccgggaggcagaaggtgcagtgagccgaaatcgccccagtgcactgcagcctgggcaacaagagtgaaactccgtctcaaaaaatttaaataaataaataaataaaaggtgaagggacaacgtgagcaccatgaaaactcctgctggctttgaccttaagattattagccagagtagccgccaaaggaaataagctgtgtccttttatatagttcgcaccatctgacactattttggcattctacttttccaatgatagcaaagggaaacgctgtttggaaggatgagggaaacgttggctttgggtctcactactgagtaggtctaaccaaaccaacccgactcacaaaacccaagctgccactaatacccacaaatttcttaccaaacatgaaaaagcaaatccggccataactatatagacagtccacccgaactgttcagccacgtacccgtagataaatccaactatctagagacaaatgaagtatattaaacacactcaaactgagggttgggagggaggcgggggcggagattaaatgtaaaaccaatacttactgcagaaaaaagaataattccctgaaacatctgttcagctagcttctggcccttgtaatcctggggtgaagcagaggaaaaaaagaattggttccaccgccgagaacatacaattcctgccctgacctcacaactctggcacagggtaaccccaacatcagggtctcccgctctcctaagggcctgggcaagatattaaattctgggcttcccgggaggaactgaaacaccctcacggagaatggacaggagattctcgcggagtagaagagaaggggacccaggaggcaattcgggaaagagggtggacggtaaccatccgggcccggaacagcgcagcaccgggtcggtgctccaacatgggcttcgaagctgccaggcacaagaacggcgtgcagaggtccccgggttgcgccctcaccatctgcgtgggcagcgagctcagatgctccagcatggctggctgaggaggcgggcagctgagcgcgggtggcaggctgcgaggcgagggcgaccgagacttaaggaccgtgaggggtaaggtctggcactgcgcgtcagtagccgggccttctaagcccgggagagcgatggcggcggccccggaagcggaagtctccgacgggccggtacagcccgtgtccccgccccgcgccatcgctaggcgacgtgcgcttttgccgcgccgtgctgcccgcgagggcagctgaggtggtggtggcggccgccttgtcgaggcatcgcgcgcccgtgaagtgttcgccgtcagtgctgttgggtgcctggagccgcgtcccccgtcccgaaaactgtccttgacagtacttgcgcggcccaacggccgccggcgcccccgcgtctccatggcgacggcctttttccctgcgaggaccccggcggcagggctgccccgcggcgcctgcttggcgcgacgctctagcggttaccgctgcgggctggctgggcgtagtggggctgcgcggctgccacggagctagagggcaagtgtgctcggcccagcgtgcagggaacgcgggcggccagacaacgggctgggctccggggcctgcggcgcgggcgctgagctggcagggcgggtcggggcgcgggctgcatccgcatctcctccatcgcctgcagtaagggcggccgcggcgagcctttgaggggaacgacttgtcggagccctaaccaggggtatctctgagcctggtgggatccccggagcgtcacatcactttccgatcacttcaaagtgtaaggggggccctactgacccttggaatttaggggggctaccctaggcggcatccacaacagagagaattcccttggagaggggaccctggtgctcggctgtccctctcatccgcgtagaaagtccctcatctgggggctcccgaactcagccctctcacattgtggccggctttactgaccctcacagacccaggctgggccctcccgatagaggccagccaaaggttcactcagcctctctttcaaggctggtgtatctctaaatcttagaccctcctccgttaccgtcagccaggtgggatgcccacgttttggagagaaaccgttctgaggaacccgggcctctgggtcccagctggctctccggcccccaggttatgtattctgggttggccacaaacagtggaattctaggcactcccgggacagggtgggactgctgtcctcattcatgcaaccagcaaatattcacggcaccttgtttgtgccagacagcagaccgaggacacggttgttaccaagaccaggctgttgccttggaagagcccagagcgtgtcaagggagacagccacatcacgccagaaatacatgacagctggattagccctgggagagggaggcccagatgtgggagctcaggggaggtgcagctcaacgtg

SEQ ID NO: 96476 - DNA, 14992 bp, Homo sapiens
tatacaacacagtgatttttaaaaatcacttgacaaacttttattgctacagtcccactgatgcagctgcacagctgaaggaaagtaactagactgacactctagtgactagagcaggcatcaaacaccaaggacactggtatgccctcactttctgaagccctgtcctgctgacatgtgaacagatggcagccctcagaggctctcctaaggcctctgatttggtgaaaaggaatattctgtcagatcaaacccttaacaaacaactgctagtactaccggaagaagaacaacttaggatgtgtgacacagagaataccaggtccgcaacagattctaaggcattattaataagtgctcgcatacctgtaacctcattccttaacaaactgctcaagctgaggaagttatggtgcaaaaccagtaagaagagagcaacagccaggaccaagatgatgatgtttactgaaatagatagggaaaacctatgttatacctctttatctttgaccaggtataaaaacaacttaacttgtagaaagagcatacctttacggaatgacatctttttcttctgtcatataaatattagtttttaaccctacaaaacaaaaacaagcccccaaagtcagtaagcacatgagaagggacatcaaaatgccctaacactttttttttttttttaattcaggaagaaacaagaggcatatacagtattccgccagaaactcattttgaattcacagttcccaagaacccaatttgggatctgaaatttttgtggtactcattaataaaaaacttaaaaataagttggagaaacagccttagccttgtacattatacatcacaagatgaaaagcaaaagaaacatttaagaattaagtttcagccaggcagggtctggcctataatcccagcactttgggaggccgagtggggtggatcatgaggtcaggagttcaagaccagcctggccaagatggtgaaacctcgtctctactaaaaactgcaaaaaaattagccaggtgcagtggcaggggcctgtaatcccagctgctcaggaggctgaggcaggagaatcgcttgaacctgggcaacagaggttgcagtgagccgagatcatgccattgcactccagcctgggcgacagagtgagactctgtctttaaaataaaaaattacataacataattaagtttctacttaaaattcctaaagtagacatggattcacgttgtctatgaccaagtaacctgaggtcttagcctcatcagtaaaaacatgcctgttcagagttgtatcccattcacctttaacatgagtgtcctcagagaaaagaatattatccaaattcacttgacaaacccacagcacagaaaaagctacaaaaattcacaaaatccaatcgatatcaaaagtgtggagtacatttctagccattgtaactagcaaaaaaaaaaaaaggtttattttagtttattattttttgaaacggagtcttgttctgtcgtccaggctggagtgcagcggcatgatctcagctcactgcaacctctgcctcccgcattcaagcgattctcccgcctcagccttcccaatagttgggattacaggtgtgcgccaccacgcccagctaatttttgtatttttagtagagatggggtttcaccatgttggccagactggtctcgaactcctgacttcgtgatctgcccacctcagcctcccaaagtgctgagattacaggcgtgagccaccacgcccggccaaaaaaacatttaaggtgctattctcaaaaaccatctctgttagctagctattcatctcttaagaaggtggtgtctaattgtcacaatgtcctggttggtcctcctcagctcatctgaccttcactttttcaaaacaattcagtggaaacaagatagtaggtggaactaaatttatttaaaaaataaattccttcaacaagctctggataaaatgtttccttaaagacattttaccaaccaagatatcgtgaacctaccttttaaccctttcttacttcatcttcacccatagtagtacccaacccttacataaggctattaattttacaaagcactttcaaacatagcgtattgcaatgcaagttagttcatttgtttttttagacagggtctcaccatgttgcccaggctggcctctaactcctaggctcaagcaagcctcctgcctcagcctcccaagtagcagggactacagacaaagtaagtttgaattaacttcatcctgggaaaattgtgtgcctaccaggcacttaatttctcaaggcctttgtaaagaagagaaatatgttgaaaaactgtttaaaaaattgggggctgggcactgtggctcatgcctataatcccaaaatgaaaacaacaaggctaacgcgggcagatcacctgagctgaggagttcaagaccagcctgggtaacattgtgaaagctcatctctacaaaatatacaaaaattagccaggcatggtgacgtgcatctgtagtcccaagcatttgggaggctaaggcaggaggatcccctgagccagggaggtcaaggctgcagtaagccatattcatgccactgcactccagcctgggtgacaaagcgacaccctgtctcaaaaaaataaaaaataaaaagcaataaaaactgtggatcagccaggcactgtggctgatacccataatcccaactattcaggtggctggggtgggaggctgcctgagcccaggagttccagaccagcctgagcaacatagtatgaccatcccccaaccccatatctaaaaaaaattttttttaaaaatgggatcacaggccagattacaaattagggggaaaatacacatctttctttctttccttttttttttttttcgagacagagtctggctctgtcagccaggctgcagtgcagtggtgccgtcttggctcactgcaacctctgcctctcagattcaagcaattcttgtgcctcaacctcccgagtagcagggactacaggtgtgcgccaccacgcccagctaattttaatagagagagggtttcaccatgttggccaggctggtctcgaactcctgacctcaggtgatccacctgcctcggccttccaaagtgctgggattacaggcctgagccaccaggcccagcccacacacacctttccaaagcagtatatatgaagtacaacgtgtcagtgaacttcttctcatatacatcagggcgccgtggctcacgtctgtaatcccagcactttgggaggccaaggcaggtggatcaagaggtcaggagttcgagaccagcctgtccaagatggtgaaaccccatctctactaaaaatacaaaaaattagccaggcatggtggcaggtgcctgtaatcccagctatttgagaggctgaggcaagagaatcccttgaacccgggaggcggaggttgcagtgagctgagaccgtgccactgcactccagcctgggcaacagagtaagactctgtctcaaaaaaaaaaaaaaaaaaagagaagtatatacatcagtatataccctaagtcatatgcctctatcacattatgggctgaccttatctacagaagctggcagaggggagctgttcggacaaagccccaacatctgcctgcgatgaggcaacttccaccaccactgagaaaacgatcttgcactcaaataaatcccacttaattaatggtacaagagataatgtttttagtttcttgacttccagttagcagttacgggatcaagaggcacacttggctggaaacaagaaaaacacaattctatcaagtatctgacatacttaagtagactggcaaggcagaaaccagttgctcctaaaacttccacagttacctacatgcaaaacgccagttatcatggagtacgtctaatccatattgtctttcctggggctattcctggtaagagagctttcctgatctggttagaaggaattctcaaaacgaaattgcacacagacgctggatctgtaatagttaactacattttcgtaagagtatataattgtgtacaatttgattagcaacacagttggtcctcagtatcagtcggggattggctccaggactccccatgtatacaaaaattcacggatgctcaagtcccttatgtaaaatggcatattacagtcagccctctgtatctgtaatttcagtccgtggttggttgaatccaaggatacaaaactgtggatacaaaaaaaaaagaccgcactggccgggcgcggtggctcatgcctgtaatcccagcactttggaaggccgaggtgggtggatcacttgaggtcaggcgtttgagactagtctggccaacacagtgaaaccccgtctccactaaaatcacaaaaattagccgggcgtggtggcgcatgcctgtaatcccagctactcagaaggctgaggcaggacaatcccttgaacccaggaggcggaggttgcagtgagccgcgatcgcaccactgcactccagcctgggcaacagagcgagtcttcgcctcaaaaaaaaaaaaaaaaaaaaaaaaagaccacacagagatatatctatttatacacacaacagaaagtctcttcaaacacaccaagaaatacagagcatgagaaggaaacaggaataaactcttgcccatccctctttctgccttctacacgtcctgagtccttctgaggtcagaaaagtgtcaaacgtgtctgcattttactgtttggtctctgccacgtgcaaggatgaaagggcactgaggatatacaaacactttctcctaccctttcatctggctggctcccacttggcattcaaaggtcaaggtagcctcctccaaactccacgttgagctgcacctcccctgagctcccacatctgggcctccctctcccagggctaatccagctgtcatgtatttctggcgtgatgtggctgtctcccttgacacgctctgggctcttccaaggcaacagcctggtcttggtaacaaccgtgtcctcggtctgctgtctggcacaaacaaggtgccgtgaatatttgctggttgcatgaatgaggacagcagtcccaccctgtcccgggagtgcctagaattccactgtttgtggccaacccagaatacataacctgggggccggagagccagctgggacccagaggcccgggttcctcagaacggtttctctccaaaacgtgggcatcccacctggctgacggtaacggaggagggtctaagatttagagatacaccagccttgaaagagaggctgagtgaacctttggctggcctctatcgggagggcccagcctgggtctgtgagggtcagtaaagccggccacaatgtgagagggctgagttcgggagcccccagatgagggactttctacgcggatgagagggacagccgagcaccagggtcccctctccaagggaattctctctgttgtggatgccgcctagggtagcccccctaaattccaagggtcagtagggccccccttacactttgaagtgatcggaaagtgatgtgacgctccggggatcccaccaggctcagagatacccctggttagggctccgacaagtcgttcccctcaaaggctcgccgcggccgcccttactgcaggcgatggaggagatgcggatgcagcccgcgccccgacccgccctgccagctcagcgcccgcgccgcaggccccggagcccagcccgttgtctggccgcccgcgttccctgcacgctgggccgagcacacttgccctctagctccgtggcagccgcgcagccccactacgcccagccagcccgcagcggtaaccgctagagcgtcgcgccaagcaggcgccgcggggcagccctgccgccggggtcctcgcagggaaaaaggccgtcgccatggagacgcgggggcgccggcggccgttgggccgcgcaagtactgtcaaggacagttttcgggacgggggacgcggctccaggcacccaacagcactgacggcgaacacttcacgggcgcgcgatgcctcgacaaggcggccgccaccaccacctcagctgccctcgcgggcagcacggcgcggcaaaagcgcacgtcgcctagcgatggcgcggggcggggacacgggctgtaccggcccgtcggagacttccgcttccggggccgccgccatcgctctcccgggcttagaaggcccggctactgacgcgcagtgccagaccttasccctyacggtccttaagtctcggtcgccctcgcctcgcagcctgccacccgcgctcagctgcccgcctcctcagccagccatgctggagcatctgagctcgctgcccacgcagatggtgagggcgcaacccggggacctctgcacgccgttcttgtgcctggcagcttcgaagcccatgttggagcaccgacccggtgctgcgctgttccgggcccggatggttaccgtccaccctctttcccgaattgcctcctgggtccccttctcttctactccgcgagaatctcctgtccattctccgtgagggtgtttcagttcctcccgggaagcccagaatttaatatcttgcccaggcccttaggagagcgggagaccctgatgttggggttaccctgtgccagagttgtgaggtcagggcaggaattgtatgttctcggcggtggaaccaattmtttttttcctctgcttcaccccaggattacaagggccagaagctagctgaacagatgtttcagggaattattcttttttctgcagtaagtattggttttacatttaatctccgcccccgcctccctcccaaccctcagtttgagtgtgtttaatatacttcatttgtctctagatagttggatttatctacgggtacgtggctgaacagttcgggtggactgtctatatagttatggccggatttgctttttcatgtttggtaagaaatttgtgggtattagtgrcagcttgggttttgtgagtcgggttggtttggttagacctactcagtagtgagacccaaagccaacgtttccctcatccttccaaacagcgtttccctttgctatcattggaaaagtagaatgccaaaatagtgtcagatggtgcgaactatataaaaggacacagcttatttcctttggcggctactctggctaataatcttaaggtcaaagccagcaggagttttcatggtgctcacrttgtcccttcaccttttatttatttatttatttaaattttttgagacggagtttcactcttgttgcccaggctgcagtgcactggggcgatttcggctcactgcaccttctgcctcccgggtttaatagattttcctgcctcagcctcccgagtagctgtgactacaggagcccaccaccacacccagctaatttttgtatttttagtaaagacagggcttcactgtgttggccaggctggtctcaagcaatccgcccaccttggcctcccagagtgcttggattacaggcgagagccaccacgcctggcccccacctttcttttaggtcttaaagccatttgtataggcagtgagcctgttcccatcatcatacagtattttgcatggatggtggcacagagcctttataggaatatggatttttttttttgtttttttgttccctcagcataggagtcatttgggaacctggcattatacgtaatgattttttaaacttttaatagctataatttatgcatttcctcttttctggcccagctgacacttcctccatggcccatctatcgccggcatcctctcaagtggttacctgttcaagaatcaagcacagacgacaagaaaccaggggaaagaaaaattaagaggcatgctaaaaataattgaggttttcatgattcagcacctgcttttgtttctgtgagatgagctaaattgctttcataccccagataagagctaaaaccacctaatgctcttatggcacagctgtgtatagatttagttctctttatacttcatttctagcccagttgggttttgatttatataagtagtttagaccttctcttcataatcttgctctgagatggggaacagaacacacaagtatgaagtttctttcaggtgtaaataatgaaaaataaatgcctcataaatgatagtacaatgtaactatcaaagttttataattcattatgagttaaccattttaatgtttccaattaaacctcatagtgcaagttctttgtctaaagggtcttctgttgattattctgcaaggaagataattaataaaagcctaagttagaagttcgtgcttctggccaggtgcagtggctctcacctataatcccagcacttgaggaggctaaggcaggaggatgacttgagcccaggagtttgagacatttcatggtatgtaattaatagttgtcattagaacattagttccatgagaacggggactttgttttgctcactgctgtctacccagtacatagaagagtacacgatgcattgttaagtacttaagatttattgaatgagaactgcattgtacaatatggtgccactagacacgtctatttaattaaaattaaaatataaaactctaaaactagccatgattcaaaggttcaatagctatatgtgactagtggctaccatataaaacatttccatcacaaagttccatttatcagatcttatatagaaccttgaataaaatttaatagacaagtgattttgtatttaacatttcacctttattgaatgcctataaggccatttgaataacggatcatgtacaaagcaacaggaaaaaaaaaactgcaagcagtaaaggttgtgcaggtgatattcagtaacactgcagtgtagccagagcaaggacataaaacttccttagctttgtaagtctgtggaaatcaaaacttctaaaagagaaaaccgaaatcagaattactgacactttaggccaggcatggtgcctcaagcctgtaatcccagcatttagggaggccaaggcaggcagatcacctgaggtcaggagttcaagaccagcctggccaacatggtgaaactccatctctactaaaaataacgaaaatcagccaggcatggtggtgtgtgcctgtaatcccagctactcgggaggctgagggaggggaacttgaacccaggaggcgtaggctgcagtgagccaagatcgcaccactgtactccagcctgggcaacaagaagactccatctcaaaaaaaaaaaaaaaagaatgattgacattttagaaccaatgccaaaagagtaacacatcaaagtctctgaactgtggccaaaggtatattcggaagaaaattcacagtcttaaagatgagtttttaaattaatttaggaagatgaattaagcactcaagtaaaaacgataaaagtgggaagaaaagatgtttaaacaaaataaaaatatacagtatggtaattaataagaaagtatgggggaagtcaggtgtggtggttcatgcctataatcccagcactttcagaggccgatgcaggaggactgcttgaatgcagtttgagaccagcctgggcaacacagacttcctctccacaaaaaattttaaaaattagccaggtgtggtggtgcatgcctgtggtcctagctacttgaggggctgaggtgggaggatcacttaagcccaggaggtcaaggctgcagtgagctatgatcacctcactgcactccaggctgggtgacagagcaagaccctgtctcaaaaaaaaaaaaaaaaaaaaaagatatgggtgagattcctttaattctaataaaatacctactttataccaatacattagaaaaattaagtaaaactgatgactctccagaacgatgtggatttccaaaacatgcacggaaaggtgaatagctcaaggataccaagtttgccaaagatttgttcccaactgggcattgggacttgatggttttgcaagttgagttctagcaaacccttcaaagtgaaaataagagttatcagaaaccaggctgtgagcactgtaaaagggcaggaagtattgttttattcaccactatatccccagctcctggcagagaacctggcacacagtaaactctaaataaaaatctgttaagtgtgccgggcgcggtggctcacgcctgtaatcccagcactttgggaggccgaggcgggcagatcacgaggtcaggagattgagaccatcctggctaacacggtgaaaccctgtctctactaaaaaaatacaaaaaaattagccgggcatggtggcgggcaactgtagtcccagctactcgagaggatgaggtaggagaatggagtgaacctgggaggcggagcttgcagtgatctgagattgggccactgcacttcagcctgggtgacagagcaagactgtgtcttaaaaaaaaaaaaaattgttaagtggctgtaaagggaacatttcattagagtatttgtgtgtgtgtgtaattttcaaagatagatatatttttagttatagaaactgaaaacagggctgggcacagtggctcattcctgtaatcctggcactttgggaggctgaggtgagtggattgcttgagcccaggagttctgagatcagcctgggcaatgtggtgtaaccctgtctctacaaaaaatacaaaaactagccaggtgtggtggcacacgcctgtggtctcagctactagggaggctcaggcaggaataccacttgagccccagaagtggaggttgcagtgagttgagatcatgccactgcactccagcctgactgacagagtgaaactctgtctcaaaaaaaaaacacctgaaaacatttctggagcaatatttatttttagagtccctcgaatacagaagtgaaaatgtactattcaagacttgtatttaacttcataaaatttctttcctagatgggtattacctcttattaaacaactaataaaatatgtgctatataatcatacatttaaaacatggaaagacaactaatatcttacagtacatgaagacaaacttcaggagacaaacattaaatatatccaaaaactaaatggacctggactttgcttacaaattgcttaaatggaaatgaaatttgtgcttaagaaatgttttcactgatggaaaaataaatctaacaaaaccattatgtaaaaacatactgatttacaaagccaatgtgtctcagttttaatttgtatataccctagatgaggtttatattaaatgagaataaaatattaaaagtccatcaatgtgtagaaaagaaatacagctgctcaagtactagatagaacttcatattctttaaatctatttctagaactgaattgactttttaaaattttataatttatcaactactccttaaggttattaacaatagcaggaattatgacgacatattatgtcatttgtttctcctactgcttttatctctacattacaatataaaattttcaatccagcattttatagctctgtgtttaagttaattagtaccttaaaaaaataaaattctaaatataaacttggtggattaaggctcagtaaacagtaatcaaacaaacaacagatttgtcctcacaaagagaatatgaaagccaaagttttttttcttttgtgatcctgcttcatattattctgttctgtccaatttcttttctgtagggaaacgccaaagagatataaaaaagagatataaaacagtggtgagtggcttccaaatgactgtttgcccttgctttttaagccaaaatcctctaaaaataggtctttaattctggcagcagattaggacaaatgctcaaaaattcatgttttcttcaaaaaatttcaactggcgagctttcacactgtaagttgtatacttttcacccatgtgctcccgcaaacgtacctatttgagaaacaaaaagaaaatcaatcagtatgtagtaggaaaaaatatttctgtaatcttagaggaagggcttttctaagcatggtatccaaggtggaaaccatacaggaaaatactaatagttcagtttacataaaacttttaaacttcaagatgtttcgaaaagtcgtaagaaattaaagagcaaacaaacaataaactagggaaaacatttgcaacattcatgccaaaggattaatagcattcgtatataaagagttctttgaatcaataaaacccaacaatattagaataggtaaaacaaaatcaatttcatagataattcagcaaattcatttatatatgtatgtaaatgtaaatcccatatatttacaaaataatcatataaataaccatttagtgaaatgggaaaagttcccttgtccccctcgcagggcgtgcaatgggggtgtggctcgcttcttcagtgccccactgctcaaacctctaggggaccatacagacaggcaggctgtggggctctgaccccatggtagtgtctagtggtgaatgtttacagctgaagccccagtgggtgtgtgttacagggtgctcttttagtttagccatctgtaggcagcttgtgttagctcaattagacccttgccctatctcaaggacagagggcttttgtatcccagggttcttgccttggtgtaccggaagaatcagatcacacgtgggcttggagaatgaatgcaaggttttattgagtgaaagtagctctcagcagatgcgggaaccagaaggaagatggttttcccctggagtctggctgctcggtggaccgggttctcccccagctaccctggccaaactccacctcgttctgctggtcgatggcctgctggcatgctggcatctgtcagtgtgcttttccgctggcatgctcccctcgatgtcctctcaatgtccagctgcttgtgtcttcttctgctaatgtgttcctctcaacatccaacctcttatctgtgttcctgcgagggtctccggggtttttataggcacaggatgggggagtggcaggccagggtggtcttgggaaatgcaacatttgggcacgaaccagcagtgcctgttctcgcctaggtccatgggcacagatctgagggtggagccctagccagaggccacgccctcccttacccagtacttccctgtcccccttccatatcattagcatacataaaattcaacctgaccagtaataaaaaaagtactatgtgacattcaatgtatgcttgtggaaagaactgttcaaaattaaaataacacctagtatgttaaacagatactgtgaacctcctgatacaatgcactgagggcatatcacttctgtggtattcctgccaaaaatgtataacctaaatctattcatgagaaaacactggaaaaatccaaaccaagggacatttaataaaacacacagcctaggctgtctcatccttatgagcagcctgccctgaatcctctctctctcagggtgtactgcctattctgcactaactttcaaaacattatttttcttttgcaataaattattctatgctgcaaaaaataaaataaacatatggcccctattcctcaaaaatgtcaaagtcagccaggcatagtagctcacgcctgtaatcccagcactttgggaggccgaggcaggcggatcacctgaggtcgggagttcgagaccagcctgaccaacatggagaaaccctgtctctactaaaaatacaaaattagccgggcatggtggcgcatgcctgtaatcccagctactcaggaggctgaggcggaagaatcgcttgaacccgcgaggcggaggttgcggtgagccaagattgcaccattgcactctagcctgggcaacaagagcaaaactccctctcaaaaaaaaaaaaaaaaaaaaagtcaaagtcaggaaaaacaaagtgaggaaatgtttcaaatttaaaaagacataattaaatataaaatgtaatcctgtttggttccacatccagcatgacaccataaggagctctgtaaacctcccaccaccctcagtggccaggtaccatggctcacatctgtaattccagcactttgcaaggccaaagcgggctgatcccttgagctcaggagttcaagaccagcttaggcaacatggtgaaactttgtctctacaaagactacaaaaaattagccaggtgtggtggtgtgcacctgtagtcctaggtacttgggaggctgaggtgggagaatgacttgagctggtgaggcagagactgcagtgagccgtgatcatgccactgcactccagcccgggctacagagcaactcaaaaaaacaaagtctctggaaacggtgctaagagaaaatgacattcgaatttttaaataaaaattataggaggccattgttttggactaaactcctgcactactgatggcagtcacgggccatccggagcagccgctaccatcgcgctggcagcagaagggaggtgtgagcggtgatggcaggagcagctgcagaagagcagtggcaccactggaacctgtgccccgcgcccctgaagcagctgaccaggccacgcccaccttcgcatggtcgggacccgcccccaggcccggaccctccaccactccggacacctgcttcagctgtggggagggcaaggggaggaagcagacagtccccagagcccgcccctgggagccccgcccagagcccactgccctggaggttgctaggatggggccaggctgtcacctgccgctgggggagcagcgtggtcgggcgcaaaggggcaggcagagaggtgccccaaggcagagccaggcccgagcggccccaactgcccccgcaggctcgggggtgtctgttcccactgcctggcctctccctattacccccacccccagctccaatctcagagcggggtaagcccaggcgcggtcaaagcctggccaggtgtgcgcatgtttggggcagcaatgac

SEQ ID NO: 96477 - DNA, 34578 bp, Homo sapiens
gcatatgccgctttgcaaatgtcaggggggaggcagagacaataaatattatccactaagaaccttccgtccccagcctggtcctctcaggcatggtgctcacaggccaccctccaccttcactccccatgcttggttccatcagccatgtgcccccagagcctggcacgggacaggtctcagggcagaccccagccacatgtgccatggaatgaatacctgactctggcttagagcatcagaagccctagtgttcaaaccatccagacatgccctgtgtgggcggcaagccacccaggcgccaaggcaagagaccgaggacacgagctgttccagtataataaaatataaaacaagaatagttataccagatatagatcttagagatatatgaatatcattaatcattagtttgtagtaattactctttatcccaatattataataatcctcgctctacaatcataacctaggaaaaaccaggccatacagagataggagctgaggggacatagtgaggtgtgaccagaagacaggagtgcgagccttctgttatgcccggacggggccagcaaaagggctccttggtctagtggtaacgccagcgtctgggaagacgcccgttgccgagcggacggtggtctagcggtagcgaaaagtgtcaaggaacaacacccgctacttagcagaccgggaaagggaggctccctttccccgggggaatttagagaagactctgctcctccacctcttgtggagggcctcacattagtcagacctgcccgcagttatccggaggcctgtctccctgtgatgctgtgcttcagtggtcacgctcctagtccgccttcatgttccatcctgtacacctggctctgccttctagatagcagtagtcaattagtgaaagtactaaaagtctctgatatgcagaaataatggcataagttgtctttctctgtgtctcctctctctgcctcggctgccaggcagggaagggccccctgtccagtggacacgtgacccacgtgaccttacctatcactggagatgactcacactctttaccctgccccttttgctttgtatccaataaataacagcacagccagacattcggggccactactggtctccgtgcattggtggcagtggtcccccgggcccagctgtcttttatctctttgtcttgcgtctttatttctacactctctcatcgccgcacacagggagagacccaccgaccctgtggggctggtccctacaccctggaagaagggcagatgaactcagagacagcgcacagggtcacataaaatgagccatcccaaaacaagcccgtctctttcctaacagttataatgttgttaggacggggaaatgtgcagagaggagcagagccagcatcttcctgattttacaggcaaggaaactgaggctcagccagtaaatggtggggctaggaggtcagacccgattcagtgttcaccagagtgctgcccaatgccgcacaggccacagtcaatgggagctgtctacatagcatcatggaccaagagcattttccaaagtccaaaaagagggaagaaaagctccaactcagccaggtgcagtggctcacgcctgtaatcccagcactttgggaggctgggggtggggggtgggggatcacgaggtcaggagttcgagaccagcctgaccaacaaggtgaaaacctgtctctaccaaaaatacaaaaattagccaggcatggtggcacatggctgtaatcccagctactcgagaggctgtgggtggcaagccaccttggtgccaaggcaagagaccgagggcacgagctgttccagtataataaaatatataaaacaacaagagttatactagatctagatcatacatatgattatatatgaatatcattaatcattagtttgtagcaattactctttattccaatattataataatcctcgctctacaatcataacctaggaaaaaccaggccatacagagataggagctgaagagacatagtgagaagtgaccagaagacaagagtgagagccttctgttaagcccggacaaggccactagagggctccttggtctagcggtaacgccagcatctgggaagaggcccgttgccaagcggacccaaccgtggtctagcggtagcgtcagtgtcaaggaaaaacacccgctacttagcataccgggaaagggaatctccctttccccgggggagtttagagaagactctactcctccacctcttgtggacggcctgacatcagtcaggcccacccgcagttatccggaggcctaaccatctccctgtgatgctgtgcttcagtggtcacgctcctagtccactttcatgttccaccctgtacacctggctctgccttttagataacagtagcaaaattagtgaaagtactaaaagtctctgatatgcagaaataatggcataagctgtctctctctctctctctcccactctctgcctcggctgccaggcagggaagagcccactgtccagtggacacgtgacccatgtgaccttacctatcattggagatggctcacactccttaccctgcccctttgtcttgtatccaataaatatcagcgcagcctggcattcagggccactaccggtttccacgtcttggtggtagtggtcccccgggcccagctgtcttttctttcatctctctgtcttgtgtctttatttctacaatctctcatctccgcacacagggagaaaaacctaccgaccctgtggggctggaccctacaggaggctgaggcaggagaatcacttgcacccaggaggcagaggctgcaacgagccaaaattgtgccattgcactccagcctggggaacaagagcgaacgctgtctcaaaaaaaaaaaaaaatacaaaaaaactccaactcacagccagcccacaggaagggtcccagccagctaagcccagagccaaagcagcaagaacaaacaacacagtaatccccactgaccaagcaccactgcatgcctgacactgtgcacatgaccaaacctgattccaatcctgtcacaggtcaggctacagaggcaaagtggggctgacccatctcctgaccaactctatgtcattgccttaccacgagccctgagaacagtctaaacaggccctgatggggccaagggaagaagagcaccttgacttcccctaaggacaggccctcaaatcccaggacagaaaaactcaatgctgtacagtccaggtggcagcagggctagaagtcaaagcagagatggggatcccagtgctcctcctgctagtctggttacctggaataaatgtgcctcagctttctaatgtatctcattaggcttattctaaggactaaaagaagaacaggccttgagcagggcttggcctacagtaaacaccatggaactgtttttaacgttaaaggccaactcttcccaaactaacatataagcctattgcaacttcatttcaagtctgggacaaaatcaggataaaggcaatttggatgagtaaatgaatagacacaggtaagagatgttttaaaaagaaaggcaacaaaggtatataaggactttctatctattacaaagtcagcgtagtaaaagaaaatgatgtatcagtaagagttatcacagaaacaaaacctatttatgtaggaattcacgtcattgaaacaatgtgattacaagtcactagggaaaaaagtcctattgcataaattcataggagggaatttcccattttacaaggctgaggatttctgtagagaaacactcccaggatgcaaaatagtcttgtgtagccaaatcagttcaatacccaggcagtccaactgctatgctcctcctactcaccagcctgaacctgaagctctcctgcaatagccccgaggaagttcacagcagatatcagctccccacccaccactctgcccacctacagccccttggcataggctgggccttccacctggaatgtccatcccatcctgtactgagacttcaaagcccaccttcctcctccctcaaggcaacacagagccctagagaaccacttgcttctcttatcagagagcctgtcaccctacactggcaaggctagctgatcccctagaccaatagcaggacgactctgacatagggcagagtttgccagcccttttcttgtgagcccctggattttcacctgcttcatcaaaaccctagaccaggctgggccaggatcccaagggtgatccagggtggccataccatcaggctggggcagcatactcctacctggcaggaggaaaagtgggccaccataatcacccgtccagtgcccatcctcagcctgcagccccacgtaaaatgtcatcccgttcagagccccctcaaaggcggtgtgggctttgggcaagtccttaaagtaattcttctgcaaagagatcgaaaaaaaaaaaaagagatagctgacgggactgttgcccggccagaggaaccctcttcacatacagcccaagtcaaaacagtgaatgtaaattactttaaaagtttcagctgtttccatcaaaagtctgaaactctttgatgagagcatcacacctcagcaaagtaaaagaacagctgcacattttcgttgctttatttgccagtcatgtattcttcacaacttctccaagatgtctggaataaaccaggcacccagactgtagggtggggcacgggtgccgacctgggcctgggactcgggcctctcaaagagggcccaaggggcggcacagcctttccctcggtggccggggctcggcaggagaccctgtttacactgcagactctgacgaccaaaatctcttacaatgcacacaactaagacagtggatccaaacactttttgtgaataaaaacaaagttacaactatctttgcaactctcctataagtcaaaaattatctcaaaataaggtgctaaaaaataaaacattaggagtctcctatgcgtggtttagagatgaaggggctgaagcggaggggcccgcgaacgcagttcccgtgggcgctcgccttggggatgggcgtcgctggccgggtcctcccacccgcctttctgagagaaaacgtgctcctcacggctcacccctcagggtcccgagctcgctgacgctccgcggaagcaacttacggtgtccagccccagggcgtaggcttccaggccggtctgctcgcggccggcgcgctcgtcctgcaggtaggtccacgtctgccggcccctctcgcagttgagtcgccagcggccgaggtcggtggcgggctcggtcttgtaggggccccctcggcgccgcagacacctgaggaccaccggccatcagcgacccaggccccgccccaacgccggccgccggcccactgccccagtcgcgctctcctcagcacctaggaccaccccgcattcgtcaggagcccggggcgaggggactcacgtgccctccgtcattgctgctgcagtgctctacgccgcccactgccagctgccagatgtccgcacccgggacctgccgcccagccccgcccctcccgcccctcccgcccctcccgcccctcccgcgcgcactacgcaggcgcaggcctcggcaggcgctcaggcttaggtgggccgacgcccacgcaaccaatcagagcgccgcgagcgtgaccccggggtgtgccaggcgaccacagtggtggagcgcttggtgccccatgcggcgtggggcggggcctgagggagcggggatggtgggtgaaggcgacgggacgggggaggcgggtggggccttattggcggggcatgaggggcggggctggtgggtggggaggtgggggcggggctggtgggtggggaggtgggggcggggcctggtgggtgcgggtgggggcggggctggtgggtggggccgaagggcgggggcggggcctctcgcgcgccctctagaggcttgcgtcccgggagcccggcctcgtgcgccgcgctttgaggtgagcctctctgagaaatttgtgaggagggtccagccgcgggtcggaaggaaggacgtggggagcgaggctcgagcgagcgacagcgagtgcgaaggtcgggtggcagggaattgctctcgcgctgcaggatttgcccggacgccggggccgggggtgggggcgggaggccgccctgaggtgaggtgggcgcgggccgtcggctccagtgcgagaccagggggagggcggggcggagcggaggagccgagggcgccgccggcgtccctgggaagctgagcgccgcgtagcttcgccggggggagtggggtaggcgcggtgaggccgtgggcccccacacctggcggaccacaggggccagaagccctggagccccgccagggaagggctgcgtcgctggccaggaccgagcgcggtagagcctcagctgctcacggggtcgctggagttgggggtggccccaggagaaattaaaggtgaaaagccttagcagcagagggaagaggaagatggaggcagagcgagtgaccgaacttggaagggacagccgggcgcaacagggcagggggcgtctgactgttggaaacatggctgacgtctggaggctgcagccagtggtccstaagtcaggtcaaggacccacagaagaccccagcatgtcttcacctggcccacagaagccctgacatccagttacaactgccccagcctagtgagcatttcggcacccactcctyaattcctacccccagcctaacttcgaaggggcggtgagccacagcaagccggaggagaaagttggaagagagagtggacaaaagaatacccacaggcaccttccccacagtggaatagcggggttttagacaatcaaggataatcacctcttcctatcccagttcagaaacggatgaaaaagacacagcaataagatgggtgggtatcaaaatatcagctttgccacaaattaaaaacctagcttgaaggacaaggcttaaatctgcaagcaagmgggcaagctactaaatcacccgtaagtcagacaaacatatcccccagcctctaggccatgaaactgcctcaccaagcactatgcaattgagtgcccaccagaagacacccctccagtcaacccacagaccccagaaagagtacccagaggagcctgagcacactccacyctatctgttctctgaaattcaatcaaatgagtcactctacttctctggaagcagaaagaggctggaagtttttctccaggtaagttcctccatgtagaaacatgaagaatagggataaggggcttcagcctggatggaatctcacactgaacctggcaaagctaggtgagggaagaggtttcaactggataagagtttgagttttgatatcttaatggactggactttttatgagtaaaataatccgctctttttaatgtctgaaagaaaagaaaaagctgtaaactacgtctgagaattgacacagttaagcttctaggggcagtcatgagaaaaaacactgttcctatctgcttacatactactgcatccagcttattcattaagccagatacagaaggctctgaggattttggcctcaacaactgggtatatggtggtggtcatttactaaaatagaggtgtcttttatttatttagtgacaggatctcagtctgtcacccaggtgggaatgcagtggcacaatcattagctcactgcagcctcaaattccagggctaagtgatcttccgggctcagcctcctgaatagctgggactacaggcgtgtgccaccacacctggctgatttttttaaagtttggtagagacacggggtctcgctatgttgcccaggatggtctcaaactcctggccacaaggaatcctcccacttcagcctcccaaagtgttgggattataggcatgagccaccacacctggcctaaaatagggaaagtttgattggaaaattcagattaaagtggggacaagttatactagagatgcttattagacattcaagtgaaatattgagtaggctggcattcaggagagaacataatgctagagataggaatttgggagtcatttgctttcaggtagtatttgaaatcatgagattggacaagatgaattaggaaatgcacataaaaaagagaagttctagaatgagccctggggcaccgaccttttccagtatagaggaatggccagagagaggaggaaaaccagaggaatatgaagtcataatataagtgaagacatggtgatctttgctgaggctttgaagggattgcaaaatgaagacagaatttattattggatgcaacaaaacaatgtattggtgactgacaagagctatctaaagagacatggggggaaaagcctaatggcagaattttgaaagaaattttcagttaaacatggcagactgagcataaacattaacctccatttcctgcccaaaccctactcacataaagtaataaaagaccaaaaaaaccccacaaagaatgggagaggagacactagtaagcaagagaagtcaacaaaattatagagactgggaatggatggagaagtgataactgagttagctagagaaagttgagacttacgtttgtgggtgaagccaacaagagaccattcctgccagcaaataccaggaaggtgcagaaattggaataactggtggaaaatttttgtgaggaacagtatgaccatagatcccctctcctacttgggtggaggaagtctccmgtagttgaatcagagtaggtgttacctcaggcatgaggcatagctgaggaccactgaaagcagacagattgagttaaagtctacacatgtgggtccaggctcacttctcccacttagccagatagcatgagatagtgggaggatccctctggagcagctggcccacaagagtcctgcaaacactggcaactatgacctagtagaaaaacaaacctattagctggcagactgtacccattgayagtttccaacaagcaccatcatcagcatgagccagacatttgrggaaaacagtgcaacattacctccagccatgcaagtgatccatcttggaccactgacccagtcaagccttcagatgactataacctcagccaatacctgactgcagctgcatgagagatcccaacagaaagctgcccagctgaatcctcctcaaatttaagctactatatttggggtaatttgttcaatagcaacaaaaaaactagaaaaaaggactacaaagtgcccagcacaataaattgggcaggggttggggagggaatggggaggcaacatatgaagtaatgtcattgagaaatttgagaacaccaggaatagagrtgatctcaaaaatttccagcaacaaaaaaagcaaaaacacaaaggaacgatttccaatctaaaattctattctcattcaaatgatgaatcaaacgtaaggatagataagtccaaaaaacaaaaaaaaaccatttctttactctcacaacatccttttggcaccagatgtagagaatttctccccaccgacaagcaagcattcagctgtacagcagacaccagctgggtatccgcttcaatcctgcaccgtctacctggagatagcagcagatcacacaagttgaggactctgtgccgcaagactgagccccatgtccagtgtcaatcacaagccccaggttgttttacctgtccttctgggttcccaagaccccttccttggctttaatttacaagagcagttcacagaactcagggaaacacatgtttattacaaggctattttaaaggctacaaatagccagatgaaaagatacacaggatgaagcctagaagagtcccaagagcaggagcttctgtctgcaaggagttgcgaagtgccattctctcagcatgtggacgtgttcttgtccaccttcctggaagcccccacacatttggctatccacaagctctctgaaccctgtccttttgggtttttaggagccctcattacataggcatgattgattaaatcattggccactggcgatcaacgtcactttcagtccctctcccccaacctctgggagtttggggggtgggctgaaagtttcaacccctctaatcatgccctggtctttcagatgtccagtccctatcctgaagctacataggagctgtccgccatcagtcatcttactagcatacaaaaagacatcactttagagatcycaaggattttaggagttgtatatcagaaggcagagacaaagaccagatatatatttgataatattacagtagaaataaagacattttagatattcaagctcaggaggctactaaaggacaggctccatcaagaagagaaaaccaagcaagaggaaaatatgattcagaatccaggaaatgtccaagttatggcaagaagacagggggttctcaggaacatctcgaagagaaagtggagcatattacctgatgcacatgactttgttgggaagagctttacayttagggcagcgacttttgggtaaagtagtgacaagagcatagaaaaccaagcaaatgagaaaaacaatgtaattaactccaggaaaaatcaaaagttgtacctaaaggaaatgtaatcataaaccaataaagggctcaacaggaaatggtaaacatacagttatactaaactgtgaatgcaggtttcagccaatatcaaactgcttagggagactaataggagaggaaatgtgggtgtcgagggtgggggtgataatatgttgtgggaaagacagtgtaagagaagctaactcctcttccattgtaggaagtcaacaatgtcaagtcaagattaagaaatagcattatttaagtctttacatgaagctaatcactaaagatccctgagttgagtagtgtgtgtttggagaagcagggattgatttggtggaggaagaggttctcttcttagtgctgttgttttctcagtgaaataaggaggacatgatctaagaatgttggaggtttgaagagaatgagaagacatgaaatagagtctggggatgtaggattacagtcaggagatgctgagtgccagtttaagattggtggtcatacgcaacatcaccaagtctattaatacctctttctgtatatggctcaaattttatcccctctcttcacaccaattgctaacaaactcasgcttattccctttgaatttcacctggatggctgcagcacccacctctcaagattcctgccctacatgccattcttaaaagaaaatgtgaccagatcacttctctgcctaatcttcaacaacgggttctcacagctctcagaagaaggtgacaagaatctctgacctcaccctgctggcctgttcccctcacctggccacacaaccaagctggtacctccacgctttcatcatgtcctctcaagtacactgtctccagctacacccctgcactcctctccgggaattctgyttctcctctacccaaccagaccctgttccatcctctgttttttccttgctaccaattcaggcccacgcctcatgcacattctctgagaattatgtacataagtacctgactctcctggatgtaagctgggtgggcttagcaggcagaggccctgtgtcttactttatctctgcatcactgatgtctggcacatcaaggactgcaagtttgctgagagaatgaatcgccttttatacatggaaatgtaagctctaaactgcctcagagcatatgctggtgggtgacaatctgaggaggtcatgaatataggagaatattgaagaggtcacacaggggaaacaacttttcmttatgaaaaactgggagactgacatttaaatggtttatctgcatgattaaattaatcacatttccaacagtgcatcaagcatctgagaataacattattttgagtaaaaacagaaactcttcgggagagaccccctccccacaggtcaggctgctcaaatgtccaccatgtctagcagcgcagagagatggagctcagaggcaacttcctcttcccttgaactccggatcagcctttccaggtgctttagtcgttcgcctagacacgttcctgtcgcctctracagctgmagttgctccctcatcatgtcactctatttgaataaaaaagaaactgaacagttttgggatgtcaataaaccacgacctatstctgggaaggtactagatctggatcatgttagaaacctcatctgagtagtcatttatttttacagagggaaaaaaattatcctttgtatatccttccagcctcatttagctcgtacattcagctggtatctgtatatagactstttgcctttgtattctatcatgaacaatttccagtgtcagtcatttttcacccaggctggaacgcagtggtatgatcggagcttactgcagcctcaaactcctgggctcaagtgatcctaccagctcagcctcctgagtagctgggacaacaggcatgtagcaccatgcctggctaattatgtactgtagagatgagatctctttatgttgcccaggctggactcaagctcctggacttaagcgatcctccctcatcagcctcccaaagtgctgggattacaggcatgagccaccacgcccagccagtcatttttagaaaatatcatcgtcaagggctgtgaattattctatcacatgaatgtgttataattgtttaatcagactcccatcttcggatatttattctgtttcgactttcatacaataatgctacagtaaacatttttatacattaatttttggggaatatctggtaggtcagaattctttaggttagaattggtaattcaaagggtatgaatatttttaaagtatttgccaaactgatgaatggaaacagtacatcattttaatttgcttttctcctctattgaaggacttcctaaagccagtccaggagcacagtttttacctgttcagtggcacatatctgtgattgaaactctgtttttgcatctttaaccactgaaggaagaatggtaaggtaaaaagaccttaggctttggagccagttggatctggctttgaaaagcaacctgaccactcactacttgaacactcttgggtgaggctcttgacttctgggagcttaccttcctcattcattagttttcctcaggaaaaattaatcccagaagagaggtctgggtaatgccaaagctcagacaatatgtgctccaacagaagctgctgtcatcaycttaatgcccttaattacacatcagcacacagttacaggtcttattcagttcttaagaatatttcaattctattcttcatttatttcgtaggcagaaactcaaaatcagttgggtctctttaacaatgatatggataaagtttaagaaaaggtctaatttgagctaataatttgtcggtcatcaaaacatcataggataaatygtgatattacttttttccccagccattctctcaatctttaattcttaygtaaatgccaaatgtatackttcttctcacctgtgggctagtagttacagatgttttcatcacaggttcaatagtgtgagaaagagacactagagtctgaggaagatagaggggaagggaagttaaatccgtaaatgctcctgagtcttcagacaaccattgctgaagctgatcttcaaacctgaaacaatatgtaataaattcaaaaatatttgagcattaggaagttaactattgttcattaatcttctatatatacttaaaaactttttaagcctttgcttttttaaaattttatataattttttttttttttttttttgagacagagtctcactctgttgcccaggctggagtgcagtggcataatctcgggtcagtgcaacctctgcctcccaggttcaagtgattctcctgcgtcagcctcctgagtagctgggattataggcaagtgccactgtgcccagctaattttttgtacttttagtagagatggggtttcaccatattgcccaagctggtcttgaactcctgacctcaggtgatccacccacctcggcctcccaaagtgctgggattacaggagtgagccactgtgcttggccaattttattattatttttttttgacaagktctcgctctgttggccaggccggagtgcagtgttacaatcttggctcactgcaaccttgacctcccaagctcaaatgatctcacctcagcctcccaaatacctgggactagaggcgcatgccacccagctaatttttgtatttttttgtagaaacgggattttgctgtattgtcaggctagtctacaactcctgaactcaagtgatgtgcacacctcagcctcccaaagtgctgggattataggcatgagtcaccacacccagccttaagcctttgctttttactaagaatataactaagttatgacatcaactgagaagcagaaatgtacttattaaaaatttaacaacttcctatgataaagcttaatttaaaaaaaaaaactaggctgggctcggtggctcatgcctgtaatcccaacactttgggaggccgaggcgggcagatcacctgaggtcaggagttcaagatcagcctgatcaacatggtgaaaccccgtctctactaaaaatacaaaaattagccaggcatggtgacacgtgcctgtaatcccagctacttgggaggctgaggcaggagaactgcctgaacccgggaggcggaggttgcagtgagccagatcacgccattgcactccagccagggcaacaagagcaaaactccatctcaaaaaaaaaaaaaaaaaaattagagaaaccacttccctttaatttataaatccaattccaatttatatttaatgaaaaaggtggtattaatccaaaaacaactgcttcgatgtgttacttaacattacttgtaattgtcttgtttggcttatcttatttaatttactttggttttatgcatctataattaattcttctgacattttccaaatgagtggattgctgcttatagcttaaaattaactcaaaataatatcccactgccacctaacatactctagagctgtctacttccatataccggtcttttcaagaaaaacaatcttggccaggtgcagtggctcatgcctgtaatcccagcactttgggaggccaaggcaggtggatcacctgaggtcaggagttcaagaccagcctggccaacatggtgaaactgcgtctctactaaaaatacaaaaatcagccaggcatggtgatgggtacctgtagtcccagctacttgggaggctggggcaggagaactgcttgaacctgggaggtggaggttgcagtgagtcgagattgtgccactgcactctagcctgggcaacagagcgagactctatctaataaaaaggaaaaaaaaatctcatcccaaaccacttaaattatagagactgattttagtaatcggacacattcattcacccttccaaaacatattcattaagcctcctccagatgctaggcatcattctaggtacaaggaatattgcactgaaacaaaacagaggccctgccctaagcaatttatactttagtgaggagagacagacaaggaacacataacaagagaaacatggtttgaagatgagaaagacaaagcagagccatggaaacaagaaggtcggagatgggcaagcagggcctaacagaagcagacatttgagtagagatctgaagtgagtacaagatcagccatggggatgctggggagaatggaggggctggacagtcctaggcaaaaggaacagcaaactcagaggcccaactgtgaactgcctaccatgctcaaggaaggagcggaggtcagagaggaaatggggggcagatcactcagggccctggccacccctgcaaagtttgcctttgattgcaggtgaaagagggaaaccactgagaggctgtaagcaagcaagtgacacgacctccatcttaactcacttgaaaggcacccaccaggtctaccaagactaaactgcagcctactgtaataatccagaaggaagatgatagtggcttgagccacgtggtggccatggaagtcataacaagtggtccaattctgaatgtattttcaatagagccaataggatatgtgaatgggctgatgtgaggggatgattccaaggcacctgatctaggcagctggaaggatggagccgccatcaacagagatgaccaccaaaggaaggggttggttggaagaaagccgggaactggatttgggatatgttaactttgcagtggctaccagacatccaataggtgtctaatgaagatttcaaggaagcagtagcatgttcaagtgtggagttcagaggtttgagatacaaatttggagctgtcagaatagtgatgttacttaaaaatccatgaaactggatgaaatttctgaggagtaggtacagacgatgcagaggagaggttgagagaatgaatccagggggcagctgggggatgaggaggaaccagcagggcaggagggggaccacggacatcctaggagcaaggaggggaggatcaagtatgggatgctaccaaggactgggattcacggtcatgttcaaccctgggccttcatccccatgggaaagaaggctgaagaagtgagtatcacaagcgtttttgaggagttttaccattaagagggcagaaacatgaagtggtggctaaagagggaagtgggaccaagacagggaggcatgtttcatgtctgtgtgctgctgatgggcaccacctaatatggggaggggtggtagcacgagagagwtactcattgaatgaatgtccttgggtaggtgggagatgagatcccagcccagggaagggctgactgactacgagctgcatggttcgtttccagcaacaagaggcgtcaggaaggggatatagggaggatgctggatgtggctgggagggcagggaaggcagaggacaacctgtggaaggtcccttattcctgattctactcagtaaaatggtaaacatggccatcaaatgaaagcaaaggaaaggtatgcatgggagggagggaagtgggcaatgtagaggaggggcagccccagctcctgtccattcacagcatgggatgatccaccaatgcctcaggctcccaagggcagggtgcctgtggccagccatagtgttcagcactcaccatcttctgagcagacttaaccacatgaatttcccagaaaaacttaacactgactttcaataataaataataaatgaaattcacttcaatataaacagttagaaacatactatctagggcactgcttctgtcttcaaagagcttttaaatagttacatcactaaaactgttgctaataatccacctgcccttctccatcctggctgtcttatattaatcaagcaataaccagtctcccctcacagcataaagcagactaaacacacatgaattagaaggaagtgggcttcacctcttgttctcttctttctmcagcagcagactgctcgacaaacactgcgccaagagctcctcagcagaagctcctcgcatcagatcctctgtgctgggaatcctcccctcttgagcacactctgtgctcctcttccagttacrgtgcatgtgaagcaatggtatgggaaaattgtttgcagaaggatgaaaaggctttattgccaaactgtaagtacatgatttgaaatgtttatggtcaagagaaaatatttctacagcatcatgtaaagcatgtagatacatttgcacatgtgcattaacatgtaagaacatgtgcctcagacacatgtgccctcctggaacagctcatgctggccccatgcctgcttccaagcttccatcaagtcagggagtggagcaaagagggaaggcagcccctgcactgtagggacccttatgcacagaggcattgagactgcctgttcctcttggaagcttctgctctcaagaggcagctaggtttttggagyttctctgcttcatgtcttgcttcccaccctagggttccagattctgttcttccctagtattggcaaggttttttatagatagctcttggatacatttggaagtaatgtttacaaatggtgagagagaaggcatctgacatttttttctaaacacatgccaatgtttgtcttttccccactaatttcaataatttggcctaacacttttgtcacatattctgactctttattctgatccatttatctactctggcatccccacatggttttaagtactggagctttactgtatgtcttggtatcaggccaagcaaaccatgttagtcttatttaaaactttctcagcaattgrtgcatatttgtttatcctgatgaatttyagaacttaccagtactgacatcttcacagcattgtatcctgtcaacaacctagtctgaacctcaatggttcaggtttcctttgcacatacaggccctgagaactcatatgttaatgagaaagacattccgggaaaccaggaggtgaggagaccaaggattaggctccactcctattatgaagatgaacagtttttagagtatcatggagttggagaaggtacttcaaggatctctatggggaacaagaaggaacagcaaagttccaccatcctgtgccctttctgttcaggtttattgttgtgaatgagaatttttttttttttaacatgttgtggatctatctatctgatcaccttattgaactgagaatggttctatggacttgacttttcttggactgacaactgtactgtctggaaatgacagtttctccttcctttcagtatttgtgcctgtctatcccacatccctgtactggtcaggatttccaggacaatagtgaataatagtcgggacaacaggctggttctgattccactgttcctaacattctaccaagaagcatgttttttttctattttggtagttttatgttaggtagccttatcaagttaggactttttttttttttaacccaagctaaagaaagtacccaaaataaagaaattttatcaggaacaggtataaattttaagaaacgtatttcaacgcctgctaaaattaccacttatttttctattatggcaacaaattacattaatagattttcactgttattgtttatcctgggagaaagcatacttgtgaacttttttaggtactgtgctttsgaaccaaatttggaagtgagatgaaatgtcagctgtactctcctggttaggtatgatttcagggtcaggtatgcctgataaatgaagtgagatgctttaactttgttctagaatagtttctactgcatgggaatgatctgttccttgaggatttgtcacagtctgcccacagtggactggatttggcatgtaggatgttaatttctatttactttgcaagaaaaatacagtttagcaagcaacagaaacatactgaacatgaacctcaccgtccctctctcagctgtagctccttctgcgtctgcaacctggcttgttcccacgacaaaggaacatcatattttttcaaatcrtttttaaaaaaatacacacatatctgaccatcttcactcagcgcctctgagaaaacaatacaaaaacagataaagaggccagcctggccaaccctgtctcaaaaaaaaaaaaaacacacacaaaaaaacaaaaacaggtacaaataatatttaaacagcracaggtggcatgtgcttaaattcactgatttaagtgcaagacctttgattaaagtcacacaattatgtgacttccacacttgggttaaataggctcccagggtccatgcatcactcaaagtccagacaagcttacatcgagactggcagggccagtaatgactactcaaaagccacaaaatcctctctaagagccatcctagggggcctgtttcagggaggtgagttcaggctctaccagaaacttcctagcctgtctcaatgtttttaagtcactcacttgaagagggaagtcctaaggaaaggaaggatagagacccaaaagaaaagcagcaacatcaactaaacatcttcctttgcagaaactggaccaggaaagtctcgtgaggagctgatcccattgcatcaagctctaattacctgatgtaacaggaagcygggggggcgtccagtctctcagcttgtggttgatacacaaggcgataagatcatcccatgggatctccatgaccgaggggcctgccccatggactggggagggactcttgctcttccacctacagtaggttctgtggagcaggttctccacctgggactggaggacaggctgtgtctggcgtgagctggggatctgggaggcgtactggacaaccatggagcacacggggagccagggggctggggagaaagtgcctcattagttacaggtttggccaaaatacaggtgaaaatgtacatgaaaacattttctcaggagaaggcaactgtgaagttgagaagtctgctttctaaacacagcagaaccacagttgttgagggggaagagcagcttgctcccagggtctaggtgagggatgcagacagtcccccttaacagtgttgctagccaagttctacccagaagttctgactgtacaggcctgtggttgtgcctaggaaatctgtattttaacaagcacccagatgagtctggtataagcagtcttagcttattttggggaaccccaacctaaccagagcaccgagggcttgtgctgagtggtttgcttccctttgggttccttcaataatgagcatgagttagacctactacagaccacacaccacaatttagaagggcgcctgaggcccaaaggggagtgtctgtgctaatgccacaacttctgccagataagcagctcattcccttctgagtgcataggaaggagcagccccatgccatactgggcttgagccagccagatggcctgtcggatctgtgtcaaaacagcccaaagacctcagccaggaacaggggcacagccagagccatagaasaaggcctctttgacaaagaaagaatgttaaatcagcactgagtgccatggctgcggcttggggacagggctacatggtccccatgctctttgccccttgtctgttctgaaaacagggaccctgtgggcaggcaggacaggatcagggttggtgttcctcccagtaccacttgtcacttttctcctgaagctgagtgaactcccatggactgccttgctggtcaggaaaggctaacagcccccactccacaaaacccagcttgttctggctcatgaacccaaaggaccaaaggaaggtgcaggcgagcacagcatggagacacacggaggtggacgtgcagccctcacactggtgcccaacacctgccagacggttactacagtgagaaggaagcctgagacttggctgcagccacccaccagacctccccaggtcaagcacgtaccccccaggggtggaaggtccatctgcggaagctggaacccgagcacagcctgcttcagccaggccaggtgctctggggcattccagtgcaggtgaggaagcagccggctgccccctgcctcagcaaactcagtgacaggccaggacaggtcacacagctgttcagaggacaccacagaagccaggaactgcagcacactgttaaacagctcaatgatggcgccaggctcctgagaagcaagaccgcccagacgcctctctcttctgtcatggaaaaagcggccactaaactcatggccaatcccgtcttcgacgtactgaatgagagtctggcagcagaggtcaagggaatgggggcagtgggaaaccagccactgcactgcttgcaaaacctgagaagaaagaagagacttggttgaacaattcacactgtttttcaaaaacagctttctgaaagggcttgatcccccaaggttgcccacagcaggtaataccagagtactgggctctcaactgtggtaggaaggggaacagaagtgtcctatgcagttgagtttagccttctagggctctggagacatgtccagtaggggcactaaagagagcccccagatcccacctggcctgaggaggagtgtgacctgcatggttgccccatggaaaggcccaggccctcaggaaaccagccctgaacatccccttcaccatgcacagaaatggagtcttctcctttttggaaggactaacagcttcactatgtgccaaggtgccttcacaccctatggttatcttacttcctatagttattttaattcctggcacctctttctctaaattgttagcaaagactccccctgccctattttttttgtttttgagaagggggtcttgctatgttggccaggctggtctcaaactcctgagctcaagcagtcctcctgcttcagcctccgagtagcagagactacaggtgygaggagccaccacgcccagcttcagacttcctttttaaaggaaacatcaaataacattatttcttcatatattcagaggacaattaccctagaaaaataacttctgtatctgaccttcagatataagacatgttcatattttaaattcatagaaacaaaaacactaaaaaattttacatgaacaatttaatttgcagatagcaggactgtgggcaaattttatcttttattttgatttctgcttatgtttttaraaagttatctgtataaaacatacaactgctgccaggcgcagtggcacaccacagtagtcccatatacttgggagactgaagtgggaagattgcatgagccctgtagtttgaggttgcagggagctatcatcatgccactatactgggtgacaataaaaccctgtctcttaagaaaaagacaatgcaaacgctaatatacactcaattcaagatacagcaaaaggggaaaaaacaaaatatcttgacagaccattaaaaatgatgaaaccttaccttagttgaaccttgtagatcattaatggtatcagggatctcggtaacagtgtaatctgaaatcagcttagctgaaaccaagtcctgtagcatcagacctttaagacagacrtagatgaaggtcacttgcattctgctgtcagcacacctgctaacatatctcactgtgctgaccccacccagtcctgcagtggacagtcaccacaggggttgctgtctcagtgattcctgaccccaacactactggaccatcctcagacccagggcctccacccatttattaaacaatgctgcttcataaacgagacttccttcacaaaccatcttctacttccttctcaacggcgtcccctcctgggctaggcacaagaaccaccagaggaagcgcaggctggaagggcttagcctgcaggagctgcttgagctgcagcaaggccgacagccagtacacgtcctcctctgccatgtcctcactcttcattttggggggaagcagcagcatgagcccactggctcccaggagktccttctgtgtctccacagcatcaatggcaccatcactgagggcgccatgggccacctgcaacagcatcaagatcatcaggagagatgcaccatgggacgcatcagcagtgactgatctgccccagagcaagtgcagccaaagctctccgtgcactaaatactgactgtactccagacaggcctccaagggcacagctgggcataccctgtagttatcttacttcctgtagttattttaattcctggcccctctttccctaaatccaattgttagcaaagactcccctcaacctttttttttttttgagaagggggtcttattatgttgcccaggctggtcttgaattgctgggctcgagcagtcctcctggttcagcctcctgagtagctgagattacaggttcgaggagccaccatgcctagcttcagacttcctttttaaagaaaacgtcaaataacattgtttcttcatatattcagaggacaatcaccctagaaaaataatttctatatctgcccttcagatataaggcatgttcatattttattttatttttatttatttattttttgagatggagtctcactctgtcrcccaggctggattgcagtggcacgatctcagctccctgcaatttctgcctcctggattcaagcaattctcctgcctcaccctccctagtagctgggattacaggtgcccaccaccacacccagctaatttttgtatttttaatggagacagggtttcaccatgttggccaggctggtctcgaactcctgacctcaagtgatcagcctgcctcggcctcccaaagtgctgggattacaggtgtgagccaccgcgcccacccatgttcatattttaaatttatagaaacaaaaatgagaataaatgcaacagaattagtgcaagaaacagccaggtcaacaggtaatttagcctccagctagaattgtgtttgaccatattactataactttaattaaccttaaacaggtataaaaaagttaaagctaggcacagtggctcatgactgtaatcccagcacttggggaggccaaggcaggagaactgtttgaggccaggagccaggaattcaagaccagcctgggcaacatagcaagaccccatctctacaaaaataaacaaaaatataagcccataataatagaaagagggaaggcaagccagcagcagatgagggattctgatacatttctagaaagcagcaaataggtgtgaccaatccctgggttagggaagcagaggatgccatacctaaaggctgcagatgtgggtgtgtaaggagtcaggttgactgagcctgcaaaagccctgtatacccaggcgctgcagacaccaggagccaaaggtgaagttcagagcctgaccctattggcggcacccaccactgcaggcaacctctatgcaaaaccagtccccctgggcccctgaacaggagtcctgagaggatccagatgcagggccatggtcaggcacagtggaagggactcagcgccaaaccactcccaaccctaccctgagaataccagcagctccccagaaagcagatggcacaagtcctttccagaaaaactgaacagtctagggaacagccatccagatccagacatttgggagtccctccaaaaagcctggcttgccatttagctaccatccaccccaccccaaacacagaacttcttggctagccttttagggcctcactcagatatagacagatagccttgggtaaggcatctgaggagggcctccwacataaaagagataaactggagtaacagagagraaaaaaaaaaaaaagaggaaccagataatacgtgaaccaaagaaaacttagaccccaaaaaccctaatttccttggaaagataagatgatgcatccaaaaaataagatgctatgaaaaagtcatgataaaaagaaagaggaaataagtaatatatatggaataaaaaattcagtaggacaattggaaaataaagtcaaggaactctttcagaacacagtaggaagagatgagattgaaaataggatagaaaataggataagaaactcagaggatcaattgatgaggcctaacatctatctaatagaagttcaagagagaacagaaaaaagacagagtgtcataaagacatgaaaatgtcccagaagtgaaataggagtctctagcctgaaaggacctgctaagccctgcacagtgagtgaagctagtccagtgccagtgtaacaaagtgaatttttaggacgccatgaacagagagaaaaggcttccacagagaaaaccaggccacacagaaaggaacaggaatggtacagcaacaatggatgctaggtgacagtggagcaaaactggaaggmaaataattttctttcttttgagacggggtcttcctctgtcaacaccggagtgcagtggtgcgatcacggctcactgcagcctcgaactcccaggttcaagcaatcttcccacctcagcttcccaagctactagaactacaggcacacaccaccatgcccagctaatttttgtattttttatagagacagggtttcamcgcgttgcccaggctggtctcgaactcctgcactcaaaacaatccgctcacttcggcctcccaaagtgctgggattacaggcataagccactatgcgcggccaggaaaataattttctacctataattttacaaacgtagctaaactatgaagcaaatgtcagaatgaaataaatgcattttctttttctttcccccagcttaaggtattttgttaataaaatcattttcataatggaaaagactcagaaaattcccctcgcatgacatataacatccaacaaggggctgaaccaagaaaaaatactgcagctgctgctaatggcaacactgagcaagcacctggccwgtgccaggcactgtcctgtgcagtctgtgtttgcactcattttatcctcaagagccagatgagcatctccaccagacagcacctgcagaggcttgggcagtttattttaccgtctctgagtaaaatagggataataagtaacagtacccatacacaggtggcagagacgctagggaacttgcccaaggtcacagagcttccaagtggaggagcagggacacatatgctcacaatgatggcactaaggcacatgttgcctggatggagaccagcccacagatgagagttccaggacagagggaacatggatggatcaagtgaagtgacagaacatttggaaaactctaccgagatatatacggccccccagtaaaattaaagagataaagagaactacattaagtgagacaataaggcaactctatttcttgcaggaaaaaaataattgtggttatagaacactactggttctgaggtgaatagcagtcacagagccatcaaaatatgaccccactcactgaagtaatacaaagtgctagtgtagctatcccgggaagacgtggaaggccgagcaaggaccatggcacaagaggccacgctgtacctagtatggtatgcagtggccaagaggacccccctgattccacctagtgttcatgcccacgtgtgatctcctgccccgtgagctgggcctagccactcacttctgacagacagaagccaacaaaagcaacaggatgtcacttctaagtttaggttataaacacactcagacttccatctaggctcacctcttgctcactctgatgaaagccagctgccatgctgtcagctggggagaggcccatgtggcaggaactgaggaagtctttggccacagcctgcaaggaagtgaatcctgacacaagctcactagagtgagctgggaagtagatacccttcagtcaagctttcagatgaggccacaatcctagccaacattttsatttccacccatgagaaaccttgagccagaagacccaagctaagctacacctggattcctgacccacagataccatgataacagacattattttaagctgctatgttaggagtaattagttatttaggaataaggtaactaatacatttatattaatgggaagtcagcagagaacatttaaatggataaactgagaaatggctgtgtaagtgtgtgatctggaaacaggagaaaaatgcagccctgaagaaaggagttaagagaggaaggaggagctactatgtctcattttaaatcacgtgggtggcattatttgacttctttttaagtacacggaagtgttactttcttaaatgaaaatgaaggtaacagcagcagtaaactaatttccagtagatgaaatgtgactttgtaatcccaggaaaagggaagaatttgcaccaagaagttactgttacctcagaatggcaagagcatggatggctcttatcatcatctttatacttcttttacatttcctcattttttaaaagttttgtgtacatattacatttaggaaatccaatatatagtattaaaacagaaaaagtaaagaagcaggctgggcttggtgcccactactcaatttgactggcttaaaaaawttttttaaacgacatgtacggacagacrtaatacttgcttctgagcctcccagtctttcaaaaccacattagggaataagcagtatttgcayggttccagtgatatctgggagtaagtgaaagtaatgaaaacacagaagtaaacacaaagtaattatagttcacctttatacacacgttaacagaaatcatctgatcccctttgctgctaagtgagttgaaaagcgaaagcgtctgaatcccaccagcatcgctggatgtgtcatccactgagccttcatctcccatgaacttgacttttaaccaatttgctagaattytacagatttaaaaaaaacaaaaaacaaaaaaaacacttgaagaatctaattctatatttgaattataaagactttcaggaaaagaagaaagaraaatatcacacagacctaggtccacaaataccacatcttactatgaagctgatctgcacaaaacaggctgttgttttaaaatggagcaacgatctgtactcgttcttttttttttttttttttttttgagccagggtctcgctctgtcgcccaagctagagtgcaatggcacaaacttggctcaccgcagcaagcaaacctgcctcagtagctgagactacaggcacgggccaccatgcccagctaatctttccattttttttgtagagtgtcactcaaagggtctcactatgttgctcatgctggcctcaaactcctgggctcaagcaatcctccctccacagcctccccagttgctgggattacaggcatgagccactgctcccggcttctacttgttcttaattgggcaggaggagggggcactccattccattagaatggaactggctcattctaatgtgacttaaaattctgaagcattaagattttcagcaatagaaaacatccctagagtttgaaatacatgttttttacagatcaaatttctcatacctgagaccttaagaattcttaagtgacatacgaacttagcaaatgagaagacagctattttaagaaatgactcaccagctgggcgtagtggctcacgcctgtaatcccagcaccttgggaggccaaggcaggtggatcgcttgagcccagtttgagaccagcctgggcaacatcacaaaaccctgtctctacaaaatatatacaaaactaagctgggcgtggtggtgtgcgcctgtaatcccagctacttgggaggctgaggcaggaaaattgcttgaacctgagaggtggaggttgcagtgaacaaagtgtaccacacgccagcctgggcgacagagtgagactccatctaaaaaaaaaaaaaagaatacaggctttctaagtgaaaaggtgttctggaattattaacagtgatggttgcaaaaccctgtgaatatatctaaaaatcactgaaatgtacactttaaatgggtgaagtttatggtatgtgaataacatttcaataaagctattttaaaaataaactgtaagccgggtgtggtggctcacgcctgtaatcccaaaactttggtagactgaagcatgcagattgcttgagcccaggagttcaagaccagcttgggcaacatagtgaaaccccatctttaaaaaaaaaacattaaccaggcatggtggcacacgcctgtagttccagctactcaggaggctgaggtgagaagatcagttgagcccaggaggtcaaggctgcggtgagctgttatcacaccactgccctctagcctgggtgacaacaaagcaagaccctgtctcaaaaaaacacaaagagactgtagttgctttaaaaatatgacttctgtatgctatgtggttacagaaaataagatcatgtcaattttttcttttttaaaatgccaaaagtttctttaaggggaaaaaaatggaactatagtaaacagactataaactatcttactgaagagtctaaaatgaagcaggtctatcaatgtaccttaacacagcttgaaataacaatcaactcttaaatgcttttggtctaagactgttgccaagtaatatggtttggatttgtgtccctacccaaatctcatgttgaactgtaatccccaatgttggaggaggggcctggtgggaagtgattgtatcatgggggtggaatccccctggctgttctcatgatagtgagctctcacgagatctggttaagtgtgtgacaactccccctcactgttctcatgatagtgagctctcacgagatctggttaagtgtgtgacaactccccttcgctgttgtcatgatagtgagctctcacgagatgtggttgtgtgacaactccccctcactgttctcatgatagtgagctctcaacaagatctggttaagtgtgtggcaactcaccctcgctgttctcatgatagtgagctctcaggagatctggttaagtgtgtggaaactcccccttgctgttctcatgaaagtgagcctcgcgagacctggttaagtgtgcagcacctcccccttgctgttctcattacagtgagctgtcacgagatctggttgtttagaagtgtgtggcacctcccactttgctgttctcatgatagtgagctctcacgagatctggttaagcatgtggcatctcccccttctctctctcttcctcctgctttggccatgtaagacatgcctccctccccttagccttccaccatgattgtgggtttcctgaggcctccccagccatgcttcctgtacagccgagccaattaaacctctttataaagtacccagtctcagatatttctttaaagcagtgtgagaacggactaatacaccaagtttatggaataaaaattgaaataatcaaatctaaagtttcaacttaaaatcatgagcaaaacagactgtaaatccaagcattaaaacataaacctacacttccgagttcccatcacacataagaggaatacccggccctggcccacaaccctgccctgcccactccacctcttggaaaccccacaggggaaaacccttcctgacctgccacaactctctggggactgctcctctacatccggcaacaccagcaccagcttccaaaacacatgctcctgcctcccagggaggtgctcagccacgagggatggcaggtccagagacgcccatgccacatcactgggaggaacagaccaccgtggattagccagtgtgtgagacccttgcaggagcagcacacacatcctatgagcaggaaggggcaggttggaggaaaatcaggttcagagattgaactgcaaactagaaaccaagtctggagctcatcgaagagacctcagttggagatgcatgaagggggctgccagtgtgacagattggggaacggggatcaccagggggtgcgcagaagggtgcagcatgacagacctcagcagctgctggtagaagtgctgaaccttcatctggtgagctgtcttgtttctgagccgccttaacctgcaaaggaaagcagaatgacagtgtccccgcaggagcttagtgagaagtactggctagtgtcccctggggaatactcaggagactgaaaaacacattttctgccaatgaaacgggttagaggattccttcattccacaaatatcatgttaagtatccactgtgtgctggctatgggagattcagcaataaacagacaaaatcctgccctttgagaacataggctctaatggggagagaacagcatctctaagtggctggcctggcatgtgtgaggtgtcggcactgtgggcaaatgctgccaggtggggctggagccaggcagggtgcgtgttgcagtctcactcagggtggtcaggtgatatgtgagcaaagacctgaaggaaacagggggagccagcgtgacaacttctggaaacagcagagggcatggctatgccaggccatagctggacctggtgtgtttggggagagcagtgagggcagcgagggaggggttgggtccacaatgcagagactcggggagcgctagggacgccgccgagaggcaacgccacctggctgagctgttggaggatccctctgttgtggtgctgaggacacgattggggcccagggtggaagctggcagacaggtgctgcagcaacattccagtgaggtggagagaactgccatgccctcggtgctgggtctgagagagatgcaagcccaggtttgtgccctaagcgcaggaggacaggacggcatcctatgagcaggaaggggcagggtggggaaaaatcaggtttagaggttgaactgccaactggaaaccaagtctggaactcagggaagaggcctcagttggagatgcatgatgggggctgtcagtgacagacaggggtgacagggctatcaccagggggtgcgcagaagggcagagggcagaggtctgggctgagggggcagggtggagggctcagacaaggagactgaggctgacaagggcagctacggaggggggacacaagaagccatgactccaggagaaggccaggtcactatgtgaaggcagccatgggtcagaggagccaggcccagccctggcctcacagcatgcctccaacaggctgggactgccaccccactgccggcgcagaacctgatggggctaaatgaaacccacaagacagttttcagagggaacatccagtgatgaccaggaggaggacaagacatgacatgaggccccagcggtgtgcctgctaggccctccaggctgcctccccagtccccacccactgggaggccagggagccctgaggccaggcaagaggtggcacctacatgggttctaaataaaggccaagcccagcatggccaggaatgcaggctgaggggggtcctggcatggccctgaggagccggttctgctcggggtaaccaggaggagtggcagggaggaccagggccacaccaaggggcctcaagagggaaataatggagggtggaggtggagtctggaagatgctgccacagaaagggggcagtgtgtgaaggagacggcgggaggaacagagggatggggcggggatgggatcggaagacacaggccagcgtggacctccggctcctccaacaaggatggaagtggcaggtacttaaactgggacgagcaggaaaagaacacgtgatgcagagtcagactcaggcaccaggacgctgagtctttcaaggtgaactcagagctctgctttgccagtggaacaagtcacatgtccacaactgtgggagacaaccttcaaaatgcaaccctgtgcctgtcctcgcctccaggcttcacctatcttcgcctccaggcttcacctatcttcaccctccaaacacacacattaattccgctcctggtaaaaccaagtgggggcaggggagccctgacgaggcaggcgacagctgatgctgacctggtgcaggagatgcccaatctccctgcatggcccaggtccaggaggcccctggccaggttctcttcagcaatggggcactctgcgctgggcgccagcgccctcagccggtcgctcacgtccacgcagcagggcgcagcagggaaagcccgcatttggcgcctcagtttcttgcgggctgtgacagcttccctccacctggggacatgaaaatgtatcatcacagagtgtcttcagggtcttcaaactgagaaacacattgcagtcagaactcaggcatggggaaggaaggacatcaaatgagtgtggtgagcaatgaaactaccgaacgttaacagttaatactgaatgagctttggaggctgacttggcaatatggatacagatttaagatacatatacccagctgggtgcagtggctcacgcctgtaatcccagcactttgggaggccaaggcgggcggactgcctgagctcaagagttcaagaccagcctgcgcaacacagtgaaacccaatctctactaaaatacaaaaaattagccgggcatggtggtgggcgactgtggtcccagctacttgggaggctgaggcaggagaatcccttgaacccaggaggtggaggttgcagtgagccgagatcacaccactgcactccagcctgggtgacacagcaaggctctgtctcaaaaaaaaaaaaaaaaaaaaaaaaagatacatatatcccttgacccacagccaccactgataggaatttatctccacacacgtgcctgtgtgcaaacgggtgagatgtctgtctgtacaacaacagtcactgcaacagtctttaccagagctaaaaagagctacgtccaggctcggtggctcacgcctgtaatcccagcactttgggaggccgaggcgggcggatcacgaggtcaggagttcgagagcagcctggccaatatggtgaaaccccatctctactaaaaataaaaaaaacaaaa

SEQ ID NO: 96478 - DNA, 151754 bp, Homo sapiens
  misc_feature (1)...(151754): n = A,T,C or G
attaaaaatacaaaattagccgggcgtgggggcacatgcctgtaatcccagctactctggaggctgaggcaggagaatcacttgaacctgagaggtggaggttgcagtgagccgagattgcgccattgccctccagcctgggaacaagagtgaaactgtctcaaaaaaaaaaaaaaaaaaaatcaccttccttgagataaccaaaataaaatagtgtgtcactataatattacaattatggacacctccatttaccttgtaagccccatggatacaccaacattacacatctgttcttgttttaagctattgataatgctgcttttccccacatttgggaaacctacaaataaatgggaaatccagatataaaaagcattatatgttggcacttatgaaattttcactgcctaattttccatttccctgatgtttagggcaagatcagagttggatctcagtgtcttcacttcaatactaagaccaattttagtttcttcatttcttgcacaagtaatgcaaaggcaggaaaatactataaattcaaacaaaccaagaacttttagaaaccagcttcctacagtaatcagtcccaacaaaaaacctgaatctggcagcagttgtgtaagtttttttctttaaattgtgtgtggttatgtgctttcagtaaggtataagcaagaagctagtatttgagtgagccttttacttgacaacaactccatacactgctgcttgggcacttggagagctggctaaacttcttaactatttcaacacttaaaaagtaaaaagtaatgaactgaaactcaccaattactccaacccgaatggctttgctgcaagtttcctgaaaacctccaagaagtttccaaaggccctctttcccaaagcagacttcacttctgaatggagcagcattcttctttgccttcacacgctaaaattccaaatagttgaattattctggcaacttacctgataaatttcaacaaaccccaagcaatcaggctccagagcccagctcttaagataactacattgcctttcagatgatctctggctgaaatcagagttggatcttgtaatttttcattcacttaaatcaagattttgtacactcatcatatttcaaccaaaatctgaaagaatcacatttcttaccactaataaaggataccttggttatcttccctttatcctttggttttgttgaggctctgaacaccactgttggcaattctttcttcaaataatttagccagctctccaaattctcctttggtaccagatctgatagcaattagaaataagacatttgcggccaggcacggtggctcacgcctgtaatcccagcactttgggaggccgagacaggcggatcacgagttcaggagatcaagaccatcctggctaacacgataaaaccccgtctctactaaaaatacaaaaaaattagctgggcgtggtggtgggcacctgtagtcccagctactcgggaggctgaggcaggagaacggcgtgaacccgggaggtggagcttgcagtgagctgagatggcgccactgcactccagcctgggtgacacagcaagcctccatctcaaaaagaaaaaaagaaaaagacatttgctccaatgtggctattttgttgagatgcatttgcaaaatctggcaactatagattttactctggtttacattttcccagtcctttcaaaaggatttaactagaaaatcagggcagggtaagctcccctaccatactgcccgtatcttaacagagctcagcatctgcacttctctatttcaattccccttgtattgctcacttgaaaacttcaggacagactcaacgtctggattacaaccctactaaccctagagctatgtttccagaatttacctttagctagcagccaattgtttcttcatttttgagacgaagtgttgttgcccaggctggagtgcagtggcacagtatcggctcactgcaacctccgcctcccgggttcaagcaattctcctgcctcagccttccgagtagctgggactacaagtgcccatcatcatgcccggctaatatttgtattttagtagagatggggtttcgccgtgttggccaggcttttctcgaactcctggcctcaagtgatgtgcccacttcagcctcccaagcagccaattgtttcttaaccccaacaacaattttagatctcattcccattttctgctttgtaattctctgttctgggttttctttttcctgctgctcaaactcagatgcataattatgcatttcatttaaatattttgtcacatacgttccaatttatttcactcttgaactaatacccgacattgtgtaggtgtggggaatttgtcacactgtcatcacttcctagatgaaatatactacacaataagctgggtatagcagcttacactctttatttaaaagatggtaaatactgaatggcaaaagaatagtagaaaccagttgagtcagttgtaaaagtcacctggctccccactgcctagcactgtctctggcaaagtgcacgtactctggctttgctgagatcagagttggatctaatcagtcttcagtgactatcagactgtttcctcgtacctcacccatgtacacagaagacaaagggtaccctctttactcacctgatttatttaatataagtaccagctttttctgtccactctggacaatggcctcttctacctgaggacatctgcaaccaagaggatctctggcatccaacacctctaggacaacatcggaggcttcaatcacctatcaaggaaaaaatgaccagaactacattatcaaggagaaaatgatcagaactacatcccttgttctggtaataccttccacaagagagtactggcattatccatttagcaacagggtgagctcagagttggatctcatgtcttcactttggtatgaagaatgttgaccctcatcatttctcacacaggaaagtaaaacataggcttgctcagcagtctctgatcaagatggatttcaaaaatgcaaatatccctgtctgaatcctcccatagtgaattatatagtttgataggtccttctggccttgccaaaagctgctgaggggcagtcaggttctatccatgggggagtgagcttgggaaaatggatgttggggatgggagtgctggagagcaactacaccaagttgtcctccttcacttaggtttcaacagagtactttagagacctttagcctgacactgcttactccaatgtacctttctcaatctcaacactatgtcaacgtttttttttaatgttgtaaatcatgcttacaggcagaaccagttttgtgcaaatatttagaaccaaagaaactatttccgtcaggtaaacatagcaggaaaggcattaaacagcataagctagagtcgagtcacgaaatgatttgttggtgaaaaggtgggaggagggagaggatcaggaaagataactaatgtcgtactaggcttaatacctgggtgatgaaataatctgtacagcaaaccccgatgacgcaagtttacccatataacaaacctgcacatgcacccttcatcttaaaaggttaaaaaaaaatgacttgagtcttttaaacctcattactactgtcagacactgacctaggctaagatacctttttaagttcttggcagtacagcttctttgaattctgtttgcccgacttggctttgttctcagttttgcaaagcccaaactcctagaggataaagggggaaataacacaaaattagaagtagagcaactgtaacctctaactccattttccacagctgagtagcagcccttgcagttgttaaataggtaagatggagtctgaactcagttgtcttcctcccaagaagctcagcagcctgtggatgtgcttttatttctgcatcagaactcatctctcagccaggcacaacagcccacacctgtaataccagaaacttcgggaggctgagttgggtggatcacttgagaccagccttggcaatatagtgaaagcccgtgtctgctaaaaaaaattagccaggcgtgatggtgtgcttctgtagtcccagctacttggagactgaggtggtaagactgcttgagcctgggtggtccaggttgcagtgagttgtgattgtgccactgcactcaggcccaagcaaaaaaaccaaaatcaaaacccctgatctctcattcataaagagacctaatcataccttttccataggttccacatttgatggcttaatatcaggattagtttcaagttttcttttcttttctagttccttctgcctgtcaagtttctgctgctgttttagttcttcaagctgtcagagccataagggaaataggtgaaccagtgactagtgttgttaccttactctgaaaaatatcacacataacacactacaccactcaatgaaaattctggctaacataacttaccctctgtttccttagctcagcttccctaagaagagcctccttaaagggagcactgtttggaactcctgggtctttcctaggcttcttgtgaccccgctttttagcctcctttcttaattttcgatgatgttctcgaacctattaaaataaagagattttgtctgcttacaaaaatatctttatacttaagcagaattcaagtgagaaaccaatctggctgcaatttagttatgcctataaaatgtcctaggaaaatggagctttaattggaatcttacaaagtaatgcatatgtaagtataaaacagcaagaaattgtaactagaaggctctctatgcagagattaacatgctgaacaaatttagagacttatcaccaaatcactgcactttctcacagctgcactcctgatgcctaagagcttgtgcccatggtcagtctatccaatgccatttcccaaaaccaaatcacattaacccagactttcccgcaaaggaacagggcaaaatcagtttagcaatgtgtttggtacagctctctcaagcactacacttacctttttttggattttataccgcttatggcaggtcatgcgtttacttgctttctttaactctacaaagaaacacatcacaaatctgttaacccaaatgattagttctgggttaacgcactatggagttatatccttttcttgtgttattggctaccaaacctaacgttaagtctaatgcgaaatgcctaatgcaaacatacgtgctactttcaaatcccagagaattaaattcagtagatccagaatggagtcaaaattccctgcacttaccctcacaatattagaatgggatcatacacaacagcgtatgagacacaaaacgacaaccacttcgtgtcaaacagcacgaatcataaggcaggagaggaacactgagtctgggaggcgattctcagctctcacctgggccagtctgcacgtggccacggaaagaaaatattgggcctcaaacctggctcagacgctgcttccttacgaaaatctagcctagtcttccccaccctctgcccggcttcgttccgcagaatgagcccgcgcggttaacatgatcgccgtagggacttccaactctcggttctaccaggaaatagggccaaggcctacgcgtaggctcccacccccataccagcagagacaaagccgtagccgtagaagagcgtcgtggtggctgcagcaacttccagacgtgggtccctccacgcccgcctcccgaccccacttactaggccttttcatattggctgtagaaggaagcacaaacacagcaacctgcctccgctggcgccacgtgtgaactgaagccactgacgagcgtcacgcacttacgctgccgccgtaaagtgcgtcaccgcctctctgcgtgcgcgggcacgcagtgtcgcgcggagcagggatcgcttggcggccgcgggactggttttgcggcggcaccgggaggggtaagggaggtgagggcggcgggtgccgaagcgacggcagcggccgcggccggaggagcaatagcagcagccgtggcggccacggggcgrggcgcggcggtcggtgaccgcggccggggctgcaggcggcggagcggctgggtaaggccgggcccagggcgggtggggccgctccccctggtcagctgccgggcctttgtgtggcccgggcgggcgggagccgcggcggaagccccgccccggccgtggggacgcgcgggtcgggccgggcgcgcggggttgggcggggcgcggcggctggcctccggatgggcccagtagccttgtcgcacctgccggcagggacaaaggcgcactacgggtcggaaactccccgcgctcctctttcccgctcgtcgcggggcagcttcaaagctgtcaacgtttccctcagtccccaataccagtgacaggtcgggaaagtccttcatttcctccgttgctcagggcctcttttttttgttgtkgtttcttgacggttcgacacaaactcttagtgattttctttccgtattttttccgggtattttaatcaatgggacttgtatttatagtagaggccagatatttcagcttctcaacaccacaaagaatccgggattttgggaactgtgtatatttcttggtttggggaagcacagttttgttattataataagttttaatttaaaggggaagaaagagttgcaaaaatatagaaaaagccctgaaaaataagtacacggtatagtggatatagaaattcttacaataattatagaagcgtatgttggggtraattgttttaattaacttactttccaacacaggattcttgacaaataattttaggtattatttttttctccatttggctatgtgcttttccccaaaaagtgcaaattggactcatgcacataaaagagtagcataatttttgctttattacttacaggtcgcccatatttgattttgagctccaaaatggaagattggaaaatatgttttgaagaggtgtttcaaattaaaacaataaagagtttatgtgtggatgaatggaagggccttgaccgctttctttggctttgggaatgtacaaaatacctcaaatgttaatatcctaccaaaattcccaagataagtaaattgtggtgtatctatatgatagattactatcaagtcatcaaacatcatgaggaagaatgttgacttggaagaaccttcactaaaacacaggctgtagaataatatatgtggtttgttaacattttggtaaaaaataataggtaactaaggcataaataccaaaaaccgaatgacaacgttaagagtggtttttttcttggaagtaggtttataggtgttttttttcctttgagtcctgttttccaagattttgttttaaacatgtattgtattgctaaatattactagaaatayaggagagggctaaagttcataaacggtcgaaatacactgtttgtctatagtaagtcgatattytcccagttgcacattattaagtattyttaactgtccactataaattattgattgttagacttttgaacttgtaactgtaatcaaggccattttaaaacttggmattgaactctggaatctgtctttcctcttcatggaaagacaaaattgctgaagggatgcttacaggcattttttttttttttttttttttttttttgagacaaggtctgactttgttgcccaggctggagttcagtaaagtgatcatggctcactgaagccttgtgctcctaggctcaagcagtcctctcacctcagcatcccaagtagctgggattactgatgtgcagcaccacacccagctaattttaatttttgtagagaaaagatcaatctatgttatccagtctggtcttgaactctctgcctcaagcggtcatcctgcctcagcctctccaagtgctgggactacagatatgagcccctgtgcctggctgaggacttttaaactatacaaataaacttttttttttgaaggkctcaagtgcactttttttttgttttttttggagacagtcttactctgtcccccagcctggagtgcagtggcgcaatcccagctcactgcaatctctgcctctctggttcaagcaattctcgtgcctcaccctctcgagtgcctgggattacaggtgcatgccaccaccttgcctagataattttttgtatttttgatagagacggggtttcaccgtgttggccaggctggtcttgaactcctgacctcaggtgatctgcccacctcagcctcctaaattgctgggattacaggcatgagccactgtgcctggccctaagtgcacttttaatacatttattaaaagataaactgagcacataacctataccaaatactatcctgtaagacaggtctacaaaaatgaatatgctgttcctgtgcctggggaacatgcagaagtgatttcactttatgttgtttttttttttttcttgagacggtctcgctctgtcacccagactggagtgcagtggtatgatctcggcttgctgcaacctctgcctcctgggttcaagcaattctcatgcttcagcctcccaagtaactgggtttacaggcatgcactgcctcagccagctaatttttttttttwttatttttttgagacagagtcttgctctgacgtccagggtggagtgcagtggtgccatctcggctcactgcaacctccgcctcccgggttcaagcgattctcctgcctcagtctcccaagtagctgggattacaggtgcgtgccaccaagcccagccaattttttttgtatttttagtggagacggggtttcaccgtgttagccaggatggtcttgatctcctgacctcaggtgatccatccgccttagcctcccaaagcgctgggattacagacatgagccaccgcacccrgctaaatttttgtatttttctttagtagagacagggtttcaccacgttggccagtctggtctcgaactccaagtgatgcactggcctcggccttccaaagtgctgggattacaggcatgacccaccactcccggcattacgttcttattttagagatgaaacagatctgagaggttacatcaactaatcagacaacatcaagctgataatcagaggtggaagacttaggactcctattctggtcttaggagcaaaggtcctgttgtttctcccaccttataacattgcccttcttgtcagactttcaaaatacattttaaaatgtgtcccatggataagaaaatacttgaaaattatccttaagttgaaactttttcttatcttaccaaagtaaattaatgattcaaggatattgggatattgtgtcatccgaacgacatacacatgctgataatgtatttttttgtcatttgattttcagtggattatttataaaagtaattttgaactcctgccaaaatggttggccctttttttttttttttttaaccttgtcaaatttttatatggtgtctccaatgcagataggacttttggaaataaatgttctttctctgaattttttttttgtgggggagggtgttttccagaccttttgctcacatgagccattcttggtttgttccagcttgccaacacttggtgtcacatgtgagcctcccacatgtattcactctccattccagctctgtgattgaactctgctcttattgactagggggcagttgggcaggcatgcctcattcctggaaytgacagtcattcctaatgtgagtaaaggggaacctcaatgagacatctttaaacatatgaaagcatttggttttaaaatggaagaactgtcaggtactgttagtgcctgagcctttgcagcagtttgtttgataggtacaagagaactgatatgcctgttttctccagttctctttatctttctttagcagttctatttgaatgttttctmtctattcgtactcatttttactccttctgacccttcttttctatttcccccttctctgccttgttcttctttttcagttttgaatatactaacactgaatcagcacttctaaagcccttccttctcccactggcttcacttggctttcagacataatgaggagactggcttttcgaggcgctggttgtgctctggtaaagctggtaaattactgattatctacaccctttcccttttctgtccttccttgactttttccttccacctttcttaaatttttgttatcctttccacaaagattccctccttatgttcatcaaattcacttgtgtctttgtcatagattgtttaaaagggattggtccttaatttatcttaatgaattgagtcctgttgatcagctttttataaaatgaacaaaaatcagcaaaacttggctaagttttggctaagccttttgacgattttaactacttttagccaacttcaaactaataatactgtataacaaaccgaagcctagagtaaggaacatcatcgtggtagattttgttttaaacaccatgtggactttagtttggaaaaagagatctgagacttctytttttccttaattgctcaccaggattttcaaatgtgattcttttgctccttctttctgtttcctggagatccccaacctttctttccatactgctggcaaccagtgttctcctgttctaatcattcagctgctggtgtcgtagtgtcctgaaattcagtgtttccatgtgccttacaattatgaggtactctagttctatgaggttcctcataattgtaaggcacatggaaaagcagatgaggtgctgactcaagaagtgaataccttggggcctctgaaccccaggcctgcctgactacctcaggggctgaaggatcaataccttcagtgttgatgagtgaaactgggatctttttttttcttttagctttagaaaaaggcctttgacgggcggatcacgaggtcaagagattgggaccatcctagccaacatggtgaaaccccgtctctactaaaaatacaaaaattagctgggtgtgatggcacacgccttagtcccagatactctggaggctgaggcaggagaatcgcttgaaactgggaggtggagggaggttgcagtgagcagagatcgtgccactgtactccagcctggtgacagagcgagactccacctaaaaaagaaagaaagaaagaaagaaaaaggcctttcaaatcacaatatactatttgatagtattgttagattgtattgcaatataagcattgcaggactttcttgggtatatactatctgtagcagatcattcagtggttgcatttcttgtgttgtaaatagagttatagttaaaattgttatagttaaatagagtacgtgttatagttagagtatgtcatatcactaaaaggtgattagtttgaattaacagaagagtttcaaaggatagtttgtacctctgtctaggtatagcaagtctcattaagtgttttccagggatatgtcttgtggatcctgttttaatgaatggagaacattcattttcagggttttaattttagagtacatctaaagtgctagaaggttaattgtcctctgtccccttacctttttgcactactcatttgtcctgggctctgcttcttgctcttttccacatgatggcccacctagcaaatgatcataattgtaaggcacatagagaagcagatgaggtgctgactccagaggtggataccttggggcctctgtaccccaggcctgcctgactgcctcatgggctgaaggcttaataccttcagcacactaatgtactgctacatataggttgggaaactctaggccaaatttggagccagaagttgagtcattcaagattgctgatatacaaatgaatatgcttttgttgaatttgtcccatcaaaattggaagtatagcattctggtaagtgaaagactaaaacaaggaagtccagggcttaaaaaaaaaaaaaaacttatagctagttaaactacaacacgttaaaatatcctcytaagtgagccaggagtttggtagcaggtgtccagctgaagacttggtgacagagtctatttaaatgtaagaacatggctgattatttcttatagaagaagttggattccatgggttccaagagaagaagagctacctccccttccagcagtgtcagcggggactttgatgatgggcaccattctgtgtcaacaccaggcccaagcaggaaaaggaggagactttccaatcttccaactgtagatcctgtgagtaacttggattacatggtttctgcctgctcttcccacaattcccctatcttccctttaatggtaaaattgttacgatgcaaggcatctccacttttttaagattctcttgattaatagtcttttcttttatgaacattatgtattcagctaagtcttagagtaatagtgtgatcttatgaataatttcagtatgttacatcatatattaattcagcaaataactgtgtgactatcatgtgacaagcactgttctcatggttgggatatagccatgtggaaacaagcccatttttcacatggaacttagattccaggcgggggaagtagaatgtaaacaagtaaacgaataaagaataatgtatccttagctagtaataagtgctaagaagaaaattttgggtgatttgggctgttttggcctgaattcgctggaagagagttccagacagaaccagtgcagaggggttgggtcagggatgagttttgtgtgtcttggttacagagcaggggatggtcaggaaggagaaggaaactggcaagctccacccattcagagtatgtagggcccacacaagcaatgtttggagtttagattttattctctgtgaagtgataaacccttctgtcagatggctttaagcaagagagtgataaactgatttagtttcaaagaagaaaacccttcaattggatgactttaagcaagaaagtgatgaactgatatagtttagaagacaaaatcaccaggagcataaatctgatgaaagataccaaaaagttagtcaactcagttgtttgaaaggagacatattgtcagcatatttcagactttagcatgtttggtaatattgagagtcatcatttttcttctctacttgccttttattgaagagtagaaaataattcttatgtctacactggctttctgttcacttttttagtgatttttttctcctttgctaatgtgtagattgccgtgtgccatgaactctataataccatccgagactataaggatgaacagggcagacttctctgtgagctcttcattagggcaccaaagcgaaggtgagttcgaagcacatcagtacagttgcgggggatttggtccagagtccatgtgtattaaagtgtttggaaattgagctttttgttggcaggaatggcttaaatgatactggggtccaattttagtctttagtctttagtaatcaagctgtagtgaagctttttttaaattaaaaatctgttgagccaggcacagtaacatgcacctataatcccagctacttgattttttgagccaggcacaggagcatgcacttgtaatcccagctacatgggagactaaggcaagagaattgcttgatccaaggagtatgacaccagcctgggcaacataatgagaccccgtctcttaaaaacaaaaacaaaaaaaatgacctatgcggaaagatctcttgaggccaagaatttgagaccagcctgggcaacatagtgagacccatctctacaaaaaattttttgaaaaattagccaggtgtggtggtgctcacctatagacccagctactagggaggctggggtggtaggattgtttgagcctgggaatttgaggctgcagtaagccatgagtgtcactgcactccaacctgggtgatggagcaagagcttgcctaaaaataaatatttaaaaaagagtactgaccaggcacagtggctcacgcctgtaatcccaccactttgggaggtctataggtgggcaaatcacctgaggccaggagttcgagaccagcctggccaacatggcaaaaccctgtctctactaaaaaatacaaaaattagccaggtgcaaggctgggcgcaatggctcattcctgtaatcctagcactttgggaggcgaaggcgggtggatcagctgaggtcagcagtttgagaccagcctggccaacgtggtgaaaccccgtctctactaaaaatacaaaaattagccaggcttggtggtgggcgcctgtaatcccagctacttgggagactgaggcaggagaatcrcttgaacccgggaggtggaggttgcagtgagccgagatcgtaccgttgcactccagccytggtgacaagagtgaaactccatctcaaaaaaaaaaaaaaaaaaaaagccgagcatggtggtggggcgcctgtaatcccagctacttgggaggctgaggcaggagaattgcttgaacctgggaggcagaggttgcagtgagctgagatcccgccactgtattccagcctgggtgatagagccattctgtaggttgccttttcattttgtacggtgtccttagatgtacaaaaggttttaattttcatgaagtttatgttgtctttttctcttgttgcctgtgcctttggtgtcatatccatgaaattaatgccaaatccaatatcatgaagcttttcccctatgtttttgtattaatcagggttctcttggacaggactaggctgcaaattttccaaacttttatgctctgcttcccttataaaactgaatgccttaaacagtacccaactcacctcttgaatgctttgctgcttagaagtttcttctgccagataccctaaatcatctttctcaagttcaaacttccacagatctctagagcaggggcgaaatgccccagtctctttgctaaaacataacaaaagtcacctttactccaattcccagcaagttcctcatctccatctgagaccacctcagcctggaccttattgtccgtattgttatcaggcttttggtcaaagccattcaagtctctaggaagttccaaactcccacattttcctgtcttcttctgagccctccaaactgttgcatcctctgcctgttatccagttccaaagtcgcttccacattttcgggtatcttttcagcagcgcccaactctactggtaycaatttactgtatcagttggttttcacactgctgataaagacatacccgagactgggaagaaaaagaggtttaactgaacttacagttccatatggctggggaggcctcagaatcatggtgggaggtgaaaggcacttcttacatcagtggcaagagaaaaataagcaagaagcaaaagtgggaacccctaataaacccatcagatctcatgcaacttaatcactatcacgagaatagcacgggaaagactggcctccatgattcagttacctccctctgggtccctcccacaacatgtgggaattctaggagataacaattcaagctgagatttgaatggggatacagccaaactgtattggttttcctctaagagttttatagttttagctcttacatttaggcctttgatccattttgaatttttataagtagtgtttaggtaaggatcccgcttcattcattttttttttttttttttttttgagacggagtctcgctctgtcgcccaggctggagtgcagtggcgggatctcggctcactgcaagctccgcctcccgggttcacgccattctcccgcctcagcctcccaagtagctgggactacaggcgcccgccactacgcccggctaattttttgtatttttagtagagacggggtttcaccattttagccgggatggtctcgatctcctgacctcgtgatccgcccgcctcggcctcccaaagtgctgggattacaggcgtgagccaccgcgcccggcccccgcttcattctttatatgtgtgtatccagttttcccggtatcgtttgttgaaaagactgtgcttttctcattgaatggttttggcgcctttgtcaaaatttgcttgaccgtgtatgtgagggtcgtttctaggctccattctattccattggtccctgtgtctgtttttataccagtagcacacattttgattactgtgaacaacatattcagtggcaaaatacttaaagcttttcctctaagatcacgaacaagacagagatgcccactttcaccacttcaacaccttgttcactgtggaataaatcccacctggttatggtatataatccttttaatatcctgctgaattcagtttgctaatattttattgagaaattttgcatcagtattcataagggatattgatcagtagttttcttgtagtatctttgtctggctttggtatcagagtaatgctagcttcatagaataagttaggacgtgacctcgcctcttcaattttttggaaaagtttcataaggcttggtgtgttagttcttgaaatgtctggttagaattcatcagtgaagctatcagtctagggatkttctttgtgggagattttttattactgattcagtctccttactagttataggtttactcaggctttgtatgtctttagtaggttgtgtgtttctaggaaattatccatttcttctagtttatctaatttgttggcatacatgttttcctagaactctcataatcctttttatttttgtggcattggttgtaatgtctcctctttatgattttagttatttgcatctcttttctcccttacttcttccctccctccctcctcctttctgtctttttttgagacaggatcttgctttggcacccaggctggagtgcagtggcaatcacagttcagtgcagactcaacctcccggactcaagcagtcctctcacctgatgctaccatacctggctaatatatatgttatatatacgtgtgtatgtatatagtaaacacataaaatatatatattgtatatataacgtattttttatttatatatgtaaaaatatgctggattcttacctaacgctacatacataytaaaaaataacgtatgtaatgttaggtaaggagatatatgtgtgtgtgtgtgtgtatatatatatatatatatatatatwtttttttttttttggtagagacagggtttccctgtgttgcccaggctggtctcaaactcctgggctcaagtgatcctcctaccttggcctcccgaagtgctaggatcacaagtgtgagccaccacacccagcctctctctctcttttttttttttttttttgagatggagtttcgcaccaggctggagtgcagtggtgcgatctcgattgtggctcaccacaacctcygtttcccaggttcaagcgattctcctgccccagcttcccgagtagctgggattacaggcatgggccaccacgcccagctaattttgtatttttagtagagacagggtttctctatgttggtcaggctggtctcaaactccygaccttaggtgatccgcctaccttggccttccaaagtgctggcattacaggcgtgagccaccgtgctcagctctttctttcttagttaatctagctaagtgtttaccaattttgttgatcttttaaaaaaaccaactgtttaatttttaaaattgtttttctattctctaatttcgtttatctgcattctatatatatatctatatatatatwtwttttttgagacagtgtcttgctctgttgcccaggctggagtgcagtggcgtgatcatggcttattgcagcctctgccttccaggttcaagtgattcttatgcttcagcctcccaagtagctgggattacaggcgtgtgccaccatgcctggctaatttttgtatttttagtagagatagggtttcactttgttgcccaggctggtcttaaactcttgacctcaagtgatctgtccacctcatcctcccaaagtgctgggattataggcatgaactactgcactggccctcctttctatttattatctactgctagctttgggtttagtttgctcttcttttctctaattccttgagaaagaagctttttttttttttttttttttgagatggagtcccactctgttgcccaggctggagtgcagtggcacagtcttggctcactgcaacttccacctcctgggttcaagcaattgtcctgcctcagcctcccgagtagctgggattacaggcatacaccactatgcctggctaattttttttgtacttttagtagagacggagttttgccatattggccaggcaggtctcgaactcctgacctcaggtgatccacccgcctcagcctcccaaagtgctgggattacaggcatgagccactgcacctggccgagagtgaagcatgttttttaaattatttaatttttttgtttcattttgttttttaacacctggttcacataggcagtataaaaattaatagnnnnnnnnnnnnnnnnnnnnnnnnnnnnnnnnnnataggcgggtggatcacttgaggtcaggagttcgagaccagcctggccaacatagtgaaaccctgtctctactaaaaatgcaaaaattagccgggcgtggtggtgggtgcctgtaatcccagccacttgggaggctgaggtgggagaattgcttgaacccgggaggcggaggttgcagtgagctgagattgcaccattgcactccagcctggacaataagagcaaaactccgtctcaaaaaaattaaaaattaataaaaaaaattaatagctcttaagactgtattgaagttgtcacagtgatagttaaaagggatcagttttttaaattacacagagaggcatcttgcacacaacttcctatggaaggtatgttcccctaactagaacatctttcctctcttgctgtcaaaatataatcactattctcttcaaaactctggcaattggccaggcgtggtggctcatgcctgtaatcccaacactttgggaggccgagacaggtggatcacctgagtgcaggagttcgagacmagcctgaccaacatggagaaagcccatctctactaaaaatacaaaattagccgggcgtggtggtgtgcacctataatctcagctactcgggaggctgaggcaggagaatcacttgaacccaggaggcagaggttgcagtgtgcggagataacgctgttgcactccagcctgggcaacaagagtgaaactctgactcaaaaaaaaaaaaaaaaaaaagccaaaaaaaaacctctggaaattgaagttatttgttctgaaaacgtatatgagtgtgttagtcagaaaactggtgcccaaatatttccacattctaatccctgaaacctgtgaatatattgtgttacatggcagaggggaattaagtttgctaatcagctgatcttgaattggagcggttatcctggattatccatgtgggtccagtgtaatcacaagggtccttaaatggggaagagggagacaagttcagtcagagatttgaagatgctgtagtgctggctttgaagatggaggaaggagactacaagccaagggatgcaggtgagctctagaagctgaaaaaggcaaggaaacctttttcgctagatgctccgtactagaacatccagacggcatgcagccctgctaataccttgattttagaccagtgagacccattttggacttctgacctctagaactaatataataaatgggttttgttttaagccctgaagtttgtggtaatttgttacagcagctgtagaaagctgtgagttaactaaagatttagattcattcatgattgttgatgctacagtgggtagttaccaagctctaagttgaactggaggcaaatttctcacctcaacgagcaagccactgagaatgcagtgtcatcatcctgaattaggagagccctgtaaattagcaaattagccatggccaaaaaggaagcattgtttttaaaatgaggtaactgtctccatatttgagttggtttatcaataatagtcttctgaaagttgtcatttaattagcataaagtagtaaaagcatgtatttattgtttgccacattctagacacaataccaagcattttcccaatcatatcttatttaaaattctgagttatcacagtttataggtgagaacttgcacaagttcttgtaactactaaaagataactggtgttcagactaaagtcgttctgactccaaagcctgtgctcttaaccattatgtggtatagagtagcagcatcacactgaagtatacaaaacaacttttatagaagataccgtccctctgctgcctcctttttgctggcaggcgagtgctgaggggcagaggatacacaccttgggtgctggaccactgtcatgttacaacctcgaagataatggtgccttttttctgacgctcctctgtggaatgtatgtktttttctcaagtatttatgagaattagtattgctcagagctacacaatttgtgaatatctttttgatactttgtttcagttactgtattagtctgctttgtgctaggacatgcaaatcaacaatggctgaaacaaaagagaaatttatttctcttgtgtaaaagtcctgttctgtgaagttgtcaaggtacaagtattagccaactctattctgcggtctttgtggtatcacccttgcctgcatggtctgagatgactcactaccacaactgccttccagccagtatggaaaaagaatgaatgttaaggacatgacttggatatgacacacttcagctctcgtattggctagaatctagctgcagtgaggctggagaataaatatggtctttaaggttttgttttgctttgttttccttagagacgaggttttaccatgtcacataggctggaatgcaggctactcaccagcaccatctttgcacactacagccttgacctcctgggctcaagcagtcctccctcagcctcccaagtagctgggactacaggcatgcaacaccatgctggctgagaatatagtctttagtagccatgcagcagcttagaatgctgtcatcctgggaagaagggaaaatggggtagggagtagccggcaggctgtctgcacaccagggctagtgtttctcattattctgattaaaactttgcattttggttattttgcagccatatgccagactgccctcatctattgttgaaagagaaaagttgttttgaaagaacatacaatataatcctgtttatgttaaatttggtttgtgtgtacatgtgcctatagagaagtctggaagaatgtctataaaaatgcaaatggtgctatttattctggattataaggatgattcttacttttgatggttttctgtatgtttgatttcagaaaaaattagtactgttagaaattagaagtatttcattttgaaatggggggaccctgttttgaccatatgacatagagtgagaggttgggatcctgatttttcttttgtctttgtggtaattctaaaaatgtttgtgaggaaccttgtagcagtgattctgggggatagtgtcctttctaggcacatgttctcattgaattctcaattgtctacagatagtccccttagcttgagacactgctggggtcctgcctcagcaaggagcactggactgtgggtcctgtaggcccagatggagaggaccatcttggatattaagttatcaragccctaatgtgtgctgtgagaaggttccttgataccactgacaacatcagtattctttctgctttttctctgatttctcaatattctgatttttttggttgaaaagagttcccatataagtggacctgcacagttcagtggtcaactgtactgtattaacattcacttcctggttttgatggttgagttgtggtccttatttgtgagaaacaaacactaaattatcaggcgtgatggggcatcatgtcagagcttattcaaatggttcagaaaaaaagtactatttttgcaacttttatgtcagaatacaaatttaaaaataatttaaatatattatacgtaataaaagaatggctataacctgtcagctaaggttccaagagagatttaagccttaatcgccatgatgttatttrtaataacttatctcttacacatctagaatggggctgaatacctacccctgtgggagaattgagaaaatagtcacatcgtttttcagtaggtttacttgtctcctggaacttcatttgaagaaagccagaaaaaatactaaacatccatgaaccctaaacccaagaagttattttgggaacttaagaaattgtcattaaaattacttaaggaattaaagaaggaaattacttaattattttaagaaattttgtcattataattacctacaaagtttcttgtgtgttcctcactacccctctcctgcaaggtataaccactaagccaaattttgtatttcttagtcccatggttttttttttccgaagagtttggttgtgtttagatgtatctgatgtccattcatctttgttaagctacgtaagccaagggctcatcttcctcccttgtaattttagtaattgctattgtagcagcatttatgataggcatttgatagtacttggcagaaaaaatttatgtggtcacttactgaagaaagaatctgttttgtaagtttataaagagtattgagacatatctctgttttcacacttttgagcactatgaaaggtaagtcatcttcatttataaaggataccattgacatgggtttagcgttggtgccctaaacattaaacagttagcatataaaagaccatcacaggtgttaatttaggtttttatatcattaacgtatgttttgaaaagggaatgagtgtgcatcttgcttttctttttctttttttgcagatttttttcttttttttttttttttaagtaagcttcaaagtccatgaaagattctaatatgctctgtcacttggaatgttgaacattaccataaatagttttgaaataaaactttttgtaagcttcagattaatctcctttaaaaaaatttaaattataacagaaatcaaccagactattatgaagtggtttctcagcccattgacttgatgaaaatccaacagaaactaaaaatggaagagtatgatgatgttaatttgctgactgctgacttccagcttctttttaacaatgcaaagtcctattataaggtaagaaattatgaaatttggaaagataccaattggaagataccaatttgataattggcttcttaatatttataaacctggcaggtgagtagtagtttctttttgtggcttgagttcgcatttgtcttattcgtaaagagactggacattcatatgatttttatttcttatttatttacgtattttaatttattatcttttgagacagggtcttgctctgttacacgggctggagtgcagtggtgagatcttggctcatggcagcctccgcctcccaggttcaagcaatcctcccacctcacccttctgagtagctggcactataggcacgtgccaccatgcccagctaatttttgcatgttttgtagagaccagggtttcaccatgttgcccaggctggtcttgaactcctgggctcaagcaatctgcctgccttggcctcccaaagtgcagggattatgggcgtgagccactgtgcccaacccacattcatgtgattatgaactattcttatttctctgtctgctcaaatcttttgcccatttttytcttggtttgttagtcattttcatatttctggaatttttttttctttttttttttagagacagagtctccctatgttactcaggctggtctcaaactcctggcctcaagtgatcctcctgcctcagcctcatgagtagctgggactacagacatgagccaccactcctggctttagaaatttttttttttttttttttttttgaggcaaagtctattgcccaggctagagtgcagtggcacgatctcagctcactgcaacctcttcttcccaggttcaagtgattctcctgcttcagcctcctgagtagctgggattacaggtgcccaccaccatgcctggctaatttttgtatttttagtggagatggggtttcaccatgttggccaggctagtcttgaactcctgacctcaagtgatccacccaccttggcctcccaaagtgctgggacaacaggcgtgagcgaccatgcctggccatagaaattttttaattattgtggatagtaaaccttttttgattatatgtgtttcagtttttttattttttttatttgattttgtgtgtttcaaatatcttctcccactgtgtgcatatcttttcacctttcatggtattttttgatgaacagaaatgttttattttagtttaatcaaatttatcaatctttaaattgggtttatttgtatcttgtttcagagattcctcttgcccaagatattcttctattagtatgcttttcttaaagttttatagttttgtctttcatataagcctttaatgcagctaggattgatttttgtcttttataaggtaggaataaatgcagctgggattgatttttgtcttttataaggtaggaatcaatttttttcccacaggtataaccaacactattctctctgcgtttgttcgcaatcgttgctgtcatcatttccatgtattcatggatctgtttctgtccttttattctgttccacrggccagtttatctgttactaggccgttctatttctatcttaattactttggctttataatttttttttttttttttgagacacgatctcctttgttgcccaggctggagtgcagtggtgtgatcttggctcactacagcccttgtctcctgggctcaagcaatcttcccaccttagcctcctgattagctgggactacaggtgcgcaccatcacacatggctaattttttgtatttttgatagagacgggatttcaccgtgttgcccaggctagtcttgaactcctgggctcaagcgattgacccgcctcggtctcccaagtgctgggattacaggcatgaaccaccatgcccagcttgctttatacttctttttctggttagaaagtaggttaattatacttgaccctttgccatttcttttttttttttgagatggagtctcgctctgttgcccaggctggagtgcagtggcgcgatctcggctcactgcaagctctgccttccaggttcacgccattctcctgcctcagcctcccgagtagctgggattataggcacccaccatcatgcctggctaatttttgtatttttacgtggttttgccatgttggccaggctggtcctgaactcctgacctcaggtgatctgcctgcctcggcctcccaaaagtgctaggattacaggcgtgagccaccatgcctggccttatttttaagagatgaggtctcattaagttgccgaggccagaatcaaactcctggacttaagcagtcatcccacctcagcctaccaggtagctaggactgcaggtacacaccaccttgctcagtttattttactcttcagtgcattttgttatttttttctctatgccttcttttgatttcatttttttcaaaacttttttcctcttattacctctaaaatttggaaattgtaacatctatagataatcttttagttcttatctaagaagttttaatatgcataattaacttattcaaagccagaagctaatcaggatcttaatcctccaaacaatacgaagactttagaataattcaactctgatcactcttttccttatttataatgctggtgctgtgtactttagttcttttgtggcaatttttgaatctgatagaacagtggtccccaagctttttggcaccagggaccagttttgcggaagacaattcttccatggacagcagtggatgtagggggcagggtcaggatgaaactcttccttctcatgtcatcaggcattagattcttataaggagctcacagcctagatctcttgcatgctcagttcacaatagggttcacactcctatgagaatctaatgccactgctgatgtgacaggaggagctcaggcgataatgctgtcttgcctgctgctcacctcctgctgtgcggcccagttccaaacaggccatggactggtagttgttcgtgggctgggggttggggacccctgccataaaatactattcagccaggcatgatggctcatgcctataatcccagcgctttgggaggttgaggcaggaggattgcttgaagccaagagtgtgaaaccagcctaggcagtgtactaagaccccacctctacaaaaaaaaaaaaaattgttttaattggctgagcatggtgacgtgcaccagtagtcccagctacttgaggggctgaggtggaaggatcatttgagcccaagagttcaaggccgtaatgtgctatgatcatgccactgcacttcagcctgggcaacagtgagatcctgtctttaaaaacaataataataataatattgatttgtggagtcagtaccattcattattactactttctttattcttcattccattttgctattgagaagtcatccrccagtatgattgtagttcctttaaaggttatctgtcttttcttttctggctgtctttagtatccttttctcttttgtattttgtagtttcattgtgatatatttagatgtggatatctttatagaatttgcgagtagtaatgcttcataaatcttagattggtgtttctcatcatctttggaaagtttttagccatgtctttgcattttgcctttgccctgttcttgtagtaactctgattgggtgtcatattagacttcccacaggtctccatttctcttaacttttcatatttcctgcttttgtgtctgtgtttcctttttttttctttttttttttgtgatagagtctggctctgatgcccaggctggagtgcagtggtgtgatcttggctcactgcttcctctgcctcctgggttgaagcgattctcctgcctcagcccctgagtagctgggattacaggcgcctgccaccatgcccggctaatttttgtattttagtagagacagggtttcaccacgttggccaggctggacttgaactcccgacctcaggtgatccactcgcctcagcctcccaaagtgctgggattacaggcgtgagccaccgcgcccagcgtctgtgttgctttttagataatctttttttttttttttttttcagttctttcarttttcttggtgaaatctcttaaattagttaaatataaatttagtatttgcattttaatttttctacatataggaagtagcgtcttttttaragtctgtaggactttgctcattgttttcaaactcattgtttctttaaactttttatttatttatttatttttttaaagagagaaagtcttgctctgtcacccaggctggagtgcactggctattcacaggcacagttgtagctcactgcagccttaaactcctgggcttaagttatcctcctgcctcagccacctaagtagctaggactacaggtgtgcgccaccgtgcccaacttttttttttttttttgagacggagtctggctttgtcacccaggctggagttcagtggcgctatctcggcttactgcaagctccgcctccccggttcacgccattctcctgcctcagcctcccaagtagctgggactacaggcacccaccaccacacccagctaatttttttgtattttcagtagagatgaggtttcactgtgttagccaggatggtcttaatcttctgaccccatgatccccctgcttcagcctcccaaagtggtgggattacaggcgtgagccaccacgcctggccaccatgcccaacttttaaacatttttaacacacctgttttttattctatggtagattattctgataatctaattatttgaattccaatatctaatacatatatttgttgtcactgtcatttttgctagctttctcgtgattctttgattcttatgtgcctcatgatttttttactatggactcaatatttcttggaactttatctgtagagatcattggagcattaaattgaagttggtttcatccagaaatgatttgtttcttgtccaggatgactggcctgtctttgttaaggctaactttacgatgaagagttctcagagattcatttcatgcctctcctctcctctcagtgccatggtttgagataggcatgaatttagataggtagaggttgagatgggcagtcgtccttgctccctggcagtacagaaactgatttgagttcccactaatggtgcagccatggcctttggattcccagcttctggtagaccctgacctttgtcttccctcctcgctgcccagagaagccttggaaatgaaagcttggttttatcataaataaatgccctcaaagtgaacatttgacttaagtgttgtgggttttcatctggtttcctacttttattcctttaattttgtgaacatccttacttcctattggcatcccatgtatgcatttttaaagttttattttattttttgaacrttgcatccaacgttgtttttactagaagatttcagtcaagagtttattatgcccactatacttcatgagcagacattttgaaacaaggtattaaagaatttcaaaccacaagtattaataacatcagaaccgtcattagcttctatcctttaaatcaaatcttatcctttaagttgtctttcttagtgtattagtaataattagtttttttgggttttttggtgtttttttttttttttttaagacagagtcttgctctgtcaccaggctggagtgcagtggckcaatctcggctcactgcaacctctgcctctctggttcaagtgattctcctgcctcagcctcccaagtagctgggaccacaggtgcgtaccaccacgcccagctaatttttgtatttttagtagagacggggtttcaccatgttggccaggatggtctcgatctcttgacctcatgatccacctgccttggcctcccaaagtgctgggattacaggcatgagccactgtgcccggtcataattacttttaatttagcaaatcatttgtcttctgcctcaagtctttctttaatgagataagacctaaataatttgatttcagaatgtctttaaaacatacacttaattttttggaagcgggatttggacccatatatgttttaatcatgaggatgttaaaatttgtaacaatttttggtctttgctgaaacaggtgctttaaaagtagcaactaatttccaatacattactaaagtgtttttttttttctctttgctaacatacagccagattctcctgaatataaagccgcttgcaaactctgggatttgtaccttcgaacaagaaatgagtttgttcagaaaggagaagcagatgacgaagatgatgatgaagatgggcaagacaatcagggcacagtgactgaaggagtaagtgtgtagctggaacttgtgatggatgggctcttggaaggcagagagggcccctgcttgtgattccctctgggctgttgtgggcaactagaattcctgtgcaattgtattggtaactgggaggataaaaggacattcagccagagagccccactccatttttaagggatcctaggatatcctggacaacgtgtgccatgtgtggtaattttcatgaattgtacttacattaatgcatatttcctgctcagttttaaagagaatcttgatattatcaaggattagtccagtattgctacattgagacatcatgtaaggaaaggcagtgttgtgattagaagttggaatgtaatcaccttagtgaggaatatttctgtaggttagaatagttactgttcctagaacctcccaggtgtgtttctgcctctggaattttgcagttgttcttctgcatagaaagtgcttcctttgacttttcccgtgactggctcttttktattgttctaacaccatctaaaatggtgtctactgagacaggactttcctgaccaccctatctccattgtttgctccgccttcctccttttcagcccctaccccaccctgtcatcacagggttgtcttcagtttttataatgtcactatatgtgaaataacatactagtttacatgtttttctctctttccccaagtagaatgatagctcctaagcaggtatctttttgttcatttattcctcatatctgcactatacctgacatgtaggtgctgataaatatttactaaataaagacacatgcttcatggccaggcgaggtggctcacacctgtaatcccagcactttgggaggccaaggcgggaggatcacttgaggttaggagttcaagaacagcctgaccaacatggtaaaaccctgtctctaccaaaaatacaaaaattagctaggcaggtggcacatgcctgtaatcccagctactctggaggctgaggcaggataatcgcttgaacccaggaggtggagggtgcagtgagccgagatggcgccactgtactccagactgggygacagaatgagactccatctcaaaaaaaaatgaaagacagaaaataaaaagacatgtttgaaaagagaaaaaagaatagtagaggggatcacaactcttttctacagctaaattgtgagaagcacattgcagaatattcccctttcttctgtaacttatctacataggccttttgctggaatacagagaagcagtgatgggtgaatttctcaaaaatacaattacttcttagagtctcaaaatacagttcctagtcaggtgctgtggctcacccctgtaatcccagcactttgggaggccaaggcaggcagatcacctgaggtcaggagtttgagaccagcctggccaacatggtgaaaccccatttctactaaaaatacaaaaattagctgggcatggtggtgggcacctgtaatccctgctactcgggaggctgaggcaggagaatcgcttgaacccgggaggcagaggttgcaatgagctgagatcatgccactgtactctagcctgggtcttagaatgagactctgtctaaaaaaaatatagatagatagatagatagatatacacaaaatatatatacacacatatacatgtagttcatatattttatatgtataaaattttatattttatatatgatatgtaaatatatgtatatagttcctcagcagcttgtcagtttctttaagtagttaagtgattggaactaaatagaaggctaaaaataggaatttcctggaattttactctctaatatgaatacaggagaagcagcccatgctttcttcggtagaacactgcttgcagaggccccacccttagtgtaggccttcagggctctagtcaaaagattaaaatgcctgtatttaggacttgcccatacttctgtaacgcataattgatgagaaattgggagggtcttgtacattcacatttatacctcccaagcctctttcaaattttgtttttttgagacagtgtcttgctctttggcccaggctggagtgcaatggcacgatcacagctcactgcaacctccacctcttgggttcaaacgattcttctgcctcagcctcctgagtagctgcgattgcagatgcctgtcaccacaccagctaatttttgtatttttagtataagtgaggtttcaccatgttggccagactggtctcgaactcttgacctcaggtgatcctcccacttcaccttcccaaagtgcttgggattacaggcatgagccaccatgccagaccccaagactctttataactcaatgattctcatggagggagaagaaattttcaggtttctaatttttaaatcaaggatgattttcttgggtctggtgcggtggctcacgcctgcaatcccaacactttaggaagctgagactggaggatcacttgagcccaagtgtttgagaccagcctgggcaatgtagtgagacgcccatgtctacaaaaagtaaaaaaattagccaagcatggtggtacacatctgtggtcccagctacttgaaaaactgatgtgggaggattgcttgagccctggagttagaggctgcagtgagccatggtcacaccacttcactccaacctgggcaacagagtggggaggaaaaaaaagtgttgcaccttaaaattgagactatactaaataaaaagagcttctgttggattaggacacaataccagtacttttatgatttaaacsagaaaaaaaattactctttattttatatgtacaaaaaatgatttggactagaagcataatttaatccttgactgagacattccattgcttattctagaaacttgcttcagacttggaccctccctggtcaagtactctttggggcatatacttcctatgttgaaacagtgactaagctaggtataaaccagtgggtctaaagaacagaaatggtgtacattgatgtacttaatcgctgtttagttttgacttaatttgaattcagttagacttggtagagcaccccgtggttaaaagtatgtagtcccaactctatgtaagtagtcattgtcctgtaagtagtcattgtcctgtaagacttcaatagatgtgaacagcagatatagaaatgaactattatgggacatgctttctcctgctcagttgctcatttcacatttgtagcacttaaactttgccattgcaatatttactgtagaaaaaggttcagtagaaggacctagtacaagggatttcattgcaaaaataatataaggcacctcattaggttcatataggttgttctagggatacaatgcctatgtccagcatcagaacattatggggtattcttgaaatttggagttaaaataagtactgcktagragttgctttctttggccaggcacagtggctcatgcctgtaatcccagcactttgagaggccgaagtgggcagacatgaggtgaggagttcgagaccagcctggccaacatagtgaaaccccgtctctactaaaaaaataaaatttagctgggcctggtggcgcatgcctataatcccagctactcgggaggctgaggcaggagaattacttaaasccaggaggtggaggttgcagtgagctgaaattgtgccactgtactccagcctctccatctcaaaaaaaaaaaaaaaagttgctgttttgaattagctctacaattttagaagctatgtaatattcagcattttattatttctcttavaaagtacttttttctccacattaccagtcttctccagcttacttgaaggagatcctggagcagcttcttgaagccatagttgtagctacaaatccatcaggacgtctcattagcgaactttttcagaaactgccttctaaagtggtaagtgatgcagttaaaaacaggtacatgtcagtgttttgtttttagtacttcaagaattgtattaattactgataaataaagtaagttyaaaaggaagatgttgggccgggtgtggtggctcatgcctgtaatcccagcactttgggaggccgaggcaggtggatcatctgaggttgggagttcgagaccatcccgatcaacatggagaaaccccatctctactaaaaatacaaaaaattagctgggtgtggtggcgcatgcctataatcccagctactcgggagggtgaggtaggagaattgcttgaaccctggaggcagaggttgcagtgggtgagccaagattgcgccattgcactccagcctgggcaacaagagcgaaactccgtctcaaatttaaaaaaaaaaaaagaaaaggaagatgttgggccaggcgcagtggctcacgcctgtaatcccagcactttgggaggccaagacaggcagatcacctgaggtcaggagtttgagaccagcctggccaatgtggtgaaaacccatccctagtaaaagtataaaatctaccctggtgtgatggtgtgtgcctgtaatcccacctactcgggaggctgaggcaggagaattgcttgaacctgggaggtggaagttacagtgagctgacatcatgccgttgcactccagcctgggtgacagagcaagagtccatctcaaaaaataaataaataaaaggaagatgttggaggcccccaagagatcctcctcacagcagcacaaaatgtatacggtctatcattttacatgatcagaaggttatgattttatttttttatttttacgttttttgttttttgattggtaattatttttatttgtttcttattgtggtaaaggatatgtatcataaaatttatcattttagccatttttaagtgtacagttctgtggcattaagtacattcacatttttatgcaaccatcaccactatctggaactttttagtcttacaaaaccaaaactccatacccattaaacaccaagtccactcccctcttctcccagcttctggcagccaccattctgctttctgtctatgaatttgactattctaggtacgtcatagaagaagaatcattcaatatttgtcctgtgactgcttatttcacttagcatatgttcaggattcatctatattgtagcctgaatcagaatttcattcctttttagaaccgaatagcattttgttatttctatataataccttttgtttataagttttttggggtgttttgttttgtttagagatagagtcttgctgtgttgcctaggctgacctcaaacttctgggctcaagcgattctcccacctcagcctcccaagtagctgggtatacaggcttgtgccaccgtgccttactacattttgtttactcattcatctgtcaatggacattgggttgtttccaagattggtaattcttcattgataaaataagcactttaactaaatcttttttatttatttattaattgttgagacggagtctcgttctgtcacccaggctgaagtgcaatggygtgatcttggctcactgcaacctccgcctcccgagttcaagcgattgtcctgcctcagcctcccaagtagctgggattacaggcatgcaccaccacacctggctaatttttgtattttttagtagagacaagctttcaccatgttggccaggctgatcttaaactcctgacctcaagtgatgcacctgcctcagcctcccagagtgctgggattacagacatgagctactacacccggcctaaaccttgcatttttaagagtggaaactttctctttgtgtaggggacagggtaagaggaagataaatgagttcttcctccttttaattctctttgatctcctggtgatgctgaaaaaagaaaaacgaattaggtactcttctgcctgaaaaaagaagaggttttctagacaagcaagacctttaaaaagtatcagaattctttatgcctttacacccaaaagataattaacatatagatttgactcacattagcctatgaaactgcaaacattttcatggcctcagcattctcatatttctaggtaaggatatactttcagaagtactccatggtagcacttagccctattgtgatcatttacttttctgtctgccttcttttctactccctgaatttcttgaggacagtgactgtgctgtaatttacctttgtattactgtctataactggaacccgatccgaaggattggatgactttggattactttgtaccccatgctgggtggtcatagatatgcaagatgcttgttgactgatgagtagcatgcagctttcctcatcagtcattggcaagactatagttatttaaaggtgtgtcttgactagctataggatagttacaacattagaaataaagcaactgaccactgctgtcctatgtgtgaatcttactagaaagatgtaattattaatattggtcatatgacttaaaactttaagaaaaggagaaaacagtatgatgattctctagagaattaaacatggaattaccatatgatccagcagttccactttagatatatactccaaagaaagtgaaagcagggtattgaagagatatttgtatacccatattcatagcagcattattcacaatagctaaaaatggaagcaactcaggtgtccatcagtgaatgaatgtatatgtgacatatacatacagtggcatattatttggcgttaaaaaggaaggaaattctgaaacatcctacatggatgaactctaaagacattattttaagcaaaatgagccagtcacaaaaggacaaatactgtatgatttcttatatgaggtacctagaatactcaaaatcttagagacataaagttagaatggtggttgccaggggctggagggaatggggagttgtttaatatgtacagagtttccattttgcaagattaaaaagttctggaggtggatgtcagtgatagttgcacagcagtgtgagtgtacctcatgccacagaactgtacacttaaaaatggcaaatttcatgttactacatgaaatttattttattacagtaaaaaaaattataaaagaagtacaggataggtgtagtgacccacacctgtaatcccagagctttgagaggccaacatagctgagactctgtctctacaaaaaaaatttttttaattagctagtcatggtggtgtgcacctgtagtcacagctgtttggtggggctgagtttggaggatcacttgagcctaggagttcaaggccgcagtgagctgtgatcatgccacttcactccaacctaggcaacagaaagagaccccgtctctttttctctctctcgctctctgtcaactctcattcacacatgcacacatacacacaaaatagaagtactgtcttcgctcaagatttattcttaccctgcaggagataatcagtgatggtcaaatcaacaacagtgatatggggcaatgaaacatcaataattagttccccccattcccccttcaaggtcaccttgaaggagctggttgggaaaagcaggtttctattggtctctcagggtgtgacagtttgaaagacaacaaggattgacagctgaaggggcaggacagttttcacctttccttagtaagtccgtcccaagcaagctggctgcatgggagagatagattgggaatttgtgggattggatgactttgaattactttgtactccatgctgggtggccttgccataatttgtcctctgaactttctctcagaagtagaactggtgaagagaaggggcagcaatggagattcatccaagtaaaggaaggagtagggttaagaaagtagtggtaagcttaggggacagatgagataaaacaacactgagataatctgttcagcccagtaactgagtgaaggctgtggctttctgcttttgttgttgctgcgtgggcttcagtagggtttgaacaggtgggaagagttgggagagcacaatctgacttcccctgaacctctcccatctgataagaccaacttttgatatttgggcaacttcagttatttcctccaaggaagaaaatctgtaggaaagcctgagtgcagtgagtgattctaggttgttgtgaaagcttcaaggacattcctcaacatgttcaatttcttgggatgacctagtatttgataaatcagaagttgctaataattttgcttcatttcttttcttttttcaagacagtcttgctctgtcacccaggctggagtgcagtggcgtgatctcagcccactgcaacctctgcctcccaggttcaagcgattctcctgcctcagcctcctgagtagctggaattacaggcacccgccaccacacccagctaatttttgtatttttagtagagacggggtttcaccrtattggccaggctggtcttgaactcctgacctcgtgatctgcccgtctcggcctccygaagtgcagggattacaggcatgagccaccatgcctgaccagaattttgcttcatttctttctttctttttttttttttgagacagaattctgctcttcttgcccaggctggagtgcartggmgcaatctcagctcactgcaacctccacctcccaggttcaagcgattctcctgcctcagcctcccaagtagctgggattacatgcatgcaccaacataccaggctaattttgaatttttagtagagatggggtttcaccatgttggccaggctagtctcgaactcctgacttcaggtgatccacccacctcagcctcccaaagtgctgggattacaggcgcgagccaccatgcccagccgtgcttcatttctttaacaaagtttcattcaaaaggtattttgttttgaaaaaacttactttgactgaaataagcagaagcatcaagttaaacatgaagctaacaaattttgcaacctgacttcttacagatccttatgaaagtttatgtgaatattatataataacgttatttagattgcaaaattaaaagagcttgtaacaaactcctaaagagcatttcttctactttatttctaggcatagatatcttgggaccttaaatgaaaaattgtataattctgtgaatttagaatttttgtttgttttttgagacggaatcttgctctgttgcacaggctggagtacaatggcgtgatctcggctcactgcaacctccatctcctgcgctcaagtgattgccctgccttagcctcctgagtagctgggattacaggygcacaccaccatgcctggctaatttttgtatttttaatggagacagggtttcgctatgttggccaggttggtcttgaacttctgacctcaagtgatccagctgcctcagcatcccgaagtgctgggattacaggtgtgagccaccgcgccttgccgaatttagattatttwttttttttttgagatggagtcttgctgtgccgcccaggctggagtgcagtggcatgatctcggctcgctgcaacctctgcctcttgggttcaagcgattctcctccctcagcctccagagtagctgggactatagttgtatgccaccatgcccagccaattttttttctatttttagtagagacagggtttcaccacgttagccaggatggtctcaatctcctgacctcgtgaaccacccgcctcggcctcccaaagttctgggattacaggtgtgagccaccgtgccctgcctagaatttttttttttttttttgagacgaagtctctttcttgtcccccaggctggagtataatggcacgatctcagctcactgcaatctctgcctcccaggttcaagcgatcctcttgcctcagcctcctgagtagctgggattacaggtgcctgccaccacgcccggctaatttttgtatttttagtagagatggggtttcaccatgttggccaggctggtcttgaactcctgacctcaggtgatccacctgcctcggcctcccaaagtgctgggattgcaggcgtgagctaccgcacccggccccagcctagaattttttaaaacattaaattktatgctagttgcataataacactcaaaataccaagttttaactcctaagtcatgctgttggatagatcatgaagcttcttaagattaaattctttatggttctgatataataaatgtgctgtacagccatgtctttagtcttgaatctcacaaagctgcttcactggttgtttgaacaacagattgtcaatgtacttccttctcttttcattagctgaatagtttaacttattgagcatgcctggttttttgtcttccagcaatatccagattattatgcaataattaaggagcctatagatctcaagaccattgcccagaggatacaggtatgaagatgaccataagtaaatgattgtggtttagagcagattggcctatgatctttcctagaagcttttagaaaacagagaagctagttgtctctgtaaggggttattagcaaatcatgtaaataaattaaaatagtgttactgattgtagctttggattgcatcttaggacaaaaattaaaacacattggttaccgacatttctgattataaaagatacatttgtgacaaaagatttatttcatttttaatttttaaattttttatttttgtgggtgcatagcaggtgtatgtatttatggggtacatgaaattttgatactggcatacagtgcataataatcacatcasggtagayggggtaacctgttgtttatttttatctgcttccaaatagctttaggatacgttagaataaaagctacccacaacggatgttagagtggaagstcagtggaattagatactacttttttctctttggccctctctaccctaccccttcactgtrtccctggcagtaaatagtggcaactaaacactcacatagacttgctatgtacctagcactgttttaagtgctttatgtgtattagctaattaattcttaaaactccacagagtagtattgttattattcccattttacaagttagaaaactgaagcacagaagtgttaagtaacttgcccaaatcaccgcctaggaaggagaactaggatttgaatccagacagtctagctgtagtctgtgttctcaacccttacacttactgtttctgtacagagtaggtgcttaataaatattaattgtgtgactgagtgactaggatttaaaatttgattattagaagtaagggaaagtatagggaaaaagagctaaattgtaccagaaattgagtatttagagtagaactgatatggttgtttttctagctctactacttaatcagctatgtcactttggtcaggtgatttgcctgcttcctctgctgtatgttgcgtgtagtatcactactttgcagagtcatagaggttggtgataatatagataaagcatctcacatagaacctacagcatgaggtcctcataaatgtgagttactgatcttcccaggataagaagggtttgctgctcccaggaggtaaggcaaaaaggaaaacagtgtgttacatagtttcattgagaaatgagactgatagccactgtggtttgccaggaaggagaaacttctttgactttaaactctaagagagtagtaaagagtaacagtgtttacttactagtaccacagataaattttcacagaatgataaaatacagattccctaatgtatcatctttttttttttttagggttttttttttttttttttttgagacagtcttgccctgtcacccaggctggagtgcagtggcatgatctcacctcactgcaaacctccacctcttggactcaagtcattctcctgcctcagcctcccgagtagctgggattataggcgcctgccaccaaacctggctgatttttgtatttttaatagagacagggtttcaccatgttggccaggctgatctcgaactcctgacttcaagtgatccacccgccttggcctcccaaagtgcatagagattataggtgtgagccaccctgccaggcctcatcaggtttttaaatcagcccaataactgttactgagaatgactcaagtctcctaaatccctggaatttctaacatctgtgtaggaggattatgttttcataatcctggaaattgaatcagatctttaatcatctctatctcagccccagtcttctctttttgacttctcgccttattttgtcctttcttctttmcaaaagtctcagagtcaccttttgccatcaccckattcaaggtccttgtcctcttatgtccaaattactggaataatctattttacctctctgatgaaaaactttctagtcctttctgtgtcttggctcctgaccttggctttcttcctgccagtcccgtgctcagagacttaattcacttgttttccaatgcctgctaaagcatgtcacaactccttgtaccagttgaataaaaccaactctgactaatttaagtggaaaaggaatttttgaaaagcatattggatagctcatagaaatgttgagaagaaaggttgaggaactagcctttggatactaggcagaactcakgaacatcatggcacagctgagatcatgcacagcctctttgtggtgccattgctgttaccactgtaatttgccactgtggtccctggatacttgctgctctactgctagactctcctcctctacaggagtcaggaatgaattcctggccattgcattaatccctttagacccaagcatgaattagctgacctgtggttatttccccttgccctggctgccaggctgctggcaaagtgaccatttgcccacttacatcctcattatgggaggtagagccctcccgatgcctgtgctgattccctccgtgtaagaaggatgcgtagttgttggtagtcccacgaggcaaatagctacactcctttgcctggctctctggattctgcctcttttgtttttaccctctctgtgcttatggctctacccttctccaccttccatttcgctcagtttggtttccttactctctctagaccatgtctttttcatttccatgtacttaccattagtcatgtgtgcctcttacctaaaagtgtgtccgtctttcatttccttcgtaaatttaggcaactatatgagtattcctgggttgttttggattgaktgagccttaagatatgacagctctagcacacagtaggtactcagaaaatgttagcctctgtgctggactgatttcatattttaccccaagtggttcatgtaactagggggagttttgcttcacactattaaatccactttaaagaattagtattcatgaagcacttagaactgtgcttggcacatagtaagcactatgtgtttgtaaaataaaacttctaccttatttgactttttaaaaattgtaatttatttttatgagaataatgcagctctggttttgttacctatctcaaaaacttacttataaatgggtacagtaataatttataaaaaagaaaatgactttacatgttgttcwtatgtgtactttccaataaagtcttggaatatggtgacaatttagaaatatgtggggttctttttttaaaggttgtactgatgaactctcattaaaaggaactgctatattttgttgtttattgtagaatggaagctacaaaagtattcatgcaatggccaaagatatagatctcctcgcaaaaaatgccaaaacttataatgagcctggctctcaagtattcaaggttagttttgttgttgttgttgttgttgttttccttggtaatagtagataatttaaggtcagtaatttttataaaacaactttattgagatataattcacataccatggactttacccattaaaagtgtttaatttaggctgggcgcagtggctyacgcctgtaatcccggcactttgtgaagcctaggtgggtggatcacgaggtcaggcgttccagaccagcctggccaacatagtgaaaccccatctttactaaaaatacaaaaattagctgggcgtggtggcaggcgcctgtaatcccagccaatcgggaggctgaggtaggagagtcggttgaatccgggaggcagaggttgcagtgagctgagattgcactccagcccgggcgacagtgcaagactctgtctcaaaaagaaaaaaaaaaagtatttaatgtaatggtttttattatattcatggagttgggcagccatcactccagtcaattaacagtcgccctttatgtccccccaacttctctagccctaagcaacctcaaatctattttcagtctctgtgtttgcctgttgccattttacacaaatggaatcgtataatatgtgatatggattttttgcgactagattccttcagttagcgtaatgttttcagggtttatccattttgtagcatgtgtcagtactatgttctttttattgcggaataatattctactatagggatatacactgtattttatttacccattcatcagttgatagatatttggatagtttctacttattggctattataaataatgctgttgtgaatgttcacatatacgtttttatgtggacatataaatactacatatatatatatatatatatatatatatattttttttttttttttttttttttttttctctttgatacatacctaggaatggaatkgcggggccatgtgtggtaactgtatatttaactttctgaagaaccgccaaactgttttccaaactctaccattttacattcccaccagcaatatccaggtgttgccatttctccacttcctcaccaacacttgttttccatttttgtttttgttcttattatggatatcctagggagtgtgcagtggtatggcattgtggttttgattgacatctccctaatgattagtgatgcagaacatctttttattttattctttattttgatttttaggtcattcatacgtctttagagaaatgttcagatcatttgcccattttttaattgtgttactgtttttttgttgttgagttgtaagagttctttatatgttctggatattatacccttatcatgtaaatggtttgcaaatattttctcccattctcttgtcttttcacttttgtgattgtgtctgttgacacacagaagtttttcattttgaagttcactttatctatttttttctttggttgctaatgcttaagtgtcatatcaaataaatcattccctaatccaaaatcacaaagatttacacctatgttttcttgtaaraagtttatagtttagctcttaacgtacttagatctttgatccagtttgaagtaatttttatatatgtgaggtacatgtaaggtaggagtccaaattcattctttgatatgagatattatcccagcactatatatagaaaagattattctttccccattsmattgtmttgaattgtcttggcaactttgttagaaatcaattgaccatagatgtatgggtttatttctagattcttggttctattccactcacctaaatttctgtccttatgccagacttggttagttttgaatccattttttagttaaatattgacttattccctgcatttaaacttcataaatataaaaagcaatctgtgtagtgcagtacacaatgtaaaatgactgtttcattgctttgcaaattccatcttagaagttttatggttctgtaatgaataattgcttgtagaaatttattgaattaatcgtgtatcattgggaatttgccaaaggagactcagaaaatcttttgggaataaaatcatttaaattttctgaatgctgactcaaatactcaaaattgctgttggtatttaatgataacttttatttttcatcttttaagaaattctgagagaaaatcaggaatgaactatgaagtccttgtattcctagtccctaataggacattttaataatatacagtactaattgtttgttgttacagttaagaattttacttttgggtctaattattttttctaactaagttttaaagagaagggaaacttaagcaagtacattcattctaaacttgtgtatataatctttaatcttagaagtgcatctgtattttgatttttaggtcagcgtacacaagtagagttagttgtccgtagtccctcaccttatctgcggttttgctttcgtatggttctgaggtcagaaaatattaaatggaaaattccagaaataagcacttcataagtttaaattgcacaccattctgagtattgtgatgaaattcatgccatccacttctgtcctatctggtctcacctgggacatgaatcattcctttgttcagtctatccacactatatacaccacctgccgttagtcactgtgtagccatctcggttatcagctcgactgctgtggtatcacagtgcttatgttcaagtaaccttattttacttaataatggccccaaaacacaagagttgtgatgctggcaattcaagaagctttaaagtgctccctttaagtgaaaaggtgaaagttcttgacttaagaaaggaaaaaaaaaaaaaaaaggtatgctgagattgctaagatctacagtaagaacaaatctcccagctgggcactctggtttaggcctgtaatcccagcactttgagaggccaaggcaggaggatcacttgaagataggggtttgagaccagcccggtctacatggtaagactctgtctccaccaaaaaaaaaaaagaaagaaagaaaaaaagatgaatctgctattcatgaaattgtaaagaaggaaaaaaaagaagtttctgctagttttattgttgcacctcagactgcaaaaagttacagccacagtgcatgaaaagtgcttcattaatatggaaaaggaattacatttgtggatggaagacatagacagaaatgtgttccaggtttggcaatgttcaaggtttcaggcatccactgggggtcttggaatgtatcctccacggacagtggggcattactgtattataccattagatctttgtctaaatattacttgactaatcatgaaagaactaggaggcattttaacttatatttaattagtgacaactttatgaagatagatattttggaagcttgtagaaatgttggaggatgcagctttgtgggtattgaatggaagtctgctccaagtagaaagagtgccatagaaggtgcccattgcatgagttgggggcattaagctgtccttttatctgttccttttttaaaccaagtaattttatcttgacaggatgcaaattcaattaaaaaaatattttatatgaaaaaggctgaaattgaacatcatgaaatggctaagtcaagtcttcgaatgaggtaggtttaagaaaatgtctaggctgggcgtggtggctcatgcctgtaatctcagcactttgggaggctgaggtgggcggatcacgaggtcaagagatygagaccatcctggccaacatggtgaaaccccatctctactaaaaatacaaaaattagccgggcgtggtggcatatgcctgtagtcacagstacttgggaggctgaggcaggagaattgcttgaaccygggaggcagaggttacagtgagctgagaccgcaccactgcactccagcctggtaacagagcgagactcggtctcaaaaaaaaaagaaaatgtctaaaacccttaatgcctttatatttgctgagttttctaggtagtgaaatcaataaacattaacacggtttatgttgcatttcaaggtgatacttacagttgatattataattctgaagatagtagtaactgttagcacctttgctgctgaagggcttcatttaactagaaacattttttaaaactttacatcactatatactttgtacaaatattattgctttgtacaaatatgaatatacatatataatatatggtatatattaatattacacagaatagataatagtatggtatttatatataatattagtagtatgtattcatatttttggtaaggctatttagcaggtatcaggagatccagtctcatcctggcttttccttgtactaggactgtgattttttttttttgagacagagtctcactctgttgcccaarctggattgcagtggcacaatctcggcccactgcaacctccacctcccaggttcaagcaattcttttgccttagcctcccaagtagctgggacttcaggcacacaccaccatgcccggctaatctttttgtatttttagtagagacagggtttcactatgttggccaggctggtcttgaactcctgaccttgtgatccacccgcctcggcctcccaaagtgctgggattacaggcgtgagccactgcgcccggccaggactgtgatcttgaactagtcttagttctaggattgcatttctccctacctgaaatgggaaggttgggtgactactttcaaagctttcctctggccttgacattgtttcagtaccaggtcctctggtcactgcagtgaccaaaagctctctaggaccagccctggtctgttcttccccgcagagtccccagggcctgaagcagagtctgctgcatagtagaagtttagaagtattttagcatttctatttagaagagaagaaaatggttgtgtgtgtgtttgtttacccagcactctaatttcagctaccaagtttctaagctttttatcttatctctggataggactccatccaacttggctgcagccagactgacaggtccttcacacagtaaaggcagccttggtgaagagagaaatcccactagcaagtattaccggtgagaaaaagagtgtttagtctgagagttgacctgtgcttataaagataggcatactagtatttgcccaatggctatcttgaaggaatatttttgggtatagtttggttgttaatgagaatctgttgtcaaatggtttatttaaaaggttgagttactagggtgggcacagtggctcacgcctgtaatcccagcactttgggaggctgatacgggtgaatcacttgagatcaggtgttccagaccagcctggccaacatggtgaaactccatctatactaaaaactacaaaaattagctgggtgtggtggcgggtgcctgtaatcccagctacttgggaggctgaggcaggagaatcgcttgaactcgggaggcggagtttgcagtgagccgacatcgtggcacagcactccagccagggcaacagagggaaactccatctcaaaaaaaaaaaaaaaattgaattactaacgtaggccttatatcacctctcagacgatgcttaagcattgtttctcaggcaggcagtgtttaatattagctaccaataaaatgtgaggttaaatactaataggttttttaaattcataatagaattttttgtttgtttggtttttggttttttttttttttttttgagacgaagtttgctctcgttgcccaggctggagtgcagtggcacaatctctgcaacctctgcctcctggattcaagtgattcgcctgcctcagcctcccgaatagctgggattacaggtgcctactaccacacccggctaattttttgtatttttagtagagatggggtttcaccatgttggccaggctggtctcaaactcctgacctcaggtgttccacctgcctcggcctcccaaagtgctgggattacaggcatgagccaccacgcccagcctcataatagaatttgtattgtaaaatatgaacatcttagaagataattatcagcaactgtgactgagtccttattttccactccctcttttctaagaggaaaaaaatagtttcctcggctaagattgattatgagaaccattaagtacagagataaackaaggaggcaattgaatagaaattatttttctttcatcttaacactttgttaatagttcctgttccctgtaaagtaacctaattattataacatccttccctgtctaattgctttttttttttttrtagtaataaaagagcagtacaaggaggtcgtttatcagcaattacaatggcacttcaatatggctcagaaagtgaagaagatgctgctttagctggtaggcattaggttttgactagcgaaatgccttcttagtggatccttctagctaaatgaaattgcagtgattttttctggcctagggtttgctggtttgggaagtacatgctattttattgcatttgattgtactctggtagtcagacctatcaaaaggttaatgctttatcttgtcttaaaactcatatttgggtaaataatacttctgcaaaaataattgataacttagcagatcctggtttaaaacctataatgataaatagtgagtactagtaaaagcatcagaaaatctcagaaatccacattcatcttagattttcaggctttagcttatattttcagtatgctctaatttcttcttggcttgtctttctcttaagtttgatataatattttcccctttactatagatttttttatgtgtaaagataaaatttgtttcattaaattattctggtatattcttttctttctttcttttttttttctttttttttttttttttgagatggagtctcgctctgttgcccaggctggagtgcagtggtgtgaccttagctcactgcaacgtccgcctgccgggttcaagtgattctcctgcctcagcctcctgagtaactgggactacagacacgcgccaccacacctggctaatttttgtgtttttactagagacggggttttaccayattggccaggctggtcttgaacttctgtcctcatgatccacctgcctcggcctccgaatgtgctgggattacaccacgcctggcctcaattttattattgaatgttacacaacagacttctccagttgtatcttgtttttaactaaatctcctatagaaatttcataatcactataggctattatgtataaatttacttttttgaaacattgatctacagaatkaagtatttttttatttaaattgggcctggtcttatcagaaattgaaaaartattatcttcttgttagcattgttttttactgattataaaagtgacacacggccgggcatagtggctcacacctgtgatctcagcactttgggaggctgaggggggtggatcacttgaggtcaggagttcaagaccagcctggccaacatggtgaaaccgtgtctctactaaaaatacaaaaaattggccaggtatggtggagcgcacctgtagtctcagctactcggaaggcttaggaagatcacttgaaccgaggaagtggagactgcagtaaaccgagatcacaccactgtactccagcctgggcaacagagcaagactctgtcttggggggaaraaaaagaggttatatggctggttacaagagacacatcaaatataaaaacataagaaagttgaatctaaaaggatggataagaccaggtgtggtgactcacacccataatcccagcactttgggargcctaggtgggaggattgcttgagcccagaagttcaagaccagcctgggcaacatggcaaaacgctgtctctacaaaaaatacaaaatttattcaggcgtgttggtgcatgcctgtattcccagctacttgggaggctgagatgggaggatcctgagcccagggaggttgagcctgaagtgatcacaccactccactccagcctgggcaacagagtgagaccctgtctcaaaaaataaatamaaaataaaaataataaaattgggcttttgtcttgaaaaaaagaaaaggatggctaaaagatacaccaggcgaataataaccagagtagctacactgacttttgataagatggactttcaaacagagatcattacacagataaaaaggattgcctaatgatggtagaaggttaatttcatcagcaagttaaattgtagaagagctcaaaatatgtaaaacaagcagatgaaactttacagagaaattcaaaacactacccttagtctggaagccctcttctctcaagagctaaacagaaaacgaatgaagatagagatttgaacacacttcttcatgtaagtatttgtttcctattgctgctgacacagtaccacatacttagtggcttaaaacaatgcaggctggtacactggctcacgcctcttatcccagcacttttagaggctgaggcaggagcatcacttgagtccagaagtttgagaccagcctgctcgacatagaaacaccctgcctctacaaaaaaaaaaaaaaaaatttttaaggcagggtctccctctgtcacccaggctggagcagtggcgtgatcttggctccctacaacctccactcctgggctcaagcagtcctcccacctcagcctccctagtagctgggaccacaggtacttgccaccacacccagctaattctacaagaaaaatttaaaaaataagccatatgtagctactccagaggcggagttgggaggatcacttgagcctgggaggttgaggctacaatgagtcgtgatcccaccactgcactccagccctgcctccaaaaaaaaaaagaaaagaaaggaaacctttaacaggaaagatcaataaaatcaaaagttattctgttaaaacccttaataaaaataagtctgaggtgagattgtcaaaaaggcataaataaacaatattggcggggaggagagcatacagagttttaaaaaagaatgtgtgaataaggccaggcttggtggctcacgcctgtaatcccggcacttttggagcctgaggtgggcagatcacctgacgttgggagttcgagaccatcctggccaacatggagaaactttctctgtctctactataaatacatatagtggcacatgcctgcaatcccaggtacttgggaggctgaggcagaagaattgcttgaacccgggaggcggaggttgctgtgagccaagattgtgccattgcactccagcctggacaacaagagcaaaactttgtcccccgcccccccccccaaaaaaaaatgtgaataacgttatgcaaatatatttaaaaatttagatgaccagatttctagaaaataagcacctaaaatggattcaagaataaaaaggctggctcacacctgtaatcccaacactttgggaggcagaggcaggaggatcacttgagtccaggagttcaagaccagcctgggcaacatagcgagacctcatctctgcaaaaagaaaaagaaaaattagccgggcgtggtgtggtgcatgtctgtagtcctrcctacttggtaggctaaggcaggaggattgcctgagcccaggagttcaagtttgccgtaagctatgattattccactacactctagccttggcaacagaacgagactctgtctcttaaaaaaagagagaatacgaggtcaggaatttgagaccagcctgaccaacatggtgaatccccgtctctactaaaaatagaaaaattagccaggcrtggtggtgcacgcctgtaatcccagctgctcaggaggctgaggcaggagaattgcttgaacccaggaggcggaggttgcagtgagctgagatcacgccatcgcaccccagccttggtgacagagcgagactccgtctcaaaaaaaaaaaaaaagaataaaatgaaatattcccacttagaaaataccaggccaaacatttaaggaacagaattttaaataaactcatgcagagaatagaaaaagagctccgcagttcattctgtgaatctaacataacctgtgaatctaatataacctagacatcaaaactgcacaaaatataagcacactgtctagcagtgtgtataaaagatagtatataaggacacagttggatttaggattagaaaagataaaagtaatctttaccacagtaacaaattataagagtaaaatcatatgatttgctcagcagatgcatttgataattgtttcagttcccattcaagataaaaattatttgctaactagtaagagagggggatattgatataaagtrtctcctttttttcttttttcttttctcttgagacggagtttcgctgttgttgcccaggctggagtgcaatggcgcaatccccgctcatggcaacctctgcctcccaggttcaagtgattctcctgcctcagcctccgggtagctaggattataggagcccgtcaccatgcccggctaattttttttttttttttttttttttgtatttttagtagagacatggttttgccatgttggccaggctgatctcgaactcctggcctcaaatgatccgcccgcctcagcctcccaaagtgctaggattacaagcatgagctactgcgcccagccttctttttttcttgagactgggttttactgtgtcacccaggctggagtgcagtggcgtgatctcagctcactgcaacctccacctccgaggctcaagcaatctttccacatcagcctctggcgtagctgggaccacaggcacatgccaccacacccagcaaattttttatatttgtgatagagatggagtttcatcattttgcccatactggtctcaaacgcctgagctcaggcaggctacccacctctgcctctcgaattgttggggttacatgtgtgagccacagtgcccaccaagggtatctccatttttaatggagaaaaggtaacagcatttcccttaccaacagaaacaaggtaatactgttacctttgttggtcacagtactagccagcctacagtgacaacaataaggtgtaaggatcagaaaagatgtataaggattacagttgacagtttttttaaaagatgccgcttacagtagcaacaaaatatatacctaggtgtaaatccaactgcaggctctttaggggagagatcagaggtattagagtcagaaaagactaktttcaaattcttatctgcttctagctccatgactctggttcctaatccccttcaactgctttatgtggtggctgaacttgtgcaagtaattaacctcatatgcccagttttcccatttgaaaaagaaataatacccatcttgtgtgttggttttaggattacctgaggctggtacttatcaagctcttaacacataattaaattcttttttttttttttaaggcggagtctcactctgtcgcccaggcaggattacaagtgtgagtcactgcgcctggcctaattaaattctttttttttttttttttttttttttttttggagacagagtttcactcttttgcccaggctggagtacagtggtgtaatccctgcttactacaatctccgccttctggtttcaagtgattctcctgcctcagcctcccgagtagctgggattacagtcacctgccaccacacccggctaattttttttatttttagtagagacggggtttcatcatgttggccaggctggtcttgaactactgacctcatgatttgcccgccttggcctcccaaagtgctgggattacaggcatgagccaccgtgcccagcctaaattcttaataaatgattatggttcttacctgagagtacatagcaactatatgtttattctgatccatcaagaaaaatttaaattatggtccttacacactgtttaggagtttggggaaatgagcaacatattttttatttttataaaaataattacgttttgtttgctttggtgtttttatgatttgcttctacctaaaaattccctcagcaagggaatagtcctgggggatgttttaaatcagtgggcaaagtcacagagatttaaggctaaatcatgtctgatagaatcagcccaatctaggctgggcgtggtggctcacgcctgtaatcccagcactttgggaggccgaggcgggcagatcacgaggtcaggagatcgagaccatcctggctaatatggtgaaaccccatctctactgaaaaatccaaaaattagctgggtgtgatggtgtgcacctgtcttcttagctactcgggagactgatctgggagaactgcttgagtcccagaggcagagactgcagggagccaagatcgcacccttgcactccagcctgggtgacaaagccagaccctgtctcaaaaataatagtaataatagttttcaaatatatttagttcaatctggaaggttgttaaatgaactttaaagtatggttctttcttcatctcattcgtccctttataaatactttttttgtctttccagctgcacgctatgaagagggagagtcagaagcagaaagcatcacttcctttatggaygtttcaaatcctttttatcagctttatgacacagttaggagttgtcggaataaccaagggcagctaatagctgaacctttttaccatttgccttcaaagaaaaaataccctgattattaccagcaaattaaaatgccyatatcactacaacagatccggtaagatgtcttctacattattcagtataattttattttgttgtggctgagcctgcacataatgtatttcttcctaaaatggataaggatattaaaggtaaaaatggtgtttttttttaacctcaaattttaactgttcattacctttttttttttttttttttttgagacggagtctcagtctgttgccagactggagtgcagtggcgtgatctcggctcactgcaacctccgcctcctgggttcaggtgattctcttgcctcagcctcctgagtagctgggactacaggtgcgcaccaccacacccagttaatttttgtatttctattagagactgggtttcaccactttggccaggatggtctcgatctcctgacctcatgatctgcccacctcggcctcccaaagtgctgggattacaggtgtgagcctctgtacccagccttaactgttcattatcttataactgagcaaagtacgaaaatctttcagcctacmtcttttattaatattttaattatgacagttaatctgtatttaagttatgtatctatagttgaaaccccaggataagcatagtcagttcctggagaattcattaaccgcaaccataccagaaagatgattcatcttgttctcttttttctatttagaaaatgttaaagtgatcattgggctaccagacagaatacttaaatcacaatagtgtcattaaaaatagtaggacgtctcaaccacaaaaaaaaacccaattcagaaatgggcaaaggtcttgaatggacctttctccaaggaaaatatacagctggctaataagcacatgaaaaggtgctcagcatcactaattattaggaaaatgcagttcagaacttttgtgtgataccactttgcactcattaggatggttactttaaaaaagtaataataataattattggtgtgtatgtggagaaattggaacctctgtgcagatagtgggaatgtaaaatggtatagacgctgtggaaaacagtgtggcagttcctcaaaaaattaaacacagaattaccatgtgattaagaaattccattttgcatatgtaccccaaagaaatgaaagcagggtctcaaagaggtatttgtaaacctgtgttcacagcagcagcattcacaatagctaaaacatggaagctcaagtatgcatcaagagatgaggggatacgcaaaatggtgtgtacatacaatggaatattattcaatctttaaaagaaattttgaaacgctctaacatggatgaagcttgaggacattatgctaagtgaaataacccagtcacaaaatacaaatactgaatgattctattgatatgagtatttgtgcaatcagaagtcatagagacatagacgctgatccagaacattaaaaaaaaaaatcagagacaaaatagaatagtagttgccagggactaggggaagagggaaacaggaagttactgtttaatgggtatagagtgtcagtcttacaaaatggaaagagttctagagatggatggtcatattaattgcatagcattatggaagtattttatactactaaactgtacacttaaaaatggtcaaggtaggctgggtgcagaggctcacacctataatcccagcactttggttagccagtgatttggtgggcaaatcacttgaggtcaggagtttgagattagcccggccaacattgtgaaaccccgtctccattaaaagtacaaaaattagccaggcrtagtggcaggagccagtaatcctagctactcgggcggctgaggtaggagaattgcttgaaccgggaaggtggaggttgcattgcagtgagtctaggtcgcaccactgcactccagcctgggtgacagagtgagactccatctcttaaaaaaaaaaaaaaaaaaggtcaaggtggtaagttttgtgttataccaaaatttttcaaattgggggggatagtaaccttttcttcagtgcccattttctatccatacctcccaatatcaaatttgcttttttctttttgttaaagagacagggtctctgctctgttgcgtaagctggcatgatcaactcgaacctctgggctcaagggatccttctgcctcagcctcccaagtagctgggaccacagacacatgccaacatgcccagctaatttttttaaatgtttttgtagagaccaagtcttgcttgttgcccaggtcttgaatttctggccttaaataatcctctcacctcagcctcccaaaatattgggattccaggtgtgagccaccatacccggccttttaaaatctcttctgtgaaagctaaaaaaaatccataatgtcatggagtatatttttggactctgtatgatatctctgaaagtcaaaaatcctgatttccagacagacacaaaattcatgagcttttaatttatttttaaatagatcctgacctagtttctgtttctgtaaaaacagcagggtctcaaagaggtatttgtaaacctgtgttcacagcagcagcattcacaatagctaaaatttctgtttctataaaaagcagaataggtgaccattcccaaagaatcataaaaattcaaaacattcaaaagaataaatatctttaaggaaagttaaccaaaaatcttaagttggaatcaaatgaatgtgttcaaaatcacttggtttgccttccatctttgaatcagtctctgtgaattttgatattacctgtacattccaagctcctttcttacattacaaattttcaaagatatttattgctttcaggaaatcaataaaaattcttagactttttggtataaagaacagaaaaatagtttaattggtcccgctgtgccttcttgtttatttaaattaaaaataaacttaaaaatatcaaaagttggccaggcgaggtggctcacatctgtaatcccagcactttgggaggctgacgtgggagtatcacttgaacatgggagatggagrttgcagtgagccaagatcatgctgctgcactccagcctgggtaacagagtaagaccctgtctcaacaaaaagaaagaagtaatattataaaatatgatgctttatagtagaatacccagatagagtcaagaagcaggtaaaactaccttagctaagtaacagtaagttggcttcatggcagatatttaatgtgcttgctggattctaggaaataaggctggctaacaaagtatgtttcatgcttttgcatttgtaacttttgttttcaccatttgatcagtaataatttttttttttttttaatagagaaagggttttgccatattgcccaggctggcctcaaactcctgagctcaagcaatctgcccgccttgacctcccaaagtgctgggattacaggcgtgagtcaccacgcctgacgttgatcagtaggatttatggtgcttttatttaatccagactttggaggtcctgtatacaagtaggatacagaagattagtttttttggtcttattaaaataacatggaaattaaggctgagattcattacagaaatagcctagaaatatgtcttttatattctttgcgttgggaaaagatagtgatagtcttgcagatgttaagaagttccctgtccaaaattttgaacaatttttgttcttggtttcctttctccttcattattatttttaaattatttaaatagtctattacagtagcttagttcaaaagaagacaaattcttagccagctcagtcccctgccaacacagccttcttccaagttgaaattttctaatataaactttgctttaagtcagtaatatctcccctcccctttctaatttataatggcaattgtgtggcacacaggggagagtaaggaatagggaagttgttgaagcccagcacactaaagttctgaagggtaaactattatgtctaatgttgctgccttccgcggattgtgagccagtggtgcctgacaggagccttactgtgcctacgatcccttccattgtggtctacagagcaacagggaggtctaggggcagtgctattcaacagaactttctgcgttgatgaaaatgttttattatcaatattccaatgtgatagacactagtcatatgtggctattgagcacttgaaatgtggctagtgtgattaaggaattagattttaagttttatttaattttaatttaaatagccacacatggctagtggctactatattgtacagtgtacccctaggaagatctattggcagaaggaagatagttgagtttccccaaaagcaacaaaaatggaagagtaagcaggaactagacagtgtggactccatatgctaccttctgctgtactgggatttgtcccccctatttttttttctttttcctcccccactacccttgattaatagtaatctgataaatatctgcaggtttattattcgttgtcatttgcaagtttgggttttctgtctgtttgagggtattgagaacatctagccctctaccctttgagttgacgggaacaagtctgaggctgtaatttgaactctaggtgctagctacacaacctggtactgagagctgaatttgtgcttagttgttgtttgctttgtcacagagatgttctctaatattcatctgttggagcacaacacagaatctgaatatgattttggtaaattttaaataaaactttacatgcagatgccattctaagagaaaattcayttattctgtgaagctgtttatacatattattgttaactgtctttgtgattttgatggttaacgtgcaaatgctacaatcaaaagatttaaagtctgtcctgtctaaatccatatagtgttacagcaaatagtgactctactttgtacaaagtacataagggctttatgatagttgatacaataataatgattgtgtttaagtgagatacttggaatcttaagacttttaagtaaaaatcccagctttaagctgccaagttattatgtgtttatattggaagaatagaaatgaatggactctgacatatctatctctcttttaccatcataagaccactctttattgtttataaatactttgcactgtcagtactgtctctttaacccttatgaactagaatggccttttattttcagaaatgggtagatcaccatgattgttcattgaggtcacttaaaacctccctaattttcgtcccttcataaggttcacgtatgaactattaggatttttccattagggttttttccaagtagaatgtttgctttgtaattgtcttctttgctaggtctttactaggtcttattattatttcttatagtgttttagtttattcttttggattttcaagtaaactgtcatattaccttaatgtaatggtgcttttgcctccttactttgtatctcaaaagtcatttttaagttcctaatcagtattaccagtaaagataccatgtagtgcttgtcaagattttgcattggactttcaggaagaatgtttcataattttcatgacagaaaattctagcaatttctttgtctttcacagaacaaaactgaagaatcaagaatatgaaactttagatcatttggagtgtgatctgaatttaatgtttgaaaatgccaaacgctataatgtgcccaattcagccatctacaagcgagttctaaaattgcagcaagttatgcaggtgtgatttattgtttttgctgagtttgttgtatatatgattaaaataattttgcatgttttgagtgtgttctagtaagatgtgtgatcccccccaccctcagcagtaatattacatcatttggctgggtgcggtggctcacacctgtaatcccagcactttgggaggtcaaggtgagagaatcactwgagctcaggagttcaagaccagcttgggcaacatagcgagacccccatctctacaaaaactgcaaaaattagccagtcctgatggcacacgcctgtagtcccagctactcaggaggctgcggtgggagggttgcttaagcctgggaagtggaggttgcagtgagccgagattgcaccactgcactccagcttgggcaaccaagtgagaccctgtctcaaacaaacaaacamtatatataatatatatataaaatatgtattttatatattatacttatgtattataatatatatttattatgtatttcatcctcaagtactgctgaattttttttttttttggagttgtcatggccatatagagtagaaataataattgagatggggttagccttctgattggaggaagcagggattggtccctgtacagtaattttgggattctcatgaagtcaccctgcaatcaccgatgatattccatcatttagattttattcctttggttctagactttgttaaagtagggctgattctatcagaaaggacatctgaaagcaaattaatctttgtatattgtctatgaatttatcagatcctctctgagaacccttggaaggatgtctcaggtcatggttcatctaggggttttaagatgaaaaggtagatatgaaatacaaattgggtctatctgacagtttttggtagaatctttctggaaaggcaaatctctgaacaatgaagcaacaaaggcaattttagatcacccatagaatcttcattttatatgattaacagtgaaccttagtgctgagactttcaggtattattacctttttagtactctgtacattccctaagcctgctgtgcttggactttcagctctgtttggcagaaggcctttaaaaatgcatgtgttgaaaagtagatctttcacttcttgcattaaactttattcttagccacactgccccttagaagtcaggagtaccaaaggccctctttgagttggttttacttaaataggacaaccagagcaggatgcttctacagcttgcctcagtgcttttaaccagttagcacscattatagtcataaatgctctgctggtattgactcctcaaccctgtagaaccattttttaacctactctttttgtcatgcaggcttttgttaaaattggttattgaaaatgtttaatgactctttcattttgtacatcctgcatgtgattgtatttttctgagtgaatctgatatgtctagctctttaacattcatatattcagaggagtgtttggcacatgagctcaactcctgagatctgctctgttttaggcaaagaagaaagagcttkccaggagagacgatatcgaggacggagacagcatgatctcttcagccacctctgatactggtagtgccaaaagaaaaaggtatatactcttcttatagctggggacatctcagttcctgttaattttgttttagataagtgaagaaaatatatattttttaagctatcaagttgtaagctttaaataaatggtaatgtgttctcttttaaaattcatttgcaattggatgattagctttttttttgtaaaagtgccatgttacttttagatgacccagatgaaaatgactactacatatgtagcttggcaaaacatgttattccgtttgccgtctgggtttttttttttcttttaatgtggcattttaagaatgccacttaaatctaacttgggtaatttctacatggtgaattacaaaaatgcaatttgaattaggaaaggtaaggagaaatttgatactaccactgcagtgaggtatgccattggtcctaccctttgtttgtccttgttcacctcatctttatttgccattttaagcatgtcagattataaaataacaaatcataacttcttatagctcataaaatgttgagctagatttttggggttttttttcctatataacctttctctcaacttccctaaccgtttctccttctcacgggttttgtggaaggggatcttactgtgagattccaaagctgggatcctataaggaattttgcaatattatctctcgccacacaaagtttctctcgcctgatcattgtggaacactgtattgtcctttaatcatgactgcctcaccatctttgcagcaacagtcaatccagggaagataccttcaataaggaataagctaatcactaatagcaaggcttggcagattcaaagttgaatgaagtctttagtaactgttgacacagtctatacatgcattaagagatccactaagaagaatttaaaaagtagtttagaaaagaggagctgtcctgctttccttcttatagatagcattttggagaattttttaagctttaccatggtaactaaattgatcagtataccctgagatgtgagtctcctccattactggcctatgaatttcatccttccaagttcttaattccttgttataccagggacaatggaggaaaagtgtgaaaccagatcaaagacatcaaatcaagaacaagaacaactttgagtgtaaatatgtaactctactgcagcatcacctgtgttttccagatcagtcacctatcaaagataaaaacttatcaggcaaaagaaggtaatggaggcaaaagtgatggtacaattagtgccaacactggatgaaaagaaagatcttaaattagttgagtattaagaaaacagttccaacgaagcattagcccaggycagatactcgaaaattacatacctgtgtggctagtagtctgtgggacactcaaataagctaaagtttttggccaggcacagtggcacatgcctgtaatcccagcattttgggaggccgagccaggtggatcacttgaggtcaggagtttcgagaccagcctggacaacgtggtgaaacctcatctctactaaaaatacaaaaaaattagccaggcgtgatagtgggcacctgtaatcccagctactcgggaggctgaggcaggagaatcgcttgaacctgggaagtggaggttgcagtgagccgagattgtaccattgcactccagcctgggtgacaagagcaaaactctgtctcaaaaaaaaaaaaaaaagttaagcattatgttcttaatttaaaaaaatcttacttcagacaaaaagtctctttacaaacaggtttcctaggaagtgttttgtacaaatgaagtgaaaaacacaaataaaagaacaatataaatcatccactaaaaaaataaaagaatctgagtttgaaatgtagacatgagtggacgttaaaagattgaaaggattaagtcttatactttggactatgaaaaaggaaataacacgatcagtcatgttgagaggttttggtaataagagatttcttcagaagtcaggcagacagtagcctagaaaattaagctaatcttggccacagaagtcagggctaagttttccaagtaccacttgacttgacttctaagtgctgtgtatgattctgccttcgccttttttttaatactaaagaatgtgagaaaaattgattgtgggtatattctcttcattctgggggtgcrttctttctgccaacatctgtcttccttgttgaaatgtttcaaatrttgtctttggtactttggactgaataatctttttcttcaaccatacatggtttgtacatgaccctccaatgttgcttgtttkgtttctctttacatgtaatgtttgtttctgctttcccaggaacactcatgacagtgagatgttgggtctcaggaggctatccaggtgtgcagtccttttttatgcataaacattcttttaaagtgtatcttctgtggcatgatcagtactgattaggtgaaaagtgaagccttaagcatgtgaaaaaaagtctttattggggtgccagtttattttatgaataaagaaagcagtacagtttaaaaaatcttgttagcaaaataaattcagaattaacctagttcagaagtagccttaatttgttgctagctttgccagggacagaaggccccctcaccaatcaytgtggctgtgtttctgtagcaaaaggtagaaggtggcagtgctggtgcaggactggcaggtgctgattccctttcagggatgccttttacagattgagggtggtggagggatcaaaatcagcttcacagtctgagtgacatcagtgcatgtggacacctatgcattgggtcagtgcttcttgagcatgaatacatttcctcagtctctgatcttgttcatgtcttttataaaaagcattcttttgcatgttacttatgatttgaaaacaacctatgtaataattgtgtagtgcttttgttttcacatttgccgtctgacattcacagagtatcagttgcttatagaacactaaactctgctcttacagtttataaaggagaacatttagtcatctcttttacctgccaggaacatataggccaaggaaagaggcaggttgaaaacaaatgaagtcatttggaagcaaggtagtaaaataattgcataaggtacactactaagcagttgtataggatcattgcatgattgcccagatagctttaggaaagattattttcctaccatactttcccttgaaagttgaatgtcttgagcttccccaaatgttactaccatatgtattccactcagtaaaattgctatgttatcattgtcatcttcctaatattttcctaaagaaaagttttcttaattaaatggtaaatttaagaaaaagaccatggattgtattctttcatatcattcataatgtatggcattgaaactaggtggtagtggaaataggaatagggggcatcactgggtagtgttacaaccctgagttctagagcctgactgcctaaattccaatcccagctgttcttattagctctgtaatctaagcctcatttcaactttatctgaaaaacaagttaatgacagtaccttcataggattggtgtgaggatccagttagttaatatgtttaaagctcttagaactgggtctggatgcactgagtactcagtaaatgtagctgtttattttcttgaagtagcgcttattgacctattgacctattgacttggtagattttggttttgtttttagtcagatgttacttgtctgggaagactcattggaaaagatgaatgaaaaggttttatttcttgaagacttgaaggtgaaatatagcaagccytgtaaaagaaagaacgtttgggtttacttagcttactagtaagcacaactgaagctcttaaggtgggggagctaaatgctgggacaccttaaagcctgtaaacagggttgactttgattagagaggctgttggtaagtgccagctgttattttttaggaaacagggtcttgctgtgttgcccagactggagtgcagtggctattcacaggtgtgatggtggcacattgtagcctcaaactcctgggctcatgtgatcctcccacctcagcctcctgagtagttgagactataggcatgcatcactgtgccgggctgtgccaacttttgggaaaggaagggacataaaagcagcatggtgattatcagctgattcaaatgtctgttctggttgtttactttatggccttaggtattcatttgctgtctctaagcctcagtttttacatctgcatagttggggtaataattrtatttgattctgaatttgaagattaaatgagagtgcatagtgtttaacatttggtagaagtattagtagctatagtttacaactgtatataagaattgtgtgtgtgtgtatttgtaaatattagtatatataaaaataaatagtagctttagaggaagaatattgataagggcatttgacaaagtggtcagccacaaagtatgagagccaaggacttacattgtggcatgaaacattaaaaggaaaacaggatgtagaagggctgtggaagtcttctagaacttgctgatcagccagggggagaaaaagtgactgatttaggtgtttcagattgggttgggttccggaggatagtgtcgatggtgatcctggaaaatcacatttgccatcacacatcagggattcagaatagagcctctgctagtgcataaactttgtgcaaattagaaaaagcagccatttctcaagacacttgacttgcatgaattggaaaattgttgtaatatacttattttgatagcacaggaccctttatgtcccatttcctatgaaattctaaaattgtagcgtacttactacaacagtatctatgatctgaattgttgtcctcctaagtatttttttgtctttctttttttttatttttttgagatggagtctctccctgtctcccaggctggagtgcagtggcacgatcttggctcactgcaacctccgcctcctgggttcaagtgattcccctacctcagcctcctaagtagctgggatacaggtgcacgccaccacacccagctaatttttgtatttttagtagagacaggatttgccatgttggccaggctggtctcgaactcctgaccttaggtgatctgcctgcctcggcctctcacagtgctgggattacatgtgtgagccaccatgcttggcctttttgtcttttttgagacagtctcactctgttgcccaggctggagtgcagtggcaccatcatggctcactgcagccgtgatcttctgggttcaaacaatcctcccacctcagcctcatgtgtagctaggatcacaggcatgtgccaccatgcctgactacgcttttttaaagaggtggtgtctcactgtattgcccaggctggtctcgaactcctgggctcaagcagtcctcccacttcagcctcccaaagtgctgagattacagacaggagttaccacacctggctccccttaagtattatggccccttgaatgcacaatgatgaacagtcctgattttgaattcctttaagatgtattttatactttaatatgcttaaaggtgctgattttaaaaaggagaatgattatgccagttacaagacctgtgatttaattgtatgccttttaatcaaaggtagttaattacttttccaaaaatggggaagaataaagaaactattcacagttaatggtttgaaggaggaggaaaagacattgagaaattctaagaaaaatctgaaaagcaaagtgacattgaaaacagtagccagagctggggcgcagtggctcacgcctgtaatcctagcactttgggaggccgaggcgggcagatcatgaggtcaggagatcgagaccatcctggctaacacagtgaaaccccatctctactaaaaatacaaaaacaaaattagccaggcgtggtggcaggcacctgtagtcccagctacttgggaggctgaggcaggagaatggtgtgaacctgggaggcggagcttgcagtgagccgagatggcacctctgagactcagtctcaaaaaaaagaaaacagtagccagaagtatcaaatagggctctgtcatggttatgttttggttatagagtttatctcatttcagaaagtattttaaactttcagaagtcatggatataaggctcagcctccatattggaaaaagataaagcaaacataccagctgcccaacctaatacagttattattataaaagagtatgaagttggctctgagttttttctggcagccggattaaaactaatgggccagtggctctcagtctctaaggcactgtaaggatctggaaaaatgtaaatgaaagatgaaactggattttttcagagaaggtcataagtgactctagtaatagaaattttgctttctttgaggctggaaatcaattacacatcctttacttaaggaataaatgatacaaatggagaaaggatgctactagtaatatgagtgctaaaacagtaaatttcagttattagagcagtttcatatatacaactagatttccacattctgggtatgtctcactcaaagctgccaagtatcagaattactggcattggaagaatggaccgcttgccattcttttacttcactggcaaaatttaattaaaaactttctctcctcttataaaaatctgccctagatttactcccatctgagagtatttgcagcttcatacagaaaaacctaatgataattgggcttagtgtgctgaaacccagatgggaatggggtgagcacctcctggtccaggtcagggccttgactgaactgttaagcttcttgaaattgctagaatgaggactaatttcatcctgtcctgtttattggagagatcctgtaagcttagagcttcagaattgaattcctctgtcttccttttaaagtccaccccacatgcgagatctaatcaaaccacatctgacttcaaagtcaggttctgaaatttttctttagagacttcctgaaggttaaagtcatctgtgttctaatctgtgcccagatgtggagctctgtggtattggagctttgtcctaacttcccttgtattatccacttgccgaagacttagaatgagagaactcttcctgtcacatcattgccccaggatgtctccttggagaaggagtttccactaggtaaaatatctaacaaacgttttgccatcatctaacaaacttatctaacagaaaaaaaagtgctgaggggagaaaatggcaggaattgtctgaggtccacaatgagcaggaaataagcagtcagagtgaagacacaagttatgaggatgatcccaactctagcaggaaacaggctcttgtctgtttttttcctaattaaatcactttgtttgccttgagttataggcatttctgaaaagcctaaaaatcttaaggatagatgtttattttctcaactgttaattcttgatttttctttctgtgttttaaaaaagtgtattttgaaccttggagagaaaagatctggcctttggcttcttcatgacccaggagtagtgcaagtagtcaggggactggaccagaagacctatacagccacatatagtttgcctgaggaatgaactttcttccacctaaaggatagggaacagatacaaaatatttacctctaagtacagttggccctctgtatccatggcttccacatccagggattcaaccaactatggatagaaaaaaaaattttttaattgcatctttactgtacatgtacagactttttttctgtcatgtcctaagcaatacagtgtaacaaaacaactatatagcatttttaatgtattaggtattataagtaatttagagatgatttgaagtatacaggaggatgtgcacatgttatttgcaaatactacaccattttgtatcagggacttgagcatctatgtatttcggtatacaagggagatcctgaaaccaattccccatgaataccaagggatgactatactataggaccttagtaaatatttttttaatagaaattaagttggccaggcgcagtggctcacgcctgtaatcccaacactttgggaggccaaggtgggcggatcacctgaggtcaggagtttgagaccagcctggctaacatggtgaaaccccgtctctactaaaaatacaaaaattagccgggcacagccgagcccgatggctcaagtctgtaatcccagcactttgggaggccgaggcaggcggatcacctgaggtcgggagttcgagactagcctgaccaacatggagaaaccctgtctacgaaaaatacaaaattagccaagcgtggtggtgcatgcctgtaatcctagctactcgggaggctgaggcaagagaattgcttgaacccaggaggcgaaggttgcggtgagcagagatcacaccgttgcactccagcctgggcaacaagagtgaaactccatctcaaaaaaaaaagcagggcgtcgtggcaggcgcctgtaatcccagctayttggaaggctgaggcaggagaatcgcttgaacccaggaggcagaggttgcggtgagctgagatcgtgccattgcacacaagcctgggcaacaagagcggaactccatctcaaaaaaaaaaaaaaaaaaaactaagtcataagtcatttcttgttattacctacttcactgttcacttggagactgctggttagtctgactagaatttctttatctggctagaatttctttagccgtgccctgagtacataagaatagttaaccggaagccatatcggaagatcattgcttctaataatttactaggaaacttaccttgggcaagtcttttaccccctctgagccagttttctcagcaattaagagatagaccatctgctctcttggagcccttttgaactctggatctaatctatagtcccttatgctttgttccatactgcttwaatcagcttctcagcatcacatctcactgggggaatttggagaacaagacggattcatgctcaaggatggaaattttactctagaaaactcagattaaccacaccgcttattctttaaagtaggttggaactgtggaataatgctgatggagaaagcaaggacgaccctgacagaatcaatgcaagagaggctcatacccactgtaaagacactagtctggcagtctccttttgttttcagacaaccaaaatacacaagtgttcaggagtacttgtcttaagagatgaaacacttctctttttaggttttttattttgttttgtttttgtacttggaagtgaggatattataaccgtagagaattgctagttttattgcactttggctgtactcatctttaaacaaaaaatatatctcagttgactatataatttcattttcttttggtatcagagaggatcttatttcaaacattgcatttcatgacatatctaaaaagtttttttggtgttcattaactgctcctgccagaattactgtgttttaactattttggaaattttcctaatatttgcttataacttccagcatggttactgtgtttgtggcatatgtaatcaataaattgtaatcattataaagcaccataaataatttgttttattttgtggtcatccgtatattaagaaaactgaacctattctaatttttccccttttctacctccccctcaacagtaaaaagaacataagaaagcagcgaatgaaaatcttattcaatgttgttcttgaagctcgagagccaggttcaggcagaagactttgtgacctatttatggttaaaccatccaaaaaggactatcctgattattataaaatcatcttggagccaatggacttgaaaataattgagcataacatccgcaatgacaaatatgctggtgaagagggaatgatagaagacatgaagctgatgttccggaatgccaggcactataatgaggagggctcccaggtaaggagggccagcggtcctgaagtaggcacattttgcgggagaggggtacttatagaataatgcattttgagagaccagctctagaggcttaacttagattattctttttggtgactaggttaattgatttttcttcattgtttacaatcagaggcagtacattataaagataaacgttcctactttgtaatctgacatcctagatttgaattttgctctgccagtccctgtgtaagtaatttatccttcctgagcctcaatttcttcatctataaattagggctaataatagtacttgcatcagggttgttgtaggatttaaaagagataatgtatactgagcatttagcagagtgcctggtactgaataagcactcaaaggaaagccaatagtattaaaatctttcatcatcatcattactacgatcctcaacgaccatacttctccaaagacagcctatatagaaaatgtataattatataaaaatcagcatgatagtcccataaatgtacctctaaataatttatttaattgattttgctacagagcatcttgatttttttttgagacggagtctcgctctgtcgcccaggctggagtgcagtggcgccatctcagctcactgcaagctccgcctcccgggttcatgccattctcctgcctcagcctcccgagtagctgggactacaggtgcccaccaccacgcccagctaattttttgtacttttagtagagatggggtttcaccatgttagccaggatggtcttgatctcctgacgtcgtgatccccctgcctcagcctcccaaagttctgggattacaggcgtgagccactgcgcctggccaaagcttcttgatttttagttctttatcgttgtaactgagatacagtctcccttctttgaaactttttctatttgatatctttttatccactttacatctcccagaaataaaataacatttttaagtcatttgtttccctctgcaattacatttgattataaaataaagtatgcattgaggatgcttatagataaaaaaatggttctatcttaagggtttacacagtcctcagtgtcattggctaatgtaccccttgtctatcactggtagaggaaaaagccacctttaagagaggtggccagacaagggaggtcacttattccctcagctcctctgctttggtgggtggccaagggaggacatagcatctgctgaggaggtaagaggaggggctgtggatgcaaagcataaggtgagtaaccttattcttgactacatattaccacccttggctcagtcctcagagagagatccctaagcaaggataattgtttttttatagattaagcttcagactgtgaactcagatttggaatttaagatattgagatattgctctccaactatcagatatttttagtttctaatttctattgggctaagtctgctaccttgagcgtccagtggagaagaaaggtttttgaagaaaacaacacatgtaaatgtgtttcaggacttytgttaaaacctgcagtgattctactacagtggttctcaaacattaacatgcatgtctgtgcattagaatcacctgggaagcttaaaaacaaaccagttaaggcctaggctctcccacagatagagtgattttattgctctgtagtgaggctggttttggttttctttaagctcccaactatcataaactgtctttttaaaacttctttatggatgcattttataccttaatgaaaagtttttagaaaataattgaagtatatttttggaatgtaggtttataatgatgcacatatcctggagaagttactcaaggagaaaaggaaagagctgggcccactgcctgatgatgatgacatggcttctcccaaactcaagctgagtaaggcagcctcacacttcattatttagtttagtctatcaagaagagattgctgatttttctgaaataatatttaattaaattatgaatatatttgaactcactgtactccagcatggagttctttgttcttgtcaagccctctcatttactgtattttaagtagctaaactgtgacaagcatatggggagtaaaatataatgtcagaggttttgtttactttcttaaatgcgtagacattttgtaaattttaaatagtaagaatagatttttctgtacgtataatgctgtaagaatatagtagcagatttttttttccttggtatgtatgtctgacaattactagaattaaaaatgaatcccagcagttccaactggacagaatttgaggagttagagatgtccagccactgtactatactcagctatcatttgagtgtagtctgtggttggttgttttattaaaagttgtaagtgaaggccaggaacagtgactcatgcctgtaatcccaacactttgagaggctgaggtgggcagatcacttgaggtcaggagttcaggaccagcccggccaacatggtgaatccccatctttactaaaaatacaaaaattagccggacatgggggtacatgcctgtaatcccagctccttgggagactaagtcaggagaattgcttgaacctgggaggcggaggttgcagtgagccaagatcacaccactgtacttcagcctgggcgacagagtgagactctgcctcggaaaaaaaaaaaaaaagggaagaaaaaggttggaagagaagacaggaaaagttattaataccattagataagagatttctgtcttctttaaaattatgtaaataaaatagnnnnnnnnnnnnnnnnnnnnnnnnnnnnnnnnnnnnnnnnnnnnnnnnnnnnnnnnnnnnnnnnnnnnnnnnnnnnnnnnnnnnnnnnnnnnnnnnnnnnnnnnnnnnnnnnnnnnnnnnnnnnnnnnnnnnnnnnnnnnnnnnnnnnnnnnnnnnnnnnnnnnnnnnnnnnnnnnnnnnnnnnnnnnnnnnnnnnnnnnnnnnnnnnnnnnnnnnnnnnnnnnnnnnnnnnnnnnnnnnnnnnnnnnnnnnnnnnnnnnnnnnnnnnnnnnnnnnnnnnnnnnnnnnnnnnnnnnnnnnnnnnnnnnnnnnnnnnnnnnnnnnnnnnnnnnnnnnnnnnnnnnnnnnnnnnnnnnnnnnnnnnnnnnnnnnnnnnnnnnnnnnnnnnnnnnnnnnnnnnnnnnnnnnnnnnnnnnnnnnnnnnnnnnnnnnnnnnnnnnnnnnnnnnnnnnnnnnnnnnnnnnnnnnnnnnnnnnnnnnnnnnnnnnnnnnnnnnnnnnnnnnnnnnnnnnnnnnnnnnnnnnnnnnnnnnnnnnnnnnnnnnnnnnnnnnnnnnnnnnnnnnnnnnnnnnnnnnnnnnnnnnnnnnnnnnnnnnnnnnnnnnnnnnnnnnnnnnnnnnnnnnnnnnnnnnnnnnnnnnnnnnnnnnnnnnnnnnnnnnnnnnnnnnnnnnnnnnnnnnnnnnnnnnnnnnnnnnnnnnnnnnnnnnnnnnnnnnnnnnnnnnnnnnnnnnnnnnnnnnnnnnnnnnnnnnnnngctgcagtagaccatccaccttttttattctctgtgttttttaatgaaaaatatcaaaaatatataaatggaaagtacagtggccaggggtggtgactcgctcctgtaattccagtgcgttcggaggccaaggcaggaggatcacttcagcccaggagtttgagaccagcctgggcaacatagggagaccttgtctctacaaaaaaatataaaaaattagccaggcgtggtggcacatgcatgtacctgtggtcctagctatttgggaggctgaggtggaaggattgcttgrgcccacgaggtcaaggctgcagtgaaccctgatcatgcccactgcactccagcatgggcaacagagctagaccctgcctccaaaaaaaaaaaaaacagaatagtccagtgaacccctgtatatacttgttacccatcatttgtcaaaatcgtggcaaacttatttcctatcccctttttcttcttcttttcctaaattattttaaaacaaatccaatcatgtcatttcacttccacatagttcagtatgcatctgtaatatgtgcagatatctgccactttgtctttgaggataaaacaaataaaaataaaataaaatatgcagacattttcataaataacaatgaagtaattatcatacctaacaaaattagcagtaatttcttggtttcatctaatacttgataaattatcaagttcttctgattgtctcacaaatgtatttttatagttgatttcctcaaatcagactctcattaagttctatataataaatttgattattatactctttttttttttttttttgagacggattctcactcttgttgcccaggctggagtgcagtggcacgatctcggctcactacagactccgtctcctgggttcccccaattcttctgcctcagcctgcagggtagctgtaactacagggacacgccaccatgcctagctaatttttttgtatttttaatagagacagggcttcaccatgttggccagactggtctcgatctcctgacctcaagtgatccgtccgcctccgcctcccaaagtgctaggattacaggcatgagccaccgcacccagcagattgttatactcttaaacccatgatctagagcagtctccttccttttctttccacatgccagtaactcattgaagaaatcaggtcactttcctgtacagtgtcccaagttctaggttagacaggcttgcttccttgtgatatctgtaacttttttctttatttcccttatttcttataaatagaagttaactttgaaggtgcgattagattaagtttcaccttggtggtgatactttataaggggtttgctgcccttatgttgtatcatgtcttgaggcagtgtctggttaaagtagaatccagataaagtccacatactgcaactgattgawacctcttttttttttttttttttttttttgagacggaatctcgctctgttgcctaggctggagtcagtggcacgatctcggctcactgcaacctccgcctcctgggttcaagtgattgtcctgcctcagcctcccaagtagctgggactacaggtgtgcaccaccacgcccggctgatttttgtgtatttttagtagaggcagggtttcaccatattggccaggctggtcttgaactcctaacctcgtgatctgcccgcctcggcctcccaaagtgctgggattaaaggtgtgagccaccatgcccagcccgatacttcttttaatctgtaaactcccctccagctctctctttttccaccccttaccatttatctgttgaagaaattagatttgtgctgtagtttcccatagtctgggttttgctgattgcatccatatgttgtggggttttttgtgtgttttgtgttttgttttgttttgtggagacagggtcttactctgtcacccaggctggagtgtagtggcacatttttggctcattgccacctccacctcccttctgaagcagtccttccactttagcctctcgggtagctgggactacaggtacacgccaccacgtccagctcatttttttgtatttttagtagagacagggttttgctatgttgccaggctggtcttgaactcctgggctcaagtgatctgcccaccttggcctcccatagtactagtattgcaggcatgagccacagctcctggcccactatgttgtactttcatgtgttcctctgtcctttgtatttcctataaattggtagttggagccagaggcttgatcagattgaggtctgatcccctgttctctcccttaggcagaaaaaccgacttcataggtaatatatggtcttccatcaggtacatgtgaaatctatttatggctttctgttaacaggtgttgttgcatacttcattaattattaattcatgaaagggatgtaaaattgtgatagtttttaattttattccttattagctatagagaaactttgccttatctaatatttgattagccagtggtacagtgttttttttgtgtgtgtcttgctttttgaaaggataaaggcttgatttttgttttattttgttttcacctttaccagttttcaaaatatgtattggtttactaacatccttcaatatttacccattttgttgtttgtttgtacgtattattaagaactaccagacttaaacatatggctgagttgtaattgaagttattgtccttattgatactcaggctggttcaggctcgttcctgtattctttttgttttgtttttttgagacagagtctcgctctgtcgcccaggctagagtgtaatggcttgatctcagctcactgcaacctctacctcctgggttcaagcaattatcctgcctcagcctcccgagtaactgggattacaggcgccaccaccacactcggctaattttttgtatttttaatggacacagggtttcgccatgttggccaggttgatcttgaactcctgacctcaggtgatccacccaccttggcctcccaaagtgttgggattacaggcatgagccaccacgcccagccggttcctatattctattgacatgaagtcatggtaagaagtcattgatagattctttactgtctagtgtttgaagatataccagactgggaatcagccatttaccaaggagccctacctttttcatgtttctgctgaaaggtgagggctcctcaacattactatttggaattagtattttaaaactctaatgtgggctatactgctactgaggtagtcattgtttgtacgattttcagtggacagagctaggaaatttgtgtgtttgtttgtatgtttatatttaaagataaattacatcataagttcatagtgatactttcaattgagattaaaggcctcaaggtaattattaatgtcctacgttttaacatccgttatctctttttatcccatgatgaaaatctcagttctccaggataccagaggtgatagaatgtcacatagctactcatttgctttattccttcttattcacagctttctcaaccttacagtagtctcccatcaaaaatataattactgaaaacagttaaaaaaawtttttagtacttttttgtctgcaggttatatttcactatagacatgctaattgctagattttacaaattacttggaatcgtcccttgtggttatgctaccatctgtatacaaatttaggttcatttattttattcatttaacattaaatatctctcyttaggtaggaagagtggcatttctcctaaaaaatcaaaatacatgactccaatgcagcagaaactaaatgaggtctatgaagctgtaaagaactatactgataagaggggtcgccgcctcagtgccatatttctgaggcttccctctagatctgagttgcctgactactatctgactattaaaaagcccatggacatggaaaaaattcgaagtcacatgatggccaacaagtaccaagatattgactctatggttgaggactttgtcatgatgtttaataatgcctgtacrtacaatgagccggagtctttgatctacaaagatgctcttgttctacacaaagtcctgcttgaaacacgcagagacctggagggagatgaggactctcatgtcccaaatgtgactttgctgattcaagagcttatccacaatctttttgtgtcagtcatgagtcatcaggatgatgagggaagatgctacagcgattctttagcagaaattcctgctgtggatcccaactttcctaacaaaccaccccttacatttgacataattaggaagaatgttgaaaataatcgctaccgtcggcttgatttatttcaagagcatatgtttgaagtattggaacgagcaagaaggatgaatcggtatgttttcaaagccattttyattttgaggatatgtgctatttaatacaaaacagatgaaagaatattgctttgatgtactatttccacttacatacatgatttgtagttggtagcatgctattctgaattctaatcagccagaacttcttaagagtgagtatattctgtgggggagagaaggcacaccactaagtcatctagtttaaggccagtgaggaggaagacaaaattgaaaatctcttgaaaagcataaacttaaaatacagcctttcatagaatgtgttttttaaaaagataaatgtttctaattggaaatagtaacagcgtttttcttttaaggtttggcttcagtgcacgaatgctttaaataaaatagctctaaggtgttgtcctgaggttagactgatagaaatttgatcaccattttaagtacctcagagggtttcttttttttttttaatctcaggtttctcaccttaagagcttgctgaagacattaaatgttctaaaagaagcaatcaaatttagatttactttaaacttaaatttccttctaatttttatctgtgatatatcgttgctacatgtcaatagcagacttgactattaaattcagcaattacagtgtattttatatgtgcacttagagacagttggaaaaatataaaaaaaaaaaagatacaaaccttaccttcctggagcttacagcctatcatgtttagaactagaccttcaggcagtgtaatgccagctggggaatctatgaaatcagaatttgctctgaacctttaaagaaaagcaagtagtaatgtttgctttcagtgtctttgcaaataaargaaaaaaaacatagtaacatttgctgcttgtgttaagcaccagctcttcgtaaagcaccatgctaagcactttatgaaggcaatctctaacccttatgatagccattctagataagtgataatcttttcagtttgcatgtgaaagaattagaggcataggcagagaaaagttacccatagtcttacaactagtaaatgatgtgacttgtcttgctctccactgcagagggctactcctgagccagttaccaggacaagtcatggagcacggccatagatgataagccttgagctctgtgctctaaaagcttgaagtctgatggatgggccaggacttacgcttaagggaaaaataattccacacatgagacaacatgccacaaccttatatttagtaaagatggtgatgtaaggaactctgtgggccacagttctccttaaaaggcatgggatgataggtagggttcaaatgaataggccagaggatatttcaaataagatgaatgttatgagcaaagaaatggagttaggaaatgaatatgatatgtttaagagacagggatagagttggggccagtttggtgaggcccatgtgtgacacttttaagaaatggtccttaataatatggttcttcagcaattgagtagaaataaagagaaggatggagggacatcttgcagtcaaaaactcttggagttactcatttattcaacacatatttattgagaggctacttaatgagcatattctagatgcatgtaatacaccagtgggcaaaacaaactctgctttcatgtagcttagacttctttctgttcttgttcttggcttaagtagtccttaagtctaatacccctcccttcctctcctccctgcttagccccattacatcttggtgttagttctgtgagtctttcaatgagtatttgtcttctagattattaggaacttcgtttatgtcttatagatgaaatgtttattttaagaattaagatttgtatctctaggaaattagctcttttcattctcccattgttgacatggttgttttttgcttttgaggcctggaagatagagtccaaggtgtatttttatgagatagtgatgcacacagttttaccctcatgcccagagctttgttgaaaaacaaaagggatccctggtaatttagtagttaggaaaaattttttaaagaaaaacatacggggagccattcttaactttgtgaacraagatagtattgtgattgcttatagtacttattaagaataagtacttaataagaattgatggagatgcatcaatttagtgaatgataaactatgcctttatctactatattatcagtaacaaagctaggcatcccagaaatattagttcataaattcaatgaagtctacataccgtagatttccatgttgatctctaagagtcttcatgcttcatcaccatttacccctacccctacccaccactgctacccaacatcacctaggacttcacaggctaaaatagaaggaatctgaacagtgagacgtaacaagagaaaaattcactcaggtgacaatagtttgtccatcaacagtatttagtaacagcacagtgctgactcatgccagttggctgctggctttcctaaactgctggcagtattcccagactaaacactctgatccccttgcaggtaaaagagacctgtgggaagatgaacaagggaagcattaagagcctcctgtattcttaattatttccttttgctgaatgtctgccttatataaaaagattaccaattgaggggaatttagagttctttttccagcttgcgtttatgttcctgcacattcaatgaatacctgacctcgtagactaataaattctttataatgctttgaataaacaaaagcatatactaggtgtttagtgactcttgtacagaatgttcatttctaaaccatgcgatatgatggaattatgatctgcccttttagtataccatgaaaggtatttacaaaaattttacaaaaattttttacttttaatttacagaaattttcactttttatacttaaaattgtacactattataaaatgaactttaatttcaagtgaacagaattcaaatatcttcattcagaaaacaaacataaaattatgttttaggggccaggtacagtggctcacacctgtaatcccagcacttttggagcccaaggtgggaggatggcttgcactcaggagcttgagaccagtctggacaatatagcaagaccttccttagctctacttaaaataaaatttaaaaaatcagccaagcttggtgacatatgcctatagtcccagctactcgagaggttgaggtgggaggattgcttgagccaggagattgagactgtagtgagccatgatcgtgccactgtactccagcctgggcagcagagtgagactgtgtctcaagaagaaaaaaaaagtgtttcaggggtgtcttcccttggtaagttttatttttattgctttcctacaagtattagcatttctatgaccccaaaagatatttaaaacctttccaaggccggacacagtggctcacacctgtaatcccagcactttgggaggccacggcgggcggatcacctgaggtcaggagttcgagaccagcctggccaacatggtgaagcctcgtttctactaaaagtacaaaaattagccaggcatggtggtaggtgcctataatcccagctacttgagaggctgaggcaggagaatcgcttgaacctgggaggcagaggttgcaatgagctgagaccgcaccactgtactccagcctgggcaacaagaacgaaactccatctcaaaaaaaaaaaaaaaagagactttccggaaacacccatttagattattgatcgtgtcttttaattgtttgtcagttcacctttgctgatgggagcagcattctggggacctctctgaagtttgatgctctagtggcatgtatcagtaggtggcctacttggccacactcctctgaccagaatgtctctgtaactgctaagacctttgtggttagttttgtgaataagtttttagactctggtattcttagttaatagaatttgatttatgccagccaggtgtggtggctcacatctgtaatttaagcactttggaaggctgaagagggaggatcactcgaggccaggagttcgagaccagcctgggcaacacagggagsaccctgttgctacaaaaaattttaaaattagccagcctgagcccaagaagttgaggctatggtgagctgtgatcacgccactgcactccagtctgggtgacagggcaagacccagcctcaaaataaaatgaaataaaaacaattgtatgtaaaccttcctcagaccacagtggtactagaaacagtaataaaatttcctccagtcaaaattctaaagtctgaagtttattttgcccactccccacattttatttatttatttatttatttatttatttattttgggacagagtctcactcactctgttgcccagactagagtgcagcggcgcgatcttggctcactgcaacctccacctcccgggttcaagtgattgtcctgcctcagcctcctgagtagctgagattacatgtgtgcaccatcagtttttgtattttcagcagagactgggtttcaccattttggcccaccttggcctcccaaagtgctgggattgtaggtgtgagccaccacacactggcctgtttattgatttttttttttttaacagacagggtcttgctctgttgcccagagtgggaatgcagcggtgccatcataacttactgcacccttgaactcctgggctcaagtgaccctcccgcctcagcttcccggatagctaggactgcaagtgtgtaccccaatgccaggctacttttttgttgagacagcgtcttgctgtgttgcttaggctggtctcaaactcctggccttaagcagtcctcccgcctcrgcctcccaaagcattgggattataggcatgagccaccatgcctggccgctttatttcataaatgaggaaggagactcagaaaagttctgggtatgacatacataatcttttttccatctttcactatgttgcctttgctggttccccagaattacacagttatttctgggaaactaaaatgaacattaactctgaggcctgtaaccattatagaatactttcatggctttgctttaggttccgatattcacagggtctcactagcctaggcaaccatgatgtaggaccaaaaggaagaaaatagagcctattatgtaacacatcggtctgctattaagagaaagtaaaaattcaaagaatagatacgagtaagtgttgaacatattgtggagccttggtacaattcttggttctggcagccaccttcccctgccagaatcgattgatgcgtgtgccatatatctccaagagaaaatacatgaggcctttcgtttttcatgagctgtacaagaagtgagccttgaagtaaaggaaaatggtgggcatggggcttaccatggtaaaatgacactttggattttgttctaacaaacttcggaaagatactcttcatagacctgtacagaaataccactatatcaattaaagaagcatttaatagaatttaacatataattgaggtgtttaaaagaaacagcttgtatgtcaatggatactcttgatgctgttataggacagattcagaaatatatgaagatgcagtagaacttcagcagttttttattaaaattcgtgatgaactctgcaaaaatggagagattcttctttcaccggcactcagctataccacraaacatttgcataatgatgtggagaaagagagaaaggaaaaattgccaaaagaaatagaggaagataaactaaaacgagaagaagaaaaaagaggttggtttcttttcattttattgaatatgaaaaaatgcactgtcttctagstgttctcataattagctgtggaaaagagtcctgtttgtatgaatgaraactcagggtattgactatattagagtagacgcaatgagatggaaatatttttatagttatcaatttggtcatcagacctgggaaagattaaaagttacctgtgacacagctgttatcctagcattccaggaaaagagtcagttaattcacaagtgtgggggcttaatgcctctttatattattggtagatcaaaacctaagcaggccagctagaactagaaagcattctcaacagtgagtccatgaagtttttgccacatcatgcagtagcattgctttcctcatagatactttggaccagacaagtagatgatattttggttgaatcacatacctggagaaaagttttattttaattgtatcaaactataaaatgttactttgggtcacttgccagaatttagaaatattttgataacaggaccttatgattacaaattggatcatttctgttaaagttcaagttcacatagattcctagaatgtgtgactctaagttatgttaatctttggcatcaaatctcctccgtagatttttttcccttaggcaagaaaacaaaatagattgatttgaagcaaattcttataagcgatggcaaaccccaaaaagaagggaaagagacttggttggtgagaatagtaattttgccagcatagaactaactgcaaaaccaacagctttgtcaccaaaggagatatatgatatactcattcaggaagatagtgaatatatatgtgtggggtttaggggagaggggaatctatgactttgccagctaaaagtggttgatgcagaaatgcatggagtaaagctgcaactttgatggcccaaggtgacgatccaagttaaagaatattctgaaaattagacatctataaaaggactgagataagctctccacacattcccagccagctggaaaacctacacatgctgtgggggaagatgcaaaagaacctggtgaagagcagaatccaaaggatacttgaaaattggctgcaactttgagtgcatcccccaacctatacacagatctgtcagcacatggtacatccttacgggcttgaggtagttaagtacaaacttcacctaagtcattggctatagaaagagaggagcaacccctagtgtcaggtttccttgcagacctatagtgggagctccagaggagagaagagaaagggagagaaaaaagatttgaagacataatgctgaaaacctctcaaattgatgaaaaacagctccaagaatttcaagtaagataatcacaaagagagccccatttagatacatcatcatcaaaccgatgaaaatcttaaaagcagcaactgattgatcacgtacatgtaattatctgcacattccatccaggggcctggggattgtccagcccaattgacaattagtgatacctgagcacttttcccagcatgtggggtcagggccactcaatctgtcactaccacgacaactggcacccatcttcatgtgttacctgtcggtccgggtactagctcacctatcatagccattgccagcactggtgcagaacacttgggtcccagagagttggcccagcactgctactgctttcacccttgccacatccactgcccaagggctcgggaacccacccacctgctcgatccactgctgccattcctggcactccagcaagccagctggagtcccaggaattggcctgcctggacctgctaacaccagtgccagtatacaccactctggggcccaaagcatggcccccttgacagcccagtccccagcagtactttatgcacctcaagccaggcacccccacctcctccccaccccccacattacttaggaactgggctccacaggagccggtgagtggcaggcaagcaaacattaccccctgagctccgcttcctgttagatcagtggtggcattagattctcataggagcatgaaccctattgtggactgtgtatgtgagggatctaggttgtgcactgcttatgaaactcttaatgcctgatgatctgagatggaacagtttcatcctgaaaccatcccacccaaccctcatctcttacccacacaaaccccatccctgtctgtggaaaaattatcttccacgaaactggtccctggtgccaaaaacgttgggggctgccgccctaagccactgaggaagtcatggataccactgatactgtttacagtagaaggaatcatacagagattacactactgtacaaacccagattcaaaaccaaagtatcctgcccaacgaacaccacagatacatcttcagggagaagtcctcttctacgaaagtaaattcagaacactggaagaagtgactgttgtactagacacacatataatatcaatgtaagtaaggacacaggaatcaagaaaaagcaaggaaataattacacctccaaaagaacccagtaattctctagcaatagatttcagtcgataagtaatttagcggctgggcacggtggctcatgactgtaatcccagcactttgggagaccaaggccagcagatcatgaggtcaggagttcaagaccagcctggccaacatggtgaaaccctgtctctactaaaaatacaaaaattagccaggcgtggtggcgcgtgcctgtaatcccaactactcggaaggctgaggcagaagaatacctttaacccaggaggtgaaggttgtagtgagctaagatcgcgccattgcactccagcctgggacagagcaagactccgtctcaaaaacaaagtaatttatcagattccaggaaaataattcaaagtttgatacaagakaattcttagaaacrttacaaagaaatcagaaaaacaattcaggatatgaatgagaactttatcaaatagacatcatgaaaaagaactaaaaaattctggaactgaagaatttattgaatgaaatacaaaagatatttgaaaactttaagaacagactatatcaagcagaaaaaataatttcaggaattgatgacaggtcttttgaaatagtaataactcagtcaaagaaaaataaaaaagaatgagcaaagcttggtaacataagggacaccataaagtgaccagattctcaaattttcagtattcctgaaggtgaagaggaaattttaaaaggttgaaaaacctatttagtgaaataatggatgaaaactttccaagtgtatcaagaaatttagacatccagttacagaggagtcaaagatccccaaatagataaaaagagagaacttaaaatgttcccaacacatagaaaggatggttaccccaaataccctgacttgatcattacacattctataaatgcaacraagtgtcacatgtgccccataaatatttatattatatatcaatgaaaaacaaaaattgtgattgtaattaatatcactgaaatgcacactttacattggtttaaaaggcagattttgttatagattttttatcacaattttaaaatgtatttaaaaataatayatccatgaaatgttaatgtttttataaaaaatattttcatatgcaagtgagattgacagtaaaaaaaaattttttttttttttgagatggagtctcactctgttgcccaggctggagtgcagtggcgtgatctcagttcactgcaagctccacctcccgggttcacaccattctcttgcctcagcctcccaagtagttgggattacaggcgcgcccatcaccacgcttggttaatttttttctttttttttttttttgtatttttagtagagacggggtgtcactgtgttagccaggatggtctcgatctcctgacctcatgatccgcccgcctcggctgtccaaagtgctgggattacaggcatgagccaccacgcctggccaacagtaaaaatttttttaaaatttgatttgcatttccctgaagtttatagttatgttgagcattttatcatatgcctattgaccatctatatgtttatagttagataggaaggataagttactagtgttcaatagtactatagactgactataattaacaattcattttatattttcaaatagctggaagaatggattttgagtcttctcaacataaagaagtgataaatccttgagagtattaatatgctaattaccctgatttgattgttatacgttgtatccatgttatcgaaatatcacactgtactccataaatatgtgcaattttttttgtgtgtgatgggctctcattctgtcacccaggctagagtgcagtggcacgatcatggctcactacaccctcaacctcctgagctcaagcgagtctcttgcctcagtctcctgagtagttgagactagaggcatgtgccacacctgcctaattttttttttttttttttttttttgagatatctggcactgttgctgaggctggagtgcagtggtgtgatctcagctcactgcagcctctgcctcccaggttccagcgattctcctgcctcagcctcctgagtagctgggattacaggygtgcgccaccacacccagctgatttttgtatttttagtagagacggggcttcaccatgttggccaggctggtctcttaactcctgacatcaggtcatctgcctgcttccgcctcccaaagtgctaggattacaggcgtgagccactgcacctggcctaattttttaaattacttgtagagatgagatcttgctgtgttgcccaggctggtttcaaactcctgggctcaagggatcccccctcctgagattcccaaagtgctgggattgcagacaccagccacatgattatcatatgtcaatgaaaaataacaaaagcccaaaaagtggtatattcatccaatgggatattattccaccataaaaaggaatgacatccttattcatgctatgtaaatgaacattgaaaaccttatgataagtgnnnnnnnnnnnnnnnnnnnnnnnnnnnnnnnnnnnnnnnnnnnnnnnnnnnnnnnnnnnnnnnnnnnnnnnnnnnnnnnnnnnnnnnnnnnnnnnnnnnnnnnnnnnnnnnnnnnnnnnnnnnnnnnnnnnnnnnnnnnnnnnnnnnnnnnnnnnnnnnnnnnnnnnnnnnnnnnnnnnnnnnnnnnnnnnnnnnnnnnnnnnnnnnnnnnnnnnnnnnnnnnnnnnnnnnnnnnnnnnnnnnnnnnnnnnnnnnnnnnnnnnnnnnnnnnnnnnnnnnnnnnnnnnnnnnnnnnnnnnnnnnnnnnnnnnnnnnnnnnnnnnnnnnnnnnnnnnnnnnnnnnnnnnnnnnnnnnnnnnnnnnnnnnnnnnnnnnnnnnnnnnnnnnnnnnnnnnnnnnnnnnnnnnnnnnnnnnnnnnnnnnnnnnnnnnnnnnnnnnnnnnnnnnnnnnnnnnnnnnnnnnnnnnnnnnnnnnnnnnnnnnnnnnnnnnnnnncctgaccaacatggtgaaaccctgtctcgactaaaaatacaaaaattagccgggtgtggtggtacatgcctatagtcccagctactcgggaggctgaggcaagagaattgcttgaacctgggaggcagaggttgcagtgagccgagattgtgctactgcactccagcctgggcgacacagtgagactctcccgagtagctggaactacaggcatgtgccaccacacgaggctaagatgggaggatcgctggatcacttgagcccaggagttcagggttgtagtgagctgtgatggtgccagtaccctgaaacctgagtgaaccctgtctgtaaaaaaacaaaaaaaaattctagtctctctgtccctttgagtaaactgatagtgttactgctggtataaaattctcaagaaccttatagatctgctgtgtattacacagggattcacttgattaatcaattgctagataacagttttcaccaaaattggcagaacttttaaaaattacatatctaataccaagaaataggagaattaggagacagagcaagatggccgaatagaagcctccaccaattgtcctccccacaggaacaccaaatttaacaactatctacacacagaaagtgcaccttcataagaaccaaaaatcaggtaaacaatcacagtacctagttttaacttcatatctctgaaagagggtagaaaacacagtcttgaattgctggcaccacccttctcccataccccagcatcagctgtgtgacacagagaatctttgtgcttgcgggagttagagcacagtgattgagggatttgcattggaactcagccgatgcccacagaggaaacattcaggccagccctcatcagaggggaattgtccagcccagtggactggacaattgtcagaacttgggttccagcaagccttgccactgtgtgctaaagggctctggggtcctaaataaacttgaagggaagtgtaggccacaaggactacaactattaggcaagtcctagtgctgtgctgggctcagagccagtggacttagggggcacatgacatgtgagacaccagcagggtaaccaggggagtacttgcgccacccctccccaaccctgggcagctccgaaaaagtcatcttcctccacttgaggagaggagagggaagagtaaagaggtctttgccttgcagcttagataccagctcagccacagtaggataaggcactgggcagtcctgaggcacccattccaggccctagctcccatgcagcatttctagacatgcccctgagccagaagggaacacgctgccttgaagagagggacccagtcttggtagaattcatcacctgctgactaaagagcccttgggycctgaataatcagcaacagtagccaggtagtaggcctgtaggatacattttttttttttttttttttttttttttttgagacggagtctcactctgtcgccaggctggagtgcagtggcacaatctcgactcactgcaacctccgcctcctgggttcaagcaattctcctgcctcagccccccgagtagctgggactacaggcgcgcaccaccaaacccagctaatttttatatttttagtagagacggggtttcaccatgttggccaggatggtcttgatctcttgacctcgtgatccacccgcctcggcctcccaaagtgctgggattacaggcgtgagccaccgcgcccagccacaatcctacaatttatatggaaccataaaagactcagaatagctaaagttattttgagccaaaagaaaactggaggaatcacgttacccgacttcaatttatattatagagctatatagtatctgaaacagcatggtgctggcataaaaacagacaaatataccaatggaaaagagtagagaacccagaaacaaatccatacgtctacagtgaactcatttttgacaacagtgccaagaatatacattggggaaaggacagtctcttcaataaacggtgctgggaaaactggatatcagtatacagaataatgaaattagccccgtctcttgccatgtacaaaaatcaaaatggattaaagacttaaatctaatacctgaaactatgaaactactggaataaaactggactaggcaaaaattkcttgagtaattccccacaggcacaggcaaccaaagcaaaagtagataaatgggattacatcaagttaaaaagcctctgcacagcagaggaaacaaagtgaggggacaacccacagartgggaaaaaactatctgcaaactaaccatctcacaatggattagttaccagaatgtatgaggaactcaactccttaagagaaaatctaataatccaattaaaaagtgggcgaaagacctgaatatacatttcccaaaaggagacatacaaatggcagacaggtatatgaaaaggtgctcaacatcactgatcatcagaacaaacaatgagatatcatatcactccagttaaaatggcttttatccaraagccagggcctgatactagtaccccagagttggggcacacagtccaggagtcctgagctgagccttggccccctaaaatcctctagaaactaagcccatcaactgaacccatcttataccacaatcaaacacccaaggtcatcaaataggataaaagaatgaaaaaaaaaatagccaaaggacagcaactttaaagattgaaggaactttagcccacaaagatgagaaagaaccagcacaagaactctgacaattcagaagccagagtgccttctttcctccaacattgcaattcaggaaactcagagaatccccacaaaatacttcacaagatcatctccaagacacacaatcactagattctccaaggtcaaaatgaaagaaaaaaatgacaggtcaccttcaaagggaagcccagaagactgactgtgcacctgtcagcacaaacgctgcaagccaagaagagattgggggcctatattcaacattcttaaggaaaagaaattccaaccagtaatttctgtccggccaaaccaagcttcataagcaaaggagaaatagagtccttyttcctcaagcagatgctgagggaatttgttaccaccagacctgccttacagtagctcccaaaagaagcactaaatatgaaaaggaaagactgttaccagacactacaaaaacacactgaagtatatagaccaatgacacaacacaaacaagattgcttccagctaacaacacaatgacaagatcagatccatacatatcaatactgaccttgaatgtaaatgggctaaatactccaattaaaagaaacaagagtggcaagctggataaataagcaaggtctaatgggatgctgtcttcaagagacccatctctcatcccatgagacccataatgacacccataagctcaaaataaagacatggagaaaaatctaccaagcaaatggaaaacagaaaaaagcaagggttgtaatctcatttcagacaaaacagactttaaaccaacaaagaccaaaaaagacaaagaagggcactacataatggtaaagggttcatttcaacaagaagacttatcctaaataatatatgcacacaatacaggagcacccagactcataaagcaagttcttagagaccttcagagaggcttacactcccacacaataaaaaaagaaaaaggcctgggtatagtggctcatgcctgtaatcccaacactgtgggaggccaagacaggaggattgcttgagcctaggccttcaagagcagcctgggtaacacagcaggacctcacctcatctcttaaaactcccacacaatackgggagactttaatacccaactgacggtactagacagaccatcagagcagaaaattaacaatgatattccggacctgaacacaacactgggccaaatgtacctgatagacatctagagaactctccacccaaagatcaacagaatatgcattcttctcattaccacatgggacatactctaatatcaaccacacaattggacataaaacaatcctcagaaaatgcaaaagaaggaaaattataccaaccactctcttagaccacagcacaataaaaatagaaatcaagacaaaatcactcaaaaccatacaattatatggaaattaaccaacctactcctggatgacttttgggtaaataatgaaattaaggtagatatcaagaagttctttgaaaygaacaaaaacaaagacacaacataccagaatctctgggacacagctaaggcagtgttaagagggaaatttatcacactaaacacccacatcaaaaagataggtcaatggccaggcacggtggctcatgcctataatccaagcattttgggaggccaaggagagtggattgcttsaggctagcagtttgagaccaccctagccaacatggcaaaacctcttctctactaaaaatgcaaaatttagctgggtatggcagtgtgtgcctgtagtcccagctattcggaaggctgaggcacaaggaggtggaggtggcagtgagccaagattgtgccactgcactgcagcctgggtgacagagcaagactcttgtttaaaaaaaaaaagaaagatctcaaattaacaacctaacttcataggagaaagaactagaaaagcaagagcaaaccattcccaaagctagcagaaaaaaagaaataatcagagctgaaaactgaaggagactgagacaggaaaaaccattcaaaagattaacaaatctaggagttggttttttgaaaaagttggtaagatggaccgctagctagaataatgaagaagagaaaaaatccaagtaaacacaattagaaacaacaaagcgggtgttgccactgacccctcagaaatacaaataactagcagatactactatgaacacctctatgcacacaaactagaaaatctagaagaaatggataaattcctgaacacatacaccctcgcaagactgaaaccaggaggaacttgaatccctgaacagaccaataacaagctctgagattgaattagtaatgtatagcctagcaaccaagaaaggcccaggaccaggtgaattcacagccaaattctaccagatgtacaaagaagagctggtaccatttctactgaaactgttccaaataactgaggagaaaggactcctccccaactcattctttgaggccagcatcatcctgataccaaaacctggcagagayaacagaaaaaactaggccagtatccttgatgtttattaatgcagaaatccttaagaaaataactagcaaaccaaatccagcagtatatcaaatagctaatccaccatggtcaagtaggctttatccctgggatgcaaggttggttcagcatacgcaaatcaataaatgtgattcatcacataaaaaagaactaaagacagccrggtgtggtggctcatgcctgtaatcccagcactttggtaggccaaggtgggtggatcacctgaggtcaggagttcgagaccagcctgaccaacatggtgaaaccctgtctctagaaacaatacaaaaattagccaggtgtggtggcacgcacctgtagtcctagctattcgagaggccgaggcaggagaatcacttgaacccaggaggcagactgcagtgagccaagatcgcaccactgcactccagcctgggcgacagagcgagaatccatctcaagtcttaaaaaaaaaaaaaaaaaaaaaacctggtgcagtggctcacacctgtaatcccagtaccttgggaggctgaggcgggtggatcacaaggtcaggagttcaagaccagcctggccaagatggtgaaaccccatctctactaaaaatacaaaaattagccgggcatggtcgtgggcacctgtaatcccagctacttgggaggctgaggcaggagaattgcttgaacctgggaggcagaggttgcagtgagccgagatggcgccactgcattccagcctgggcatcagagcatcagagcaagactatgtcaaaaaaaaaaaaaaaaaaaaaggccgggcgcagtggctgacgcctgtaatcccaacagcttgggaggccggggcgggtggatcacgaggtgagaagttcaagaccagcctggccaagatggtgaaaccccatctctactgaaaatacaaaaattagccgggcatggtggtgggcatctgtaatctcagctactcaggaggctgaagctggagaattgcttgaacttgggaggcgggggttgcagtgagccgagatcatgccactgcactccagcctgggagacaagagcaagactccgtctcaaaaaaaaaaaaaaaaaaaaaaaaccaaagacaaaaactacattatctcaatagatgtagaaaaggctttttgacatattaaaaactctagataaactaggtattaaagaaacatacttctaaataataagagccatctattacaaagccacccaacgtcatgctgaaataaccaaaagctggaaacattccctttgaaaactgacacaagacaagaatgctgtctcccaccactcctattcaacatagtactggaagtcctggccagggcagtcaggtaagagagagaaataaagggtattcaaataggaagagggaagtcaaactacgtctctttgcagatgacttaattctatatctaataaacccatagtctcagcccaaaagctccttcagctgataaacttcagcaaagtgtcaggatacacaatcagtatacaaaaatcactatcattcttatacaccaatagcagccaagccaagagctagatcaggaacgcattgtcattcacaattgccacaaaaagaataaaatacctggaaatacagctaaccagggaggtgaaagatccctacaatgagaattactcactgcccaaagaaatcagagatgacagatgcaaatgggaaaacattccatgctcatggataggaagaatcaatgttattaaaatggccatactgcccaaagcaatttacagattcagtcctaatcgtatgaaattaccaatgacattcttcacagaactagaaaaactattttaaaatttagatagccaggcacggtggctcacgcttgtaatcccagcactttaggaggctaaggcggrcagatcacttgaggtcaggagttcaagactctgggtgacagagtgagactgtctaaaaaaagaaaaagaaaatttaatgtttcaggaggaataaaataaataacatttaaaatgcttattattagctcttccatttatgggaaattaacctaaggaagtaatcaaagatttgggcaaagctttatcctcaataaaaaccctgtgatatttgcaaacgatagcttgtactggaacttttttttttttcttttgaaatggagtattgctctgtcacccaggctggagtgcagtggcctgatcttggctcactacaacattcacctcccaggtttaagcgattcttctgtctcaacctcccaagtagctgggactacaggcacctgccatcatgctggctaattttttaatatttttagtagagatggggtttcaccatgttggccaggctggccttgaactcttcttgacctcaagtgatccgcccgcctcrgcctcccaaagtgctgggattacaggcgtgagctgccgctaccggcctgtactggaactattaataagttttacttaacaaaaataaaagtcatctgggcgcggtggctcacgcctataatcccagcattttgggaggctgaggcaggcggatctcaggtcgagagatcgagaccagcctgaccaagatggagaaaccccatctctactaaaaatacaaaattagccaggcgtggtggtgcatgcctgtaatcccagctactcgggaggctgaggcaggagaattgcttgaacctgggaggcagaggttgtggtgagctgagattgtgccattgcactccagcctgggcaacaagagcgaaactccgtctcgaaaaaaataaataaataaaaataaaagtcattttgaaaagcatttcctctcagggctagtgttcttgatatattaagtatatatactaaatatagtttatagtatattgtagaatatatgtattctatatttcttcaattctaagactccattaaatgtgtcatattcgtgtaataacttagtgaaatgaaacacattaagaagcattaaggtggggatgaagtatatcagagattatctctagaattacttgattcgaaacgacatacgtacttctttgtgcctttcgatattatccaaaatgtccatatgatcatatattagtaaggtgatgtttttattctctacatcctttgtgtagttatatattcatttaaattaatgatggttgtaattcaaagatagttttgagtagaggctattaggaatgtgaagatcatactattgctgattcctgccttcgcatgttgcaaatggaattaaatgtattaaatgtattattagtatgtgttgtttgaaccctacatctgacttcagcatccctttggtgagtacctttttcctttatttatttatttttttacctaagaagctgaaaagagtgaagattcctctggtgctgcaggcctctcaggcttacatcgcacatacagccaggactgtagctttaaaaacagcatgtaccatgttggagattacgtctatgtggaacctgcagaggccaacctacaaccacatatcgtctgtattgaaagactgtgggaggattcagctggtaagtttgttttaaatcaaaggacagtttagtgagatatgactgtttgacttctccttgctcctcagggaagaaaattttaactcagacatcttaagcctttccataataattgttcaatatgtcaataaatgtaagtaagcacccatcatatgaaaaacataggacctattgggcaagtgtcacagttgagtcaaaagaaatacagcttctaggtcgggcgcggtggctcacgcctgtaatcccagcactttgggaggctgaggcgggcagatcacaaggtcaggaaatcgagaccatcctggctaacacagtgaaaccctgtctctactaaaaagatacaaaaaatgagctgggcctggtggcgggcgcctgtagtcccagctactcgggaggctgaggcaggagaatggcgtgaacccaggaggcggagcttgcaagggagccgagatcacgccactgcactccagcctgggtgacagagtgagactgtctcaaaaaaaaaaaaaaaaaaaagaaagaaatacagcttcttaaagtctggttgagattcattcattcatttgatacttattaaaaacatactttgagccaaactttatgtagagtgacatagattcagaagaacaaaaagctcatattttcccttgcaaaactactccagtaaggaagattatgatcaaaaaagaaattattatagaatgacatgccttggcttagcatttgttttcaaaaaggctttctagaacagttgcctttaaattgagacatggagtatgcatagaaattaatgaagccagaagttggtggaaatgtgatccaggcaatccagttctttgagctgcctatcacatgaaatacttttgtattccttcaccagagagctaaatatgtccttcagtagcatatctgtccccttactaaagtgcacaactctaggtatgtactaaccagagcagagtggagcaggtctcatcacctgtcctcctcattatgtaytttatatggcttttaatatgaagaagagcctgggcaacatggcaagaccccttctctagaaaaaataagaaaatcagcagggtgtgattgcacttgctgtggtcccagcaacttgagaggctgaggcaggaggatcacttgagcccaagaggttgagggtgtatatatatatatatgaggggggaaaagtagcatgcattttttaggcctcattacactttattatttttgagtattatttctcctrtggataattatattaagaaactgtagctgtaaaaataagcacagtgctaggttcatgtcatggcagagtggattgatggtgtatttcctaattttgcaaagaatgtgtgatttctgagctggacacagtgacttatacttgtagtcccagctactcaggaggctgaggttggaggaccactttggcccaggaattcaagtccagcctgggcaacrtagtgagacccagtctctttaaaaaaaaaaaaaaaaaaaagtgatttctgttaacaatgattctctttctcttccccttcccccaccccccatttttgaggtgaaaaatggttgtatggctgttggttttaccgaccaaatgaaacattccacctggctacacgaaaatttctagaaaaagaagtttttaagagtgactattacaacaaagttccagttagtaaaattctaggcaagtgtgtggtcatgtttgtcaaggtaagaaactcattaaatcccaaagtctcactcattccctaggaataaaattttaaaacacagaaaataatcgatgtttacaaaattaggaactctgttttaagctattttttaagccgtgtctatatagctatatgaaaagatttgggaagaaattaacctgaacttcgttgtgaaagaccacttgctgcttacactatttggctataatgcagttaggttaagtttttaatattgccaggctaatttttaagtatgatgtttttttaaggataatcattacaaattttcagtttgttttttaggtaataatgtgtgcttttgtgtgtctgtctgatacacacacacaagccctcttcaaagctttaaggaacattatagctatatgaaatgttcatatgttttcaaagagcaattgtaagctaaatggaattatttgtttttataatttaaagggtgtgtatataataagtccattccgtagccaaagaaatacttctaaatctctggtcatttattattttttgttaactgccagaaagtctgtaatcagttcagcttttgtttggttggttggttatttgctttttttttttttttttttgattgattttcagaaaattyacctaactagttttattcttatgccctccccaccccccaggaatactttaagttatgcccagaaaacttccgagatgaggatgtttttgtctgtgaatcacggtattctgccaaaaccaaatcttttaagaaaattaaactgtggaccatgcccatcagctcagtcaggtttgtccctcgggatgtgcctctgcctgtggttcgcgtggcctctgtatttgcaaatgcagataaaggtgatgatgagaagaatacagacaactcagaggacagtckagctgaagacaattttaacttggaaaaggtatgcagataatagccacacagaaaaaattttacatctcaaaacacctattccagaaaataaatgaataaagtattcaaacttagaaaaagagcaacaacacaaaaccttagccaaacaggaagaaggaaactataacagaaagaaatttacactttcaaaactgtacattataatttaaaagtaaatcaggccaagtgcattggttcacgcctgtaatcccagcattttgggaggccaaggcgggcagatcacgagatcaggagttcgagaccagcctgaccaacatggtgaaacctcatctctactaaaaatacaaaaattagctgggtgtggtggcgcgtgcctgtaattccagctacccaggaggctgaggcaggagaatggcgtgaacctgggaggcggaggctgcagtgagctgagaccacgccactctactccagcctgggcaacagagtgagtctctgtctcaaaaaaamaaaaaatttttttaaagtaaatctaagagctaattatttgacaagtccaattagataaactgccaactatctaataatgggaaaagaaaggggttaaacttcgacacaaaatgtggaagaaggccrggcgcggtggctcacacctgtaatcccagcactttgggaggccaagatgggtggattacctgaggtcaggagttcgagaccagcctggccaacgtggtgaaaccctgtctctactaaaaatacaaaaaattagctgggtgaggtggtgggtgcctgtaatcccaacgggaggctgaggcaggagaatcgcttgaacccaggaggcagaggttgcagtgagccgagatcgtgctattgcagtccagcctgggcaacaagagcgaaactctgtctcaaaaaataaataaataaataaatgtggaagaaatgtaaagactgtatatttctgctaataaatttgaaaacctaaataaaatggctaattgtctaggatattacaaattaccaaaatggaatcaagaagagatataatacagaatgtacaacaacatgaagaaattttttaaagtatcatagaactgaccccaaagagtactgaggtcagacagttccataggtgactttttctttaagggacctatgattattatactgttgaagctgtttcagagcagggagaacaagaaatttccagtttgttttgcaaagccaagataatcttgatttcacaacctgaaaaataaaaacaaaaaactgcaactcagtcttattcatgtatattgatgcaaaaattacttgggggaaaaagtaagtgaaatcaaattacttctttgagaacaacatgaccaagaagtgggaattcattctaagaaagcaagaattgttcaaagttagggagatctttaaatttcattcattattccattagatcaaaggaaagattatttggtagagaacccatcttgattttttttaagactttcaataggtatttcttctagtgtaattttttttwaaattcatatttgtgtctcaagcctgaagcctataaaacaaattcctttttaaatttacacactggacaaaggggcttactgttctagtgttacttaatattttttgaaattagccaatgtagttagataaacaaaagcagtaaaaatattgacaataaagaagcaagatggcaggcgtgttggctcatacctgtaatcctagaactttgggaggccagggcaggtggatcgcttgagtccaggattttgagactagcctgggaatcatggtgaaaccccatctctacaaaaagtacaaaaattagccaggcatggtagcacatgcctgtagacccaaccacttggatggctgagatgggggtatcccatgagcccaggaggtagaggctgcagtaaattgtgattgcaccactgcactctagcctggtcaacagagcaagaccgtctcaaaaaaaaaaaaaaaaaaaaaaaaagcaagaatacttttctgcagataattgggggaaattaactgaaaaggttggaaacagaaaatttagcaaatagaaatttcaaaatccatatgtaaatgaatagtsttcatatataaactagtaagacttttgaaagtaaagtgaaagkgttgaatacactttagcaactgttagaaaaatcttatgggagaaaatatccatttcacactaacaacaaattaagaaataaccttaacaaggaatatatagaacctctaggaaaaaaatttactgaaggacataaaagacttgcatagattgtttttgaaacttgacaaaattattctagcattcttattaagaataaatatgtgacagtcaccagaaaacaagggggaaaaaggggtatgaaagagagctttgccctttgatagtgaactgagggatttttttaaatttaaaaattagarctttgccctgccagatgtattacattttataaaactacagttaaaaaacaaaattaaaacccagtacagtgtcacacgcctgtaatcccagcattttgggatgccaagacaagtggatcagttgaagccaggagttccagaccaccctgggcaacatagcaagaccttgtctctacagaagatttttagaattttatttaatttagaaaaacagtmatttacctataattttttttcaataataaacttggaatagacgaggattttctgttcattatataaaaccattgatcattttattgatttatgattgaaaatacaaggttaataaaacagtctagggttactgtttctaatatacaaagagctctttagggtctaggggggaaagtaggactacaaaaatgagcagaggcccaaatagataatttacggaaagaaggcagcaaaaaacatgtattagttaacctaatagtttgtataatacctaacaggatggcaagagttgaaaagactgataatatgtgtagcctggtataggatgagaccacacacacttttctcctattggtgtttttttttttgtttttttttagatggagtctcactgttgcccaggctgaagtgcggtagcgtgatctcagctcactgtaacgtccgccttcctgggttcaagtgattctgctgcctcaccctcctgagtggctgggattgcaggtgtgcaccaccacacctagctaatttttgtatttttagtagagacagggtttcaccatgttggccaggctggtcacaaactcctgacctctgatgatccgcctgcctcggcctcccaaagtgctagtattacaggtgtgagccaccgcccccgcccctattagtttttttttttttttttgagatggagtctcannnnnnnnnnnnnnnnnnnnnnnnnnnnnnnnnnnnnnnnnnnnnnnnnnnnnnnnnnnnnnnnnnnnnnnnnnnnnnnnnnnnnnnnnnnnnnnnnnnnnnnnnnnnnnnnnnnnnnnnnnnnnnnnnnnnnnnnnnnnnnnnnnnnnnnnnnnnnnnnnnnnnnnnnnnnnnnnnnnnnnnnnnnnnnnnnnnnnnnnnnnnnnnnnnnnnnnnnnnnnnnnnnnnnnnnnnnnnnnnnnnnnnnnnnnnnnnnnnnnnnnnnnnnnnnnnnnnnnnnnnnnnnnnnnnnnnnnnnnnnnnnnnnnnnnnnnnnnnnnnnnnnnnnnnnnnnnnnnnnnnnnnnnnnnnnnnnnnnnnnnnnnnnnnnnnnnnnnnnnnnnnnnnnnnnnnnnnnnnnnnnnnnnnnnnnnnnnnnnnnnnnnnnnnnnnnnnnnnnnnnnnnnnnnnnnnnnnnnnnnnnnnnnnnnnnnnnnnnnnnnnnnnnnnnnnnnnnnnnnnnnnnnnnnnnnnnnnnnnnnnnnnnnnnnnnnnnnnnnnnnnnnnnnnnnnnnnnnnnnnnnnnnnnnnnnnnnnnnnnnnnnnnnnnnnnnnnnnnnnnnnnnnnnnnnnnnnnnnnnnnnnnnnnnnnnnnnnnnnnnnnnnnnnnnnnnnnnnnnnnnnnnnnnnnnnnnnnnnnnnnnnnnnnnnnnnnnnnnnnnnnnnnnnnnnnnnnnnnnnnnnnnnnnnnnnnnnnnnnnnnnnnnnnnnnnnnnnnnnnnnnnnnnnnnnnnnnnnnnnnnnnnnnnnnnnnnnnnnnnnnnnnnnnnnnnnnnnnnnnnnnnnnnnnnnnnnnnnnnnnnnnnnnnnnnnnnnnnnnnnnnnnnnnnnnnnnnnnnnnnnnnnnnnnnnnnnnnnnnnnnnnnnnnnnnnnnnnnnnnnnnnnnnnnnnnnnnnnnnnnnnnnnnnnnnnnnnnnnnnnnnnnnnnnnnnnnnnnnnnnnnnnnnnnnnnnnnnnnnnnnnnnnnnnnnnnnnnnnnnnnnnnnnnnnnnnnnnnnnnnnnnnnnnnnnnnnnnnnnnnnnnnnnnnnnnnnnnnnnnnnnnnnnnnnnnnnnnnnnnnnnnnnnnnnnnnnnnnnnnnnnnnnnnnnnnnnnnnnnnnnnnnnnnnnnnnnnnnnnnnnnnnnnnnnnnnnnnnnnnnnnnnnnnnnnnnnnnnnnnnnnnnnnnnnnnnnnnnnnnnnnnnnnnnnnnnnnnnnnnnnnnnnnnnnnnnnnnnnnnnnnnnnnnnnnnnnnnnnnnnnnnnnnnnnnnnnnnnnnnnnnnnnnnnnnnnnnnnnnnnnnnnnnnnnnnnnnnnnnnnnnnnnnnnnnnnnnnnnnnnnnnnnnnnnnnnnnnnnnnnnnnnnnnnnnnnnnnnnnnnnnnnnnnnnnnnnnnnnnnnnnnnnnnnnnnnnnnnnnnnnnnnnnnnnnnnnnnnnnnnnnnnnnnnnnnnnnnnnnnnnnnnnnnnnnnnnnnnnnnnnnnnnnnntactcccgaccggaacttttttaaagaataactttaggccgtgctcggtggctcatgcctgtaatcccatcactttgggaggctgaggcgggcagatcacaaggtcaggagatcacgaccatccaggccaacatggtgaaaccctgtctctactaaaaatacaaaaattagccaggcgtggtggcacgtgcctgtaatctcagcttctcgggaggttgaggcaggaaaatcacttgaacccaggagggagaggttgcagtgagccgggattgcgccactgcactccagcctggagacagagggagactccgtatcaaaaaaaaaaaagaattactttagaatagaacccattccttaaaggaaaaggtattattaatctcatgggttgttttattcacagcttccattctttcagatgtcccttgcctgtcatgtatatggaacctctctgattcttttttttttttttttgagacagagtctgcccaggttggagtatagcggcacaatctcggctcactgcaacctccgcctcatgagttcaagcaattcttgtgtctcagtttcccaagttcctgggactacaggcgcgcaccatcatgcctggctaatttttgtatctttaatagagatggggttttaccatgttggccagtctggtctcgaactcctggcctcaagtgatctgcctgccttggccttccaaagtgctgggattacaggcgtaagccaccactcccggccttccctcattcttaatcattttccaagaataccatttcagtatcacatttgaagtcataaagatcagaatgttaaattatttggacattgtgaaggaggaatttttttaagtgtgaagtttgaagtattctcaggaagatgctatagaaaacttggaggctttggagtttcctcagcttatatatgttttggagttaatatatttataacatctagccttgtgccgattatcagctaggttctcagtaaatgatggttcttctttaccatctttacattagtgagaagtatcttctttttgctttttcttttttagtcaggactataaaacaacagtaatgatgtctgttaagtggtttttatgagttaggcatttttctatgtacttgagcatggattatgtcacttaagcttcgtaaacaaccctatctggtggccacactatcattatcttcatttcacaaatgaggaaactaaggcataagaggtcaaataatttgcccaaagccatagcagtcattaggtgacagatgctgtaatttattaaaaaacagagcatgtttggctgggcgcagtggctcacgcctgtaatccccgcactttgggaggccaaggcgggtggatcacgaagtcaggagatcaagaccatcctggctaacacagtgaaaccccgtctctactaaaaatacaaaaaaaaaattagctgggcatggtagcgggtgcctgtagtcccagctactccagaggctgaggcaggagaatggcgtgaacccgggaggcggagcttgcagtgagccaatatcgcgccactgcactccagcctgggcgacagagggagactatgtctcaaaaaaacaacaacaacaacaaaaaaagcatgtttatatcacagaggctatgctattcctttccatgttggaataaatcaaaatagtaaaaattttagatctatcagttgttttttgtggtttgttttcttttgtttgagatagggtctcattctgtttcccaggctggagtgcagtggcacgatctcagctcactgcaaactccaattgccaggcccaagcaatcttcctacctcagcctcccaagtagctgtgaatacaggcgcatgtcaccaaagacagctaatttttaaatttttttggaaatgagatctcactgtattgcccaggctggtcttgaactcctggctcaagcagtcctcccaccttgtcctcccagtgtgctggggttatgacataagccactgtgcctggcctaaatcttatcaattgttaatgttaagacattaagggagcccagtaaatgtgatagagaggaagcttgtatagaatttgccccttacactatagtaatgcatgaatgagtctgcttttaaataccgataaatcctctccagtttttttgtttgtttctaaaggcagtgggaattgagagcaggagggagacaggataaaagcatcttgggataatattgttttatgaaaattaactagaaatttcaaatagatacttgataagtcttcgtttatttcaataatctaattgttttgtttcctagcctccttcagagtttctctttatgtttttttgtttgtttgttttaatttacttttttcttgagacagggtcttgctctgtcgcccaggctggagtacaatggcgtgatcctagctcactgtagcctcgacctcctgagctcgagtgatctacccacctcagtctctttgagtagctgggactacaggcatgcgctaccatgcccaactaattttttattttaatttctttcttcagttgagacaaggtctcactatgttgcccaagctggtctcaaactcttgggctcaagcgatcgtcctgccttggcctcccaaaatgctgggattacgtgagccacgtaaccaatggtggttttttcttttaagttaatgtgaaagaaaagtctgctttcgtttcttaccttctctattccttgattatcaactacctttcttcagccagttttctttacaacaggaaaaagaagatgtccctgtggaaatgtccaatggtgaaccaggttgccactactttgagcagctccattacaatgacatgtggctgaaggttggcgactgtgtcttcatcaagtcccatggcctggtgcgtcctcgtgtgggcaggtgagtgtcattgaattagggaagatgaggttgaatctgagaaatttggaaccagtagaaattagtcacccttcggatgaagacaaaagtccttcccctggcagtttctccagcttcttctcacaccatgttcccctccaaccacactttcttccttaaattatccctttgggctcttttgttttcttccactatttacagaactttcagctcagaaatctccctgcctacttcatacagtaaactcctttagcataaatttgaagtgacactttcttaaaaggaagtctttcctgtccactgcagaatgggttaagtctccctgttgcacactctcaaagcaccacatatttccttctccttagcgtatatatcacatatcggtgttcattgtgttattgtcaggtttcacccttgtattccctgctcaaatcatagtgcatgaaacatagtagggcctcagatatttgatgaacaagtaaatgacaaaaggatgacagtatggttgaatggcaaacacagcagagtctggtatagggttgggtaggagaggatagtggctaagaacagtagttcattccctgagtcccagctctgttagttgtaggtccttaggtgaatgatttagccctctaggcttcagtttatatctgttcatcattcagtaagcatttattatacctactatttaccaggctctgtggatacattagtgaataaaacagacaaatattctttttcctggggagcttttttctagtgtgaagacaaacaacatcttgaataagtaaagtgtatagtatgttaggtcatgatacgtgccgtagaaaaaatagaggagaacaaggggagaagggggtcccatggtcagagcagggagaatggtttatataggcctcactgagaagtcggcagctgaaccaacacttgaagaaactgagaaagtgaataatgtgaatatccagggagaaaggattccaggcagtgggaacagccagtataaacacctgaggagaaacatgccaggcctgtttgttagtaggagagtgagccattaatgagttagtaagagataagtgccaggggtagggtgcatatcacatagggcctcagagaccattatagggatttgggtttttactgagttaatggagtgccatcgattgtttcaagcacagagtgacatttggtttagatcttaataggattgctctgcctattggttgttgagaatagactgtaaaaagtcaaggcagaagcaaggagatccaccgcctaggatgctgttgcaataatccaggcaagaacaatcatgcttcagaccagggtgattgcaaaagatagtattttgaaggtcaaattaatagtattcttgataaatggagtgtggggtctgagaaagataaaaaagtcaaggatgactcctgtgtgtaagcctgaggaacaggaaggttgcagttaccattaactgaaataagtatgatacttcaggtcaggaatcacgataatatggagcaataataatgtcagctttatgggttagttgtcaagaataatggctttcatcaaattctgaaggggtgaaggggcactagatttttttttttttttttttttttttttgagacattgtctggttctgtcacctaggctggaatgcagtggcatgatcttggctcactgcaacctccacctcctgggctcaagccatcttcccacctcagcctcccaagtagctgggactataggtgcacactgccagggctggctaatttttgtatttttagtggagatggggtttcaccatgttgtccaggctggtcttgaactcctgagctcacgtgattcgcccaccttggcctcccaaagtgctgggattacaggcgtgagcccctgggcccagccagggatattagatcttgaccttcaaaaagattataaaccactgtcttaaaggaatgtctgccactcatgtgatctgaccccaaatattgatgttttatgtctttgtttggttcacaartccaatgacaaatgcttagttctgttttcatcatgaacgtctcaggaagaaaacctggtcattagataaaactattaagttttgtgccttgatattaagttaaaaaatttttttcacttggaaaaatagtcaaatgttcctttctctttttctaagtatcttttcatgtgtttaatgggggaaaaaattaatgaagttgtcttaccaaaacagccagtgaaactcctctgaatggtacacattactaagtttttggttaatgcgatttttgttagattaatccttcaagaaggaaactattttaatgtaatttatatattttcctccccaagaattgaaaaagtatgggttcgagatggagctgcatatttttatggccccatcttcattcacccwgaagaaacagagcatgagcccacaaaaatgttctacaaaaaagaagtatttctgagtaatctggaagaaacctgccccatgacatgtattctcggtaggtatttgtgcttttttatttaatcgtgtttattccatcaraattgatggaatactacttctgtggggcactgttctaggtgttaggtatagagcagtgcccaaatccaaatctctgttctcttatgttggggcagagattggggagtcagtcgataaattaaaaaataaatatatagaatatcaggtggtaattagggcacaaccaaacctttcacctcagccttccaagttgctgggactataggcatgcaccaccgcactgagctaatttttgaaagatagttttcctagatatagaattctccattgatagttttttttgttcatgtctttcatcagatttggggagtttttggccatttcttcaaatattctttctgctcctttctctgcttccttcaggaactcccattatacttaacgttggtacatttaatggtgcctcacaggtctctcagactcttcatttttctttaccttttttttcctttctgctcctcagactggataacttcaaatggcctgtcttcaggtgcattcatcctctgcctgctcaaatcttctgttgaacccttctaataaatttttcatttcagttattgtacttttcagccccagaatttagtttttataatttgtctcttcatttatattcactatttgcaatgacattttactggtttcctttagatcttggagtatatttaaaacagttgatttaaggccaggcatggtggctcatgcctgtaatcccagcactttgggaggccgaggcgggtggatcacctaaggtcgagagtttgagaacagcctgccaacatagtgaaaccttgtctctgctaaaaaaaaaaaaaaaaaaaaaaattatttgggcatggtggcacatgtctgtaatcctagttactctggaggctgaggcagaggcagaggcagaggcagaggctgcagtgagccaagatcacgccactgcactctagcctggatgacagagcaagactgtctcaaaaaaaaaaaaaaaaaaaaaaaaagacaattgatttaaagtatgtgtttagtaaatccagtgtctggaatttctcaggaacaatttctgttcattttgttttttcttatgaatgggctgtgccttcttgtttctttgcatgcctgataattttttgttgaaaagtgctcattttgggtattataacatgataactctggaaatcagattctccccatcctcaggctttgttcttaatacttattataggttatggttgtttgttcagtgactcttctaaacgtttgtttgtttgtttgtttgtttgtttggtttgttttaaagattgtatttttggctgggcacagtggctcacacctttaatcccagcactttgggaggctgacatgggcaggtcgcttgagcccaggagttcgagaccagcctgggcaagatggcgaaaccctgtctctacaaaaaaatacagaaattatccaggtgtggtggtctatatccatggtcccagctactcaggaggctgaggtggtaggatcacttgagcccagggaggtcgaggctgcagtgagccatgatcatgccactgcactccagcctgggcaacagagtgagaccctgtctcaaaaaataaaagatttttgttgttgttgtatatggttactacagtctctgttctataagcttagtgatcagccagtgatttgacagaggttttcgtaaatacgtggagccaataaaaccataaaactcccagtcttcactgctgacttctctgcgtatggtggagcacaccttcaacactcagccatgcagattacaactctgctttgcctttacttcctacttgtgcagagcttgaaggtcagccagaaatgagatcttagggccttcttaggtcctttctgagcatgtacactattgttggcatgtgtgtggccttctaggctcccaggaatgtgtggaaacttttcaaaacccttattggccaaagcatctcactcctcatcttttcctctgaggccttttgtcatatctactgttggtcctgactgataccctttgccccagccggcaacagctggttcatttgactttaaatgtgctgtgatttgaatgtttgtgcccccttcgaaattcatgacttaaagtgtaatccctagtgcaacagtgttgggaagtggggacttttaggagatgtttaggtcatgagggcttgtcctcgtgaatacaatattgcttttataaaaagggctcatgtaaatgggtctgctctgtctgaatgggtttgctgtctcttacactcttgccctctgccttctgaaatatgatgacatagcaagaaagcccttgccagatgctggcacctttatcttggactttccagcctccagaactgtgagaaaactgttctttataaattacccagtctgtggtattctgttatagcagcacaaacaaactaagacaaaatgtttttgacaaaaaaacctagacacttctccaccaagggaattccaagctaagcacaataaaggcaagcactttgcattagtgtttagaaagctgcctgacaggtcaaaacagatgaccacagttcttggagcatggagctgttttgcttcctctatcaccacaatcttacaccaggaatagaggctgccatcttcaaggctgccactgagacagaaagtaaggaatggagtgagggtaagttaaaatgccacagagctttcctgccaagtttcagtcactttttttcttaattaagcatttgcttggttgctgtaaacctttgactatcttacagaattccaataaagtttattctgcttttttcactgtttctgtgaagtaatggcccttagagctcattattcctccatattcactgacataacttggagtaatttctttctaaagatgcctgttagaatgtgttacattctggccgggcatggtggctcatgcctgtaatcccagtactttgggaggttgaggcaggcagatcacctgagattaggagttaagagaccagcctggccaacgtggtgaaaccccatctttactaaaaatacaaaaattagccgggcgtggtggtgtgcacctgtaatcccagctactagagaggctgaggcaagagaattgtttgaacccgagaggtggaggttgcagtgagctgagatcaagccactgcactccagcctgtggctggagacagagcaagagactctatgtaacaaaaaaaaaaaagaaagaaagaaaatgtgttgcattctacagtttatctaccagttttatatccaggatctcatttaattttcaacatgaccctggaagaaagatgctgatattgtcagaaaggtgaagttactacccagggagtgggccagaactaaaacctaggttttcctaattcttctttagttagtctacagctagctggcacacttttgagaattaaaggaggtgccagtaatatcaggtaggacaacaggcatataatgaaatataagtaacttcatcttgagataaaacccaaaagaaaatgcatctagtaatcacaaagtgggatttcagcctagcttgtggaattcactgtccccagcctccaaggaaaaagggttttgttatataagctttagagaatttataatttcattgtattaactctaaccactattaaatgtaaatcatattttgcacttttttgtgtctctgaaatagaagttttgaagataattagatgaggtgtatcattttttcatcttctgttacatacaaaggagacaatcctgtttttccaacggttatgttcttttttcagtttcgttgaagaattgttttcatttacttaaacagtaatcaagctgggcacaatggctcacgcctataatcccagcactttgggaggctgaggcaggtggatcacttgagatcaggagttcaagaccagcctggccaacatggtaaaaccccatctctactaaaaatacaaaaaaaaattagccagctgtggtggtgcattcctgtaatcccggctactcagaggctgagggaggagaatcgctagaacctgtgagggagaggttgcagtgcgctgagatcactctactggattccagcctgagtgacagggtgagactccgtctcaaaaaaaaaaagaacttaaacagtaatcagatggccacatgtggcagacagtacctctacccttaaccccttaggtgataaaatttccaggaacctgggctcttgaaacatgccgattcctaatttatttgcaggttttgttcccttcacagtagatttttataacgtttcattaatttaaaaactgtcctcagtaaggcaaggaagataaaagatytaaagatttgaaaggaaaaacaaaagggccttttttttttttttcaaaaatattaggtatgtagaaaatccaagagatattcagataaactattaaaattagtaaatgaaaatatgaagttttttttgttttgtttgagacaagatctcgctttgttatccaaactggagtgcaatggtacaatcataactcactgcagcctccaactcctgggcgcaagcaatcctcccatctcagccttccaagaagctgggactatagggatgtaccaccactcccagctaaatttttttttttttttttttttttttttttttggggagatgaggtatccctcttgctcaggctggtctcaaactcctggcctcaagcatcctccctgctcagcctccccgaaagtgctgggattataggcatgagctaccttacctagccccaatatttctatttctgtatctgtatcccatcagtgagcaattagaaaattattaccatttgcattcaatacctaggaataaatctttttttttttttttttttttttttgagatggagtttcgctcttgttgcccaggctggagtgcaatggtgcaatctcggttcaccgcaacctccacctcctgggttcaagctattcccctgcctcagcctcctgagtagctgggactacaggcatgcgccaccatgccaggataattgtttgtattttagtagagacggggtttcaccatgttggccaggatggccttgatctcctgacctcgtgatccaccttcctcagtctcccaaagtgctgggattacagacgtgagccaccacgcctggccaatcttttttttttttttttttggagacagtgtctcgttctgtcgtccaggctgcagtgcagtggcacaatctcggctcactgcaacctccacctcctgggttcaagcgattctcctgcctcagcctcccgagcagctgggaccacaggcgtgtgccaccatgcccagctaatttttgtatatttagtagagacagcatttcaccatgttgaccaggatggtctcaatctcttgacctcgtgaggcgcctgcctcggcctcccaaagtgctgagattacaggcatgagccatggcacccagccaggaataaatctttaaaagatagccaacgtggtagctcatgcctgtagtcccaacactttgagaggccaagatgggagagtcgcttgacaccaggagttcaagaccagcctggacaacagaaggaaactctaccaaaaaaaaaaaaaacgaagaaacaaagatgtgtagggcacctgcacacgcatgtgcacacatgtgcgcacacacacacaactataagaaaattattgagaaattgaagacataagtaaatgaaagttatccatcatatttatagctggaaaattcaatattaaaaagatgccagttccccccaaattgatctattggttcgttccaattccaatcaaaatccagcaggtcttgataatttttttatactttattaaatgaagttttctaaactttcatcttttccctgtcttttgggggcttggtaggagctccaagtcaggacacagagataccacctccattccaaagccaccaatcacttttactctttggttgtaagcagaattattattttttcctaatgtctatttttccttctataaaatatggaaaattgtaattatcccttttctgaattaaaaggcctttgaattatgtaaataaaagtgctgtgtaagttcaaagcagtgatagtaattgtagctattttaagctttggaaatgtttctgacctgtttttcatatacatgtttagtaagttgttagctatgaacattcctgttaaggtcaagagcaaaatagggatgttctggctgggtgcgatggctcatgcctgtaattccagcactatgagaggccaaggagggcggatcacctgaggtcaggaattcgagaccagcctggtcagcatggtgaaactctgtctctactaaaaatacaaaaattagctgatgtgggcgtggtggtgggtgcctttaatcccagctactggggaggctgaggcaaaagaatcacttgaacttgggaggtggaggttgcagtgagccaagatcgagtcactacactgcagcctagcgacagagtgagactccgtctcaaacaaaaaacaaaaaaagaaaagaaacaaaatagggatgtccttatcacacttatttaacattgttctagaggtactagccagtggagttagaagaaacagaagtctaaaataagaaaagtaaggaggtgaaaattcaagagcatcaactaagaaatcatggcaaacagtaagagaagtgagatgattgaatataaataaataacaaacctattatcttaaaagattcagtactaataaaataccttagataaacttaacaagatatgccacatctgtatgaaaaaagttttaaaatgctattgaatgaatgcttgaacaaattgcaaagcagtaccatatgcctaggtaggtttcaatgtcataaagatgtccatcctccctaaattaatctttaatatgatcccattagatataccagtgggaatttgcttgtgaggaagttgatactatgtgaactcattttaaaaatcatattgaaggccgggcgcggtggctcatgcctgtaatcccagcactttgggaagccaaggcgggcggatcacgaggtcaggagatcaggaccatcctcattaacatggtgaaaccccatctttactaaaaatacaaaaagttagccgagcatggcggcgggcgcctgtagtcccagctacttgggaggctgaggcaggagaagggggtgaaccggggaggcggagcttgcaatgaaccgagatcgcgccactgcactccatcctgggaaacagagcaagactccatctaaaaaaaaaaaaaaaatcatattgaaaaagaaacttagaatcgggtgcagtggctcactcctgttatcaatcccagcactttgggaggccgaggtgggtggatcacttgagcctaggagtttgagaccagcctgggcaagatggcaaaacctcatttctacaaaaagtacagaaattagctgagtggcacttgtctgtagtcccagctacccggagtagggggctgaggtgtgaggatcgcttgagcccaggaggttgaggctgcagtgagcagctgtcatctcaccactgcactccaggctgggcaacaaagtgagaccctgtctcaaaaaaagaaaaaggaactcaggaaaattctgaaaagtatagtgaaaggggatctatccttaccagatattaaaacattatagcactacaataattaaaactatatgatatatgagtaaacaggttatttgaacaaaatagaaagtttagcaaatatatggtaaaagtggcatatcaggtaagtggggaaagaagtatttttctccaaatggtgtttggaaattcaataaccatttggaaaaataaaattgtagccatatcccacatcttaacttcaggatagatttccagatgaattataaatttaaataaacataaaattaaacaacaaagataccaaaagaaaccatgagaaagaaattttgttaatctctgacataaaagccagaactcatacaataaaatactgataaattcagctgtataaaaatggaaaatatctatatgaccaaaactggcaaaaacaaaaatgacaatcttgagaaaatatttgcaatgtttatcatagacaaagatctgattttcctcatagatgaagagctcctataaagcaattagataaagatcaacatccagcagggaaataggcaaagaaaataaaggagagcagaaataaattactagggcccagtgtgatgactcacacctgtaatgccagcactttgggaggccaaggtgggtggatcacctgaggtcaggagtcgaagactagcctggccgacatggtgaaaccctgtctgtactaaaactacaaaaattagctggacatgatggtaggcatctatagtcctagctacctgggagactgaagcaggagaatcacttgaacccaggaggcagaggttgcagtgagccagaatcgcaccactgcgctccaacctgagtgacagagcgagactccatcttaaaaaaaaagaaactaccagtgattcttaaacaaatgaaaatatacccggctgggcacggtggttcacacctgtaatcccagcagtttgggaggctgagggaggcggatcatctgaggtcagaagttcgagaccagcctggccaacatggtgaaaccccatttctactaaaaaaaaaaaaaaaaaaaaaacccaaaaattagccaggcatggtggcacacgcctgtaatcccagctactcgggaggctgaggcaggataattgcttgaacctgggaggcagaggctgcggtgagctgagatcaaaaaagaaaagaaaagaaaatatacccaaccttggccattagagaaatgctagttaaagctacccaggtgcttttcttcttttctttttcatttttctttttttcttttttcttttttttttttttttgagattacctatcaaattgtcaaagatccagaagacatttctcactagttgacaagagcatgaggaaatggtatttacctactttgtgggtagtctgtgaattaggacaccctttatggaaggcagtttgataatacctacaaaaatttaaaaagtgtatacataccctttaacccagcttttatagttctagaaatttatgcttcagatgtattcacctacgtgcaaattgatatgtcttaaattatttatttcagcattatttagcgtcagcagaagagcaaacattgggaaacaacatagatacccatcaatagggaactagttgaataaacttagtacattcatacaagccgtgacctccaagacatattattttgtgacaaaattcagatgcaaaacagttttaagtgatatgctaccatttatgggagttttttattgttttatatatatgtcatagaattcatcattttaaccttttttttttttttttttgagatggagtctttctctgtcacccaggctggagtcagtggcacagtctcggctccctgcaacctccgcctcccaggttcaagcgattctcctgcctcagccttctgagtagctgggattacaggcgcaagctaccacgcctggctaatttttgtatttttagtagagacggggtttcgccatgttggccaggctggtctcaaactcctgacctcaggtgatccgcccaccttggcctcccaaagtgctaggattaccacgcccagccttaaccgtttttaaatacacagttcagtggctttaagtccattgacaataccgtacagctatcaccactgttcatttctagaattttttcattatcccaaataaaaactttgtacctgttaaacaactctttattttccccttccccctggccctagtaatcactgttctactttttttgttcatgaattttgcctgttctatatactgcatataagtggaatcatacaatatttgtccctttggatctggcctattttacttagcctaatgttttcaaggctcatccatgttgtatcatatatcagaattttattcctaaggctgtatattccattatatgtatactacatctgttaatggacatgtaggttgttttcacattttagctattgtgagtaaaactgctcttaccagtggtgtacaagtagttgatcctctgatttcttttggatatatacctagaaatagaattgcgaggtcatatggtaactcagtgtttaactttttggagaaactgcctaaatattttccacagcagctgcaccattttacagtcccaccaagatacaagggttccattttcttcacatccttaccaccacttgttattttctgttttgggttttttttttaatacaggcatcttaatggggtgtgaagtagtattacattgccgttttgatttgattttcctgatgatgaatgctgttaagcattgtgttttttttgttttgttttgttttgagacagagtctcgctctttcgcccaggctggagtgcagtggcgcaatctcggctcactgcaagctccgcctcctgggttcaggccattctcctgcctcagcctcatgactagctgggactacaggcgcctgcaaccacaccctgctaattttttgtactgttagtagagacggggtttcaccgtgttagccaggacggtctcgatctcctgacctcatgatccacccgcctcggcctcccaaagtgctgggattacagacatgagccactgcgcccggctaagcattgtttcatgtgcctattggacattcgtatgtctttttttagagaaatgtcaatttatatcttttgcacattttttaattgggttatatatttgtcttaatgttgagttgtaggaatatatattctgtatactagactcttactagatatatgatttgcaaatattttcttctatggcttatcttttcactttcttgatagtatcctttggagcacaaaagttcttaattttgataaagcccctttttttttttttgagactgagtctcgctctattgcccaggctggagtgcactggggtgctcttggctcactgcagcctctgccttccgggttcaagcaattcttctgcctcagcctcctgagtagctgggcttacaggagcgcaccaccaagcccagctaatttttttgtatttttagtagagacgaggtttcaccatgttggccaggctggtctcgaactcctgacctcaggtgatccaccctcctcggcctcccaaagtgctgggattacaggcatgagccactgcacccagcccattttgaattaattttttttttttgagacggagtctcgctctttcgctcaggctggagtgcagtggcgtcatcctggctctctgcaacctccgccttccaggttcaagcaattttcctgcctcagcttcctgagtagctgggagtacaggtgcacgccaccacgcccagctaatttttgtatttttagtagagatggggtttcatcatgttggccaaggacggtctcgatctcttgacctcgtgtttctgctgcctcggcctccccaaagtactgggattacaggcatgagccactgcgcctggccaaattaatttttatatatgataggaggtaggagttcaactgcattcatgtgcagaagtggaaatccagttgtcctggtaccgtaccatctgttgaaaagagtgttctttcccccaatgaattgtcttggaacccttatcaaaaatcaattatccataaaagccctattatattggtttatttctacactttcagttctattccattgacctatatattctatccttatgccaatacatattgtattatatctttttttttttttcttgagatagggtctcactctgtcacccaggctggagtgcagtagtgcaatcacagctcactgtagcctcagactcagacttcccagactcagatgattcccacctcagcctcccgagtagctgggaccacaggcatgcaccacaacatccagctaattttttgtatttttttgtagaatttgggggtctcactatgttgcccaggctggtctcaaactcctgagctcaagagatctgcccacttcagcctctcaaagtgctgagattacaggcttgagccaccatgcctagcccctttcatatctttaraattgttaattatatgaatgtattcatccaaaaataataaaatgttaaaacagttagtaactatgaccacagtttactcctttaatttctttctaattttctctttcaggaaagtgtgctgtgttgtcattcaaggacttcctctcctgcaggccaactgaaataccagaaaatgacattctgctttgtgagagccgctacaatgagagcgacaagcagatgaagaaattcaaaggattgaagaggttttcactctctgctaaagtggtagatgatgaaatttactacttcaggtaaagcttgaaaaacttaaggaaaaaagagcacttccattaactgatagcaacatagtgtagtccagtgtttttaattttttattagatcttaaactagagtagtaaatatttcaaatagaaaatatttattcacttaaagattaaaggaaagacttcataatctgctgggacctggtggctgctctaatagtgcccttggcgtagactccaataattgtggaatgaggcagaaacacttggttctggtttatatcctgtcaggagatttctcagttccacagattatgaaaactctttttgctgtgtataggcaactagatcccaactttggacacaatacttttgtggatattcagcataattatttaaaaacaagcatctctaagtacaagtaatttyataaatacacatttaaactctttccatgctgcctttagagcatatattgcagattgcaggaagtcacttctagttgttaaggtggaacactgctttccggcttattctggaggggcattaggtgattttaggttttttatgtcacttttttcagaaaaccaattgttcctcagaaggagccatcacctttgctggaaaagaagatccagttgctagaagctaaatttgccgagttagaaggtggagatgatgatattgaagagatgggagaagaagatagtgaggtcattgaacctccttctctacctcagcttcagacccccctggccagtgagctggacctcatgccctacacacccccacaggtgaaggtgacaggttcctgttacttatcttattaccacctttggtttgcagcagactcaaaaccaaagtaaagtgacatccagcccctccatatgtgagctttaacttagaattctgcaggaaggaacagattttgtcagtgccatgatttattcatttatttttgattgacaaaaattatatgtcatcccattaataatttawawtwawaccattaataatttaaaattaatatctttaaaatttcatagctattttaatggtgggcttagttagaagactcttccttgtgctgaagaaaagcagtaaggagcaacatcaccctgtttgtctttagcttttattacccgtgtctttttaatctctccttatgtaggacctcatcttttggttgaggtgattgttggtatttttttctcattcagaatttttacaagacttggccaggcatggttgcttatgtctgtaatcccagcactttgggaggccaaggcaggaggatcacttgagctcaggagttcaagaccacattgggcaacatagtgagatctcatctctactaaaaattttaaaaattaggcatggtgatgcacacctgtagtcccagctactcggcaggctgaggcaggagaatcatttgagactgggagatcaaggctgcagtgagatatgagtgcaccactgtactccagcctggtgacagaacaagaccctgtatcatttaaaaaaaaaaaaaaaaaaaaagaattttctcaagacttaattgtgaggtcaccattacagattgcacccatggaattcagtgaaactttcatttcttttttacttgtaatagataaggaagaggtgtgttttgaccaagaaaatagccagctataaaccaaacgtgtcaataaagcagtaactagtgaatcacgtgttcctggcttctgaaaaatttttttttttttttttgagacagagtcttgctctgtcgcccaggctggagtgcagtggcgccgtcttggcttaatgcaagctccgtctcccgggttcacgccattctcctgcctcagcctcctgagtagctgggactacaggcgcccgccaccacgcctggctaattttttgtatttttttttttagtagaaacggggtttcactgtgtcagccaggatggtctcaatctcctgaccttgtgmtccacctgtctcggccccccaaagtgctgggattacaggtgtgagccaccgygcccggctggcttctgaaattttgagcagttaaccaaatgtaatgttttgatgcaccataagacctttctgtcttacagtctaccccaaagtctgccaaaggcagtgcaaagaaggaaggctccaaacggaaaatcaacatgagtggctacatcctgttcagcagtgagatgagggctgtgattaaggcccaacacccagactactctttcggggagctcagccgcctggtggggacagaatggagaaatcttgagacagccaagaaagcagaatatgaaggtaaatagagcctaggcacaactgtctttcgaagcaagggggtgtttcaggaatgcacgcgcacagacaggttttactcttgttcttaccacttgcacatgaacttttattttggggactgttccaaatggcacccaaccagtattttagatgctagccttgtcctgactgagcagagcactgcccctgacttggcctctgatcctggtgttgtattttcccctgcaaatttctccaaaatattttgctactaaaaattgcatgatttttttctttcattgagccctgtaagcacacatgttgagctagggaattattgtacaatgatgttaaatataattttaattaaaattcgtctgaaaagggcctcttaaaatcagtgatcttgtgttacagctcttggtaagccatatatttaaacttcaggctgagtctttgctaaagtgcttggtttcctaggtcagtcctggcctatackgtgtctgtattcatagctacttctaaggtatttgggtcttttttataaagctcaactgcctttattttccttttattctaattaaatcactttgggcagtgagctgtcattcaagaatttggtggttcttagccatttagagacaaatacttgagattttttgttttttgttgttgggtttttgtttttgtgggttttttttaaatatcagacatggacttagtaaagaaattagtagtaagcattagattaggcagtactgttgccctttgagctatattttttccatctggaattttatatattggttcattttgccagtttagagctcctctctacaatggtcaaccactactcttcttaggtgggtacagttctattattttctggcaaacattaattatttaggctgccccttttattaaaatttttgaagtctccaaagaaacttctttaaaaaaaaaaaggtcatttattataattatttgattactatgaaattatctgacaggcttccccaaggatcttctgcaaagaatcctaatcctgcaagatgtttagccaaaaaacattttgtggcaaaaccagtttgagaagcattccaaactctctctcttggaaacttatggtgcatattcccgtatgtgtgttgtcaggcccaagggcctcctctgtccttatcaaggggagtgctaaccttttctcctttcatacagcatgcatattcccatattaaaggctttaagaccaccagtaaataagctgttttatattatctggcattttctgaaatttgaccaggtatttatgtagtacctatgaataccctaaagaactaacattttgcagaatattctttggaaaaccctagtcagttccataagaacctagaactttgtggagctttgatatttctgaccttattgaaagttaagacctactacaccactgagctggaggagtgttgaaaatcaagctcacatgaatattgctgagcgagcagcacagcagcagcagcaaggcaaatggagccagtgctggatggctggttatttagagtgtgagcaggagagagatacctgaagacactgtgaaggtaaaaacactggagtaggaatgaagagagggagaggtgatggcgtctggaacatccttccaaattcaaaggggagtctgaaagtgagtgagaacctagtgaggggggagttatatgactcagcagcatctacctgagacataaaatctgaacttttgatgttttctctcattgaattcaaagcccaaagtttagagtttgggtagccagtccaatattcaatccacaggccttatttttttttttccatttcatttttttgctttcccactttactgtgtcacttgtataatgaaaatactagaatttgaagtggaaccctaggtcgatttttttttttttttttactgctagctcaagtaaatagtttgttcaaatggccttcgtttctcatactcattgtacaaagggtctgtaaactaggacagtcttagtgatgataaggctatgcaggcaactctgtcacagccaagaggcctttgattgcttgactttcatattcttaaaggaggactggagctgtagcttcttgattctctgtaaagccatatgacctcgagctattttccccctcctgaaatcagtggtgttgagttccatgttaaagggtttatgtgtggcagttggagtgtgatatcaggagttagggccatagggttgctggttctctctatccttggacaagtgactgcctgtctcccagcctccatttgcctatgtgatgagtggggggatcttctatttatgaatggtgagacaagaaaccctgtatggtgggagctttggaaatacagcatttcaggagttcttcagtaggggttcagtctgctagctcacaaaaagactggaaacatgatcattggagctcccggctctggagatgcagagtagctcagggccggggagtggggaggtagcaggatgtattctacggcccagaactgccacagcaaatgctctttttgcattttgaatgaartaagagggattctggaattttcattgatttagggtggtttatggtcagtattgaactgctcagcttcaggaaacctggttctttcagtacattgtccattgctacatacgtgtttatttaattctctgcttctgatgattgtagcctgaagtataatgcatttttttcctttggggtttattaaacatgacttctttgcttcattagaatgtagaaattagttgtttccctaaaaccttctgaaggaggcagtcagctacttttcccttacagagttaattttcttcagctgctaaactccatgacactcgtgatgagtcctcaaatcttagtaaaattgggtacaaagaatcaggaaatatatatagtaagtaacaattgtaccaaaaattataatgggccatggaattgcttcatattgaaattataaataatctgtaatgctattaatactagaataatggtagcgcttctcatcttcagggtgcctcgtgagattaaccatggtggttatgctggtgacgtgtttacataaaacctgtgctttctgaatgtgtgttgcagtcttaacattcttgaaatctttgcagaccagttctcaagatgggataggaaagctggactctaggttaccaagtgaaatcggcccgactcctcctgtgttgagactagtcatctactgttccttccattgagacagaactgttgcctgtgtttttactagtcctgttgaatgcaatggatggtattttgaattcctgggttaaaaacagaattgaaaatctgaaatgcctttacagagcgggcagctaaagttgctgagcagcaggagagagagcgagcagcacagcaacagcagccgagtgcttctccccgagcaggcacccctgtgggggctctcatgggggtggtgccaccaccaacaccaatggggatgctcaatcagcagttgacacctgttgcaggtaaaaacaggagctaagaccatttttttccactttaagaaattccttcattttttttttctccaataaggagtaggccacagtctattgccttttctcatgacagattcaaagtttgaagtcatccatgttgtcctatattgcctttcccatatgggcaatgcctcccttctgccccagaaatgggccctgggcccaaccctggtaattggtagggagcagctcttccctggctgtgggcatggtctggtgatgttctccaccccagcctgctcttgatagagcactatagcagaaaatatgaaagtagaccctgaattctgttctagagggactcccaagagaaaacacaaaactagtctttagktggtgttgattttcccatctcattccagtattcagtttgccttgttctgctgcagccatccttaaaagactgaccgtttaaaaggattttttgacaatgaattgtaaatcctttcttggtcaccaatgtgcatgactgctaaatagaatacaaagtccttattcaattcattgtgcccactctgtaatgcttttctatttaattacattaaactgcattttctgttagtatcccagtcacatatttaagaaaaaaaaaaagaaaaagaaaatgatgaatgtggtttgtctgtgtgtgttgtctctggttctggtagccatagcaaatttgactgttcttgaattgaatatctttgtctgacatgtctccaatgagaagtctgcagaccacttctcgggccccttctttgagatctctccagtcctggtgaggtctgtacaagccacctgtgtttcttcttaagcaagcagtctgacctctttcacagggagtccaaaatagtgttgttcaaggcaggcttgttgggatgctgtttttgctgtttcgtttttgctttttaaggaagagtagcataggataacttttccattgtcgctcctaacttttgtgatggcaagttctcaaatgcactgtcgctgaactcagcagttgcactcgccaaagcacatctgaatcatggctttcagtgctttcagtgtaactgatgttgatctaacaaatctcataatcgcctgctctattccatggcccattttggttaatggggttccagaggtttttagaaatcaggccttgaacatggggactttgaaagttagaattccctcgttgacattgtgttttgttctatttgatgtgtgacgttgtggcactgtgcccttgacttcaaaacccaggggcacattaacaaaatgaatacaaacagctaaaaacaattaaaaaaaaaaaaaaaacagcagctgcagcattttagctccctgttggggaagaacattatagaactctatggatgaggaaggtggtccctctagaaagcccctgctccattatttagggtgtgctggctagacttctgggccctgggagtgaaaagcaagcattctctgcagtaaccactctttggtcctcatggggaaccctgcagctaagagggtgatttttcatggttttacaggtttcttagggcctgagtcttacttattagccttgttgctgtcttgagaccagctttgcttacaagcattgaagctcatttgaacacatgtgactgggataataaatgccaaagtacagtttaatgaagacaagtgtcatgtctttcagttcttaataatttcctcaaccacagcccatgaaggctgcgttcagatgggcttttgtaattgaaagcaaagcctcttaacatccttaaatttcccgcctacttaaccctaaatgctataactggtggtgtggttaaaagattggtagcattggatctcttcatgtttaattaagatgatggtgtctgttcaaaagtagtttttactttctgaactcttcatttaaaaaaaaatgaaaactcataatcttatgtatagagagattattattcaaatttttgtcattcggtttatgtaattgtaagttagtcagcttaggtatgactagtgaagcagggtgaatcgacctcagaatttttagtaatttcatagccttaaaagactaaacttttataaataaatatgtttgaaatcttcagggaaagtccaagagtaaaattctcagaatctgaagttttccactatttgacagagtccctctgcaaagagtattttataaaaatgaggtttggcaccagtccctcaaccctccctttgcaagaagctgtgaccaaaggtgactgcattttggggggagctttgtgttcttattcatcatgatcattacaaatcccagaaaagtcaagttgtttttcttgttttaaaaaaatgccatgtggttttaaaggtcttttgataggtgagtccttgacattttgaattttttttcttacatttattccttctgccaaaaatacttgtttgctgaaactcttctctagccagtagaaaatattttgtcatgtgtaggtacactttgaaaataaaggaataaaagcctctgttcacagaaattgtgtacctcaaattaaaatgctccctgttaaggtttatatgaggacatttgagcttggagactgatggcatttggcattttctcatatcagcagagcccaattctccagccattcctccgtaaagtctgtgtgtaggctcctgagtgacctggacttggttggcttggttgggagtgtttaggttttatctttatcacatttttagatctaaagaaggaaatatcattcactgtgatggttcttagaagctgttccccaactcaagcccaagcacaatccattcttaccagcagtggtaaggctagaaaggaggagtagatgtagaagtcttgaacaattcctgccccaaagctggagaaccatgctttgtgatcaggactatgcgctcatttccctcccttcctatttcccctcatgtgtacccatgataggcatatgagtgtgggcagagtggaatgatggggtttatactattcagttagaattgcagtcagcagaactggtcactctgtttgaacagcttgcaataattatttccttgggaaggctgttactagaactctttactattatttaactgaaaacatgcagcatatttaccccagggaaaataactacaaataatagtgtactaagtactaattcatcccaaaatgttgggtctcatatttgtaactttttattttgttcattattgcagcaaaataattgcactaattgctgttatatcatgcagtactaagggtgctttattcattggtagtgcatgtgggggttggttgttattacttagctcatgttgcatgttaatgatgcatgtctgaaatttgttgtgtccttcaaggcatgatgggtggctatccgccaggccttccacctttgcagggcccagttgatggccttgttagcatgggcagcatgcagccacttcaccctggggggcctccaccccaccatcttccgccaggtgtgcctggcctcccgggcatcccaccaccgggtaagaacttcatcctcattcactcattaatctcatcttcatattctctttttccgctttcaaccagttgttccaggaggcaccygtggcccattgtggycaggccttccctccctgagaatccaaaggttgtcagcagcagggcatgtcttgtgcattcagcaggtggcccagcacttgtgcccttgtgcacctggctgctggcagcagcacagcacacatggcagaggccagactcagcaaaccaagggacaagaggcatactctatcgataatcactcaactaatttgacatgtccttgaaaagccagacagcctagaaggctgtgtcctcttatcagtgaatgaagtttcccaaattgctagttcagagtaacatgtaaaagcattttttgcccctgagttgcatttctccctctggtgcaattcttatctcacagggtatagagtatctgttccatctcctacttctcctcaagcagcctttctaaggggattgcagagctgctaaggtagaactcttcagaaatctttcactcagtctgtcttagaacaaaaagcagggagggaatgcattttcactgaattagtgttctgtatgtgagttccctaagaagcatgacatgccaggtgtaatggctcatgcctgtaatcccagcactttcagagaatgaggaaggtggatcacttgagcccaggagttcaagaccagcctgggcaacctggtgagaccccatctctataaaaattagccaggtgttaggccgggcacgatggctcatgcctgtaatcccagcactttgggaggccgaggtgggcggatcacttgaggtcaggagttcgagaccagcctggccaatatggtgaaacaccgtctttactaaaaatacaaaaattagctgggcgtggtggcgggcacctgtagtcccagctactcgagaggctgaggcagaagaatcacttgaacctgggaggcagaggttgcagtgagccgagattgcaccactacactccagcctgggcgacagcaagactccgtgtcaaaaaaaaaaaaaaaaaaaggaaaaattagccaggtgtggtggcatgtgcctgtagtcccagctactcaggaggctgaggtgggagaattacctgagcctggggagactgaggctgcagtgagtggtgatcgcaccactgcactccagcctgagcgacagaatgagatcctgtctcaaaaaaaaaaaaaaaaaagcctgacattaaagaacagcctagcctaccctcctagctgtagatactggtttgtctgtcaacagaagcttagaagttcttttatatagaaatatataaatggattccagaaatagckacattcattttcactttaaaatgtgaattagcaagttgaaagattattttaaagaaaacctaaatgaaaggaaaatcacatgttcccatattaattgccatcatatgcaaaagaactcttagctgtaatctggatggagggaatgtgacctttggaagactcggaaagcatttggtccattacctacaacatcagctaagggcccaacccaaatggtaaaatgtggttggaaacttgttaaatttgcttgtaccagtgttggacctaccagtgatagggttttgcagggtaccaaatgatgctttggagggtgcacccagcagtgtgcagagtgagcaaacttggtggcctggcctggagcctccagccacactctttgtgagagttgcttagaatatggccataattccacagaagcatttgctccaggtattgccagaggaggaagtgtttgtagggttaggtgcttcatatgaaaacagtggactgtgtgaattgctgttgcagcaggagtcagtcataaggtaaatgttcccatgtggcaggtagacttggccttaattttttgccctctcaccttgatacagggtatcactgagccaataagaccaggctggagtttacaccttctaggtgcacttagtgggatccatgtctaatgccagtaccctctaggttgcagatgtcttttggtgggtgttgggwcatagctgtcttcctttccaccttcctgaaatcctaaattcaactggagggaagcccaacacacctgcttagaattgaggagacagggccggacacagtgactcaatcctgtaatcccagcactttgtgaggctgaggtgggaggattgctttgagctcagcagttcaagaccagtgggcaacatggtgaaaccccatatctattttatttaattaaaaaagaagccaggagtcagggaagaccccctcttagtgcctacaaatgcacatgtctgagcaggcttagaggagtaggggattcattgagctcttttggtgactcagctcagattctcaccggctgcccaagtatggcatttgtcaatagaggaagcagaagagtttgctgatttgtgctgccctgcaaagcaatgatttacacagtttagggagccacaccgtgttctggaatctaaggtgggtgagtgtcccagggcacagggaggtgatgggcacagaggttaataatatattgctggggcaccagcttacccaccacaacctcttcattcattcacgaataatcatcaggatcctactttggtgatccgggtggacttctgggtacttggaatataaaactccctgctttttaaacagaagcttttttacttgttattttctaacaaataagaggctctcttatgcttccyggaagtggcatttaacaattctgaaccttagtgctcgcttcagcagcacatacactaaaattggaacaatatggagttgagcatggcacaaggatgacatgcaaattcatgaaacagttctgaactttagaatgaggagctgcttctgcctggacaaaatattacgatttttaatccgaagggactatacactatgaagttatacctcctctcgattcttctacacagcsagcaggatttgtttaagttttcaagaacagttcaccacagttttaggtttatttgattttaatgaactgggtcccttgcctatttctgtattttatcagaatagcaaatatgcaccctgaaatcaaaagagcctctgacactaaatttaggacatctcattattatcagctgtgcctgtgagacaacaattgctcgtgagcattcactgagggaagcttacaaaattattatcagggacatagtacaaatctagtagggccatgaagtctctctgttcctttgtcattttgcatataaagcaatagcaacaaggttacttcacttcagatgattccttttcagagtgctactctatcagatggaagtgttctctccctgccagcactagtgactccagttagaaccagctgctgatggtctgggaggggatagcaaggctgtgccttcagccttcacaaagctcatttaactatgcacttccacagcctcttcccttgtgtccctgctgtcctagcacattgcttactgctgagcctgattccagtgccattcctgcttaaattaaatacaggcttcagttgcaggagaatgtgttgtcagaagaaaaacaccttgaatgtagaggtatattctgacaatagcttacctagagaaatactagaattttatgcaaggttcaaatcatttctaagccataattgatgtacatctgacagattgttctagtattatactttaagtacctagaaacaaaacaactttctattcaaatcctattggggtgcttaagattcctagccacaaagattcaagggcagaggtacataggtttgaattatgaatggcatcatttcttatcagacagtagtttttcagtcatttcaacccagagcctctaactgtgccattgcattctgaattataggtgtgatgaaccaaggagtggcccctatggtagggactccagcaccrggtggaagtccatatggacaacaggtgagcctcccagtttgattttctaggacttgacagaattcgagttayccttctcagaacatgtgcagagtctctttttgcctcaccatgtggtcctgtgctctttcaggtgggagttttggggcctccagggcagcaggcaccacctccatatcccggcccacatccagctggaccccctgtcatacagcagccaacaacacccatgtttgtagctcccccaccaaagacccagcggcttcttcactcagaggcctacctgaaatacattgaaggactcagtgcggagtccaacagcattagcaagtgggatcagacactggcaggtaagattccttctaaataagcctttgtgaaatacatgcttcctcaaagctgtcttactgctgttagcatagtatatcatacaataaacacccctttttcttatacaattaaaataaattatatatttcataaatggtttggagtttctttgcatgtttacgtaacacactgaaaatggtttgttttgttttgttttgtttttgagacagggtctcactctgttgcctaggctggagtgcagtggcgcgatcttggctcactgcagtctccgccttccaggttcaactgattcttctgcctcagcctccccagtagctgggattacaggcacatgccaccacacctggctaatgtttatatttttagtagagatggggtttcaccatatcagccaggctggtctcaaactcttgacctcaagtgatccacctgcctcggcctctcaaagtgctgggattacaggcgtgagccactgtgcctggcctgaaaatggtttttgggttgtttttttttttttgagacagtctcactctgtcgcccaggctggagtgcagtggtacaatctcgacttactgcaacctccgacccccaggttcaagcgattcttgtgtcttagcctcctgagcagctggaattacaggtgctcagcaccacgcccagctaatttttttatctttagtagagatggggtttcgccgttttggccaggctggtctcgaactcctgacctcaggtgatctattcacctcagcctcccaaagagctgggattataggcatgagtcacagcgccctgcctaaaagtgttgttgtggtttttttgccaaatttcaaagcctagttttctcataaacatcactgccatctttttaagtacattgttttttgtttgttgttttgttttgttttgttnnnnnnnnnnnnnnnnnnnnttgttttgttttgttttgttttgtttttcaggcatttggacattagtatagatgcattgggtaaattaaaaattattggccaggcacggtggctcccactttgggaggctgaagtggacagatcgattgagttcaggagtttgagaccagcctggacaacatggcaaaaccccgtctctacaaaaaaattaaaaattagccagatgagggccaggagcggtggctcacgcctgtaatcccagcactttgggaggctgaagcgggcagatcacttgaggtcaggagatcaagaccatcctggccaacatggtgaaatcccatctctactaaaaatacaaaaattagctgggcgtggtgtctggtgtctgtaatcccagctacytgggaggctgaggcacgagaatcatttgaacccggaggtggaggttgcagtgagccaagatcgcaccactgcactccagcctgggtgacagaataagactctgtctaaaaaaaaaaaaaaaactattttacctcagtttaacaaaaggaaaaaaatattagaaaccgattaggctattcatttagttcaacatacttatgtattttcagtatgtactaaagtacttgtgtagtttctggagagaagtttggaagtttctacttgttcttgatttctaaaccaactttggtcatctcatttcatttctttagagtagaaggtatattttccctttcttcacatgtttacctttttaggaatttttgttaacattgaagtaattattaaatatcagggatgcctacaaaaaaataatgatcaggccgggtgcagtggctcacacctgtaatcccagcactttgggaggccaaggtaggcagatcacctgaggtcaggagttcaagaccagcctggccaacatggtgaaacctgtctctactaaaaatagaaaaatcagccaggcttggtggcagattcctgtaatcccagctactctggagcctgaggcaggagaatcgcttgaacccaggaggtagaggttgcagtgagctgagatcgcgccactgcactccagcgagggcgacagagcgagactcgatgtcaaaaaaaaaaaaaaatttatgatcaaatcttttagtgcctagtaaaatgatataagaaatgtgcctggaaatattctgcagttaaaattcataatatttaataaatattcaatgttttgtgttttaataagttcgtcagaccttagaactgagggaaattttgccaacttaaaattctaatttctgtctctctgtactttaattttcagctcgaagacgcgacgtccatttgtcgaaagaacaggagagccgcctaccctctcactggctgaaaagcaaaggggcccacaccaccatggcagatgccctctggcgccttcgagatttgatgctccgggacaccctcaacattcgccaagcatacaacctagaaaatgtttaatcacatcattacgtttcttttatatagaagcataaagagttgtggatcagtagccattttagttactgggggtggggggaaggaacaaaggaggataatttttattgcattttactgtacatcacaaggccatttttatatacggacacttttaataagctatttcaatttgtttgttatattaagttgactttatcaaatacacaaagatttttttgcatatgtttccttcgtttaaaaccagtttcataattggttgtatatgtagacttggagttttatctttttacttgttgccatggaactgaaaccattagaggtttttgtcttggcttggggtttttgttttcttggttttgggtttttttatatatatatataaaagaacaaaatgaaaaaamacacacacacacaagagtttacagattagtttaaattgataatgaaatgtgaagtttgtcctagtttacatcttagagaggggagtatacttgtgtttgtttcatgtgcctgaatatcttaagccactttctgcaaaagctgtttcttacagatgaagtgctttctttgaaaggtggttatttaggttttagatgtttaatagacacagcacatttgctctattaactcagaggctcactacrgaaatatgtaatcagtgctgtgcatctgtctgcagctaatgtacctcctggacaccaggaggggaaaaagcactttttcaattgtgctgagttagacatctgtgagttagactatggtgtcagtgatttttgcagaacacgtgcacaaccctgaggtatgtttaatctaggcaggtacgtttaaggatattttgatctatttataatgaattcacaatttatgcctataaatttcagatgatttaaaattttaaacctgttacattgaaaaacattgaagttcgtcttgaagaaagcattaaggtatgcatggaggtgatttatttttaaacataacacctaacctaacatgggtaagagagtatggaactagatatgagctgtataagaagcataattgtgaacaagtagattgattgccttcatatacaagtatgttttagtattccttatttccttattatcagatgtattttttcttttaagtttcaatgttgttataattctcaaccagaaatttaatactttctaaaatattttttaaatttagcttgtgcttttgaattacaggagaagggaatcataatttaataaaacgcttactagaaagaccattacagatcccaaacacttgggtttggtgaccctgtctttcttatatgaccctacaataaacatttgaaggcagcataggatggcagacagtaggaacattgtttcacttggcggcatgtttttgaaacctgctttatagtaactgggtgattgccattgtggtagagcttccactgctgtttataatctgagagagttaatctcagaggatgcttttttccttttaatctgctatgaatcagtacccagatgtttaattactgtacttattaaatcatgagggcaaaagagtgtagaatggaaaaaagtctcttgtatctagatactttaaatatgggaggccctttaacttaattgcctttagtcaaccactggatttgaatttgcatcaagtattttaaataatattgaatttaaaaaaatgtattgcagtagtgtgtcagtaccttattgttaaagtgagtcagataaatcttcaattcctggctatttgggcaattgaatcatcatggactgtataatgcaatcagattattttgtttctagacatccttgaattacaccaaagaacatgaaatttagttgtggttaaattatttatttatttcatgcattcattttatttcccttaaggtctggatgagacttctttggggagcctctaaaaaaatttttcactgggggccacgtgggtcattagaagccagagctctcctccaggctccttyccagtgcctagaggtgctataggaaacatagatccagccaggggcttccctaaagcagtgcagcaccggcccagggcatcactagacaggccctaattaagttttttttaaaaagcctgtgtatttattttagaatcatgtttttctgtatattaacttgggggatatcgttaatatttaggatataagatttgaggtcagccatcttcaaaaaagaaaaaaaaattgactcaagaaagtacaagtaaactatacacctttttttcataagttttaggaactgtagtaatgtggcttagaaagtataatggcctaaatgttttcaaaatgtaagttcctgtggagaagaattgtttatattgcaaacggggggactgaggggaacctgtaggtttaaaacagtatgtttgtcagccaactgatttaaaaggcctttaactgttttggttgttgttttttttttaagccactctccccttcctatgaggaagaattgagaggggcmcctatttctgtaaaatccccaaattggtgttgatgattttgagcttgaatgttttcatacctgattaaaacttggtttattctaatttctgtatcatatcatctgaggtttacgtggtaactagtcttataacatgtatgtatcttttttttgttgttcatctaaagctttttaatccaaataaatacagagtttgcaaagtgatttggattaaccaggtttggttgttctgttaaagtggtgtcagatgtttcaagcagatttaactcctgcaagccctgatttcatgctgacaaggatgtatgtgactgccaatttaagagaacaaagctccacagatggagatgaaagtcagtgtccagacctctggttcagggctcgggctgcattaacacagagccaaatgtagtcagactgcagactgaagtgccccacgccacgcctcaggctggcagtcaaggaattcctacatgtcctcagcatgggcagaaatgcaggttgaaattaaaattggagaattactgagggcggaaagtgaggaaagcatgtaagcagtatagcccacttcaaatagcttgtctgtggccagaagaaacaggtggcccaggtgtctttaacatctttataaactcttaaaacatgaccatgcttttaatagaaagtgttggtaaaagcaaccaactgttttcctctaatatcactttgcaaatccctgtggttctgttctcctgaatttaggatagtaccggcatctgtgcccctgagcatattttgaacaatcattgatgtatagctagacatcccatctgaacactgagcaaacaaatattgctattattctgttccttttttttttttcttttgagacggaacctcactctgtcacccaggctggagtgcagtggtgcaaccttggctcactgcagcatgcgccaccatgcctggctaatttttgaatttttagtagagacagggtttctccatattggctaggctggttttgaactcctggcctcaagtgatccacctgcctcagcctcccaaagtgctaaggttacaggtgtgagccactgcgcccagcctactctgttccattttagcctggaagtatgttaggtccctgaatgaaagttcagaactaaacaaattaatggactgtcccttttccctgttttggctatttcatggtatttacatcttgcagatagcacataaatgagacaagaaactccagatttaatactcgtgtgaagactaagcactaacatgctttactaggagataaattactttggaaaacaacagggtccaagagtgtgtgtgtgcgtatatatatatatttttgttgttgtcgttcacgccattctcctgccttagcctcctgagtagctgggactacaggcgcccagcaccacgcccggctaattttttgtgtttttagtagagatggggtttcactgtgttagccaggatggtcttgatctcctgatgtcgtgatccgcctgcctcggcctcccaaagtgctaggattacaggcgtgagccaccgcgcccagctaagagtatatttctttaaagagagttaattcagtgtgaaaaatttaaacacacacacaaaatggagattaaatatcacatcagggatgtaggtaagacttccaaaatagaactgctagatgaacaaaaataactcatttattcactactttttttctttctttttttggggggggctgtaatactgttgtactattattaggtactttctctataaattcagataataaagtgacactccaaagcccatattctttccccaacaccacagtggaggtagagttctagtaataaatgctaatcaggttttcagcattctgcaataagtatagttcttgaaatttattaaaatttatgccctgtagtttacagttggtggtactgcaattcttttcacggcttttttttttttttttttggagacagggtctcactccattgcccaggttagagtgcagtgctgggatcatacttactgcagtcttgatctggctcaggtgattctcccacctcagcctcccaaatagctgggactacaggtgcacaccaccaggcctggctaattttttgtactttttgtagagacagggtttcaccacgttgcccaggctagtcttgaactcctgggctcaagtaatcctcctacctcagcctcccaaagtgctgggattatagacatgagccactactcctggcgcccttaaatagttcagtgtctgataagtaggatagagtcattcctagtaggagagttaaaaatacttttgaggaaaaattaaaagcttatataccttagctgggcacagtagctcatgcctgtaatcccaacactttgggaggctgaggtgggagcactgcttgagcccaggattttgagaccagcctggtcaacacagcaagaccctgtgtctacaaaaaatttaaaaattagccaagcatggtagctagctagtcccagctacctgggaggctgaggcaggaggatcgcttgagcccaagagttcaaggctgcagtgaactataatcatgccactgcactccagcctgggtgacagtgaaactcatctcaaaaaaagcttgcaccctaacaaatgagttctcactcacagcatccaaactaatgtgctctgaaaacctatcttccattgaatacaataattgctttggtagtctacctgcctaaaagtcagaagttgtccaatcttttttttttttttttgagacggagtttcactcttgnnnnnnnnnnnnnnnnnnnnnnnnnnnngagtctcgctttgtcgcccaggctggcgtgcagtggcgcgatctcggctctctgcaagctctgcctcccgggttcacgccattctcctgcctcagcctcccgagtagctgggaccacaggtgcccgccaccacgcctggctaattttttgtatttttagtagagacagggtttcatcgtattagccaggatagtctcgatctcctgacctcgtgatttgcccacctcagcctcccaaagtgctgggattacaggcgtaagccaccatgcccagccatacacccagctaattttatatttttagtagagacgggctttttccgtgttggtcaggctggtctcgaactcctgacttcaggtgatccacctgcctcggccacccaaagtgctgaaagtacaggtgtgagccactgcacccagccttcttttttcttttaatagagacggagtgtatgttgcccaggctggccttgaactccttgcctcaagcaatcctcctgcctgagcctcccaaagtgcttggattacaggcttgagccaccaaccctggccatcattttcaaagtctgttgtccttaaataaattaacattctaatggaaagaagaaaaagaaatggagaggaaagctctagagaaggccaacacaaaattcagtctaatggttctctgtggggtggaagcagggggatgggccagggaatgaacccacagcagacacaaaagttagccaatggttttattagtgtttactattattctttgtaaaaggtatgacgtattttctatatgtatcaaatactaaactcctaaaacaaggtgggttagggcaaacatggagtatggccatataattgagaatcatactatagtttttatacagcagtcaagtcactaaaaatggtttatcaggttaggtttaccaggaatcctagatgacacaactgggcatgagaatacgatgaaccaccgtcctctccctgatggcagaggtcattactggcctttcacattcaagccatctcccagctgtgactctgggcttgctgcactgtagtgtaggtagtgctttaaggagatgggagtagttagttaatggttctttactgaattggttctaagataagtggactaaaattagaagaaaaatctagaaaaaattaggagacatgtttgtggcagagatcattaacttgaggataccctatggccttaagcatcagctttattctcatgcaatagttagaaactattctgaaacttagtctttagtatgtagatttttttttgcttgaaacgatgttagatgtggctatgcaagcatggaaaggtatctgctttttctaccaggctgatccaaacttacactgggtcagattgccaaatcactcaatagactgagcctctgatttagctcaagtctgggatgctttatactgtgtaggttcactttctcatggaaggagcaactgtttctagcagctgaatcgaacagcaacatcttcatcctagagtagtgtgaaacctgttgcccacagtcctcatgaagatccagcccttgcagtttaggggagccaagcaagggaggagcatatttctgttcacaagaacactagcatgagaaatgcgtagtcaatcaagaatttccaccaccctagcaaaaagtttatagtctagtagctggcagaaatacaacctgcataattatcctggtttaaatgatctggcaatagagaatgtgtccataatttaatttgaattctgcaaaaaagtaaataaggttataattagttgcctaaaaacaaagattgccgaaaacaattcgggcttcactgaaaagcatcctgattgatccttgaattgtttaagaaatatttcatggactagattcatcgagtgagtgttttaggaggaaataattttcccacaagtgctgtccagcagtgacttgggaagtactcaagcagagacagaactataaaaattctttgcaaaaacagttattggaatattgtgcagctgataaaggacaagctgtgtcagaacaagagatctgaaaagtatattttaaaaggcactgaaaccaatagtaaaaattcatattgactttattgactgctgaagttcagtctcattcatcttccagccttctctgatactgtctttctgaggcttttctacggtagacatcatctgtatcaaacaaaaagttgctcagatgtttaagaaacatatttaaaattaaaacaatctgaataatttaaccaatagtctaggtctgtcacctacttctgaatcttggcattaatatttaactcaatgccaaaataaacttaaaacaaaacttgagttagatgaggactatgataatggagttctagacttaaatagggtaaaagtcagtgtcttgaaagatagaatcatgtcttagcacatctcttagtgttttaagatgtccctcacttccttctcccccataatttctattctgtgctctgaagtcatccttcttaactaaaacctggctcctcaaaggcacttcttgcctcttggctctctgatgctccctctcccatatccagaaaccttcaggtggggagaggagatcagtttccttgttccagctgctgctttgccagacctttgactcgccaccttcatgtaaagaatcttctttccaggccgggcacagtggctcacgcctgtaatcccagcactttgggaggccgaggcaggcggatcacaaggtcaggagtttgagaccagcctggccagtatggtgaaaccccgtcactactaaaaatacaaaaattaaccgggtgtggtggcaggcacctgtagtcccagctactcaggaggcttaggcaggagagtcgcttgaacccaggaggcagaggctgcagtgagccaagatcgtgccaccacactccagcctgggtgacagaccaagactctgtctcaaaaaaaaaaaaaaaaaatcttcttccttcatggctcatgccatttgtctgccaccatctttctttggcacctgctctccatcatgccccttcagtcaccaaaagtgctggcctctggctcaggttccttgaccctgtcctgtgccttctccccagataccaccattacccatggggatgaagctccagtacccttcaccttcaacatcttccagtcacttgcagggctcctctgaaggatttctgttcataccacaacccccgttacctttccagccctcctgtccttggacctcacgtttcttccccaggtccttggc

SEQ ID NO: 96479 - DNA, 25371 bp, Homo sapiens
gcacttgctcctactgaactgatcggccccatcctgcatggccgttcaccattcgctgggtctttgtcctcgcccaatcttgtgactccagtcctgggtcgcatggcgtctgtggccacacatccggcgtctgccgggcccaggagcacgcctgctgggtttttatggagagcacttctctaccgcagaaaacacggcctcccacacaaggcaagctagtgggaatcaggcaaaaccattcagcaggtgagagtgctgatccaacccagcaaacatccatggtggctgtagctggggctgctcctggcggagcctcagggttcacctgcccaggcccaccccggctttccagggccagtgggtgatgtgagcagggtcccaatgggggccgccatctggagccaccgtctttgcctcccttgggtcttccacagcagcatgggctggtgcagctccttcagaacatggcactgcttcctgtccaccatcctggcaaggagtgggggccgttttaggggctccaactcaagtccttcctggcttaatgacttgttccacaggtcaggaaatgatgataccctcgcaggccaaggagatatacgcaggcccagtggcccctgtgtggtggacgtggcccctctgtgtggtggacgtggcccctctgtgtggacgtggcccctctgtgtggtggacgtggccaagggccctggaacatcagggttgctctcatccaccagcgctctcctgctcttcctcttctgagttgagcaaggctccatcatctgctgcatgctggagtcccactatccatcagccccacacggccccatgggtgggggcaccgtgcttgtccccccccatcttgatgcctgccagtcaccccccgccccacctctgccagcccagagcccctcagcccagatcccattttctggcaccaccagccctggcccatggggagcagccacctcggagctatggcacagtgctgtcaagagcagggccccagcacccctacctcccgaggaggccccagcaccccactccctgcctgtcagccaccaaccagcttcgagaagctctcccagcagggatgggctcggtctcagtgtccctgctggaatattaaacagagccacttgagtgccccaatgtggcactttctgcccatctgcctttcttcgttactcctccctcctcaccccactctcggcacccaggccaggccctgcacctgctcctggagcaggacttgactcctctacctggaccaggcaggtcatgaaagatggggcactgcctgaggtctctgccagattcccaggtgagggagatctgctttccccatggggttggggcggccatgctggcacaaagggctcccgtgaatctggagctcacccagcaaacatccaggcggcggcagcagctctcaaggtacacttgtcctgtgagccgcagagccacattcaggctcatctggtcccgctacccgacagcaagaccctcagcctgtcagggggtccgcagcagatgagagacctgcgaagctgccacagaagccctccgccttccaccgcatgcctgctgtccatgggtggcttactgaagcccttcgttttctcttttcaagatttcccatgaagctagcaaaggccacaggctctgcaaccctgatcttcattgttcccactcctttagaacaccgcggtatggtggagcccagcgcttccctaactcggccgcccgctggagcaggccaggcagggggcaggctcaggagctgtgggaaccgccctgtcccaccgtgtggccagagaagctggtttggggattggcgcggctatgcagagatatgacacagagtgacaagtactccgaggcccctgagagtcccttatttgtctttctggttcttctctgacatctaacctgtgttctccattcttgacctgaagtttcacgagacagccttaaatccctctttaactttctaggctagcacaaatccatctctgctgcttgcaaacagaatcctaaattaatagagaaatacagcaactgtttcgtcaaacccagcataaaaagaggagccttttcagcctcaacctataaaacccagcgcagttactcacacaagtcaaggcagacggagcaagcccagcactttctacacagcaggctgcccccatcacagccagccagcgtctacacagcaggctgcccccatcacagctagccagcgtctacacagcaggctgcccccatcacagccagccagcgtctacacagcaggctgcctatacacagcaggctgccccccatcacagccagccagtgtctagggcagctgcccccccaaacaccctggctcctcccaacatcgcacgggctgtcctcatgctggaacaagacacctcgaggaggaagcagctgccactcatggctgcacacactgcagtttggtctctgcaatgtcacaggtgtagtcttcagacttgcttttatgtagcaaacctaatatgtgaaagtaactagaaagctgttttctcccttctgcttaaagagatgatcttagtacactatgaagcaatcactttttaaacaatccaacacagaaatagtccgttacacattttaattagacataacttctctttgaacgaacacacggatcatttggtgaagtttttccgttgaaacaccccataattggtgcaaggtttgcagaacaattttgtccttatgaaatcaacacctgccagttcacacatacacacacatatgcacgcatatgaaatatatatgcaaattatatatccttatggatgaataagcgcaaaggaggaaaaagcgcatctaccaaatgagctgactggactacggaagagaaatgctgcctcttcagttttgtttttggaatgtccaggtcaattgtgatgccttcgaacttcattccaaagtcaagtctgaagcaagcgaaattagaaagtacaatctcaacccctccccgcaaaagtccttcctttttaagccactgcaacctcatatacaatgttcactccagacaaggattacagtggctgcccctcctccgccctgcagcgagccctcccctccccaaggaaactggacctgcttccgacacctaggatctcccagagctccactccttaccccaaagggtcctctctgccttgctggctcacggttttatagttactgtgacctccaagaaagcagcaggacaaataatgcttgactctgatgtcgctacaaattcagcacacacaccaaccagcacaattacccttttctgcaactttaaaccactttggttgaggagcgttccactgtgggctcacctttcggtacatgtgtggagttaccaaatggcacagcactgtgtaactattccaaaccgaccacaatccatttcaaaagagggtggcctcacatcaacactcaaacttgctgatggaaggcagccacgccacacaaacacgaactaatatcaaccctgtggaaagagcatcttccggccaggcacggtggctcacgcccctaatcccagcactttgggaggctgaggcaggtggatcacctgagatcagaagtttgaggccatcctggccaacatggtgaaaccctgtctctactaaacatacaaaaattagccaggcatggtggcaggcacctgtagtcccagctactcgggaggctgaggcaggcaaactactcgaacccgggaggcagagcttgcagtgaggcgagattgtgccactgcactcccgcctggcaacagaacgagactgtctcaaaaaaaaaatgctcgtcttcctaactctgcaggaccgggtcagcgggtcagtgtccacaccagcttgaaggctctgaacatatctatctcactatagaaggaagctaggctgacagcacactggacattagaaacaggatgaggattaacaatttgcctcgaaaatcattcacctacaaagcagctgactgtgttttcttcatttaaagacaaacgcggagtggttcacacagggacacccagcagaccggattgccgcaggaatggagcctgcaccgctctttaggcaagggtcttgatgcatcaggaagtacaaacaacaacaggaagagttttgtccagatttaccgaaaaaatgactttttaggggccgggtgccgtggcccacacctgtaatcccagtgctgtgggaggccgaggtgggggcggtggatcacctgaggtcagcagttcgagaccagcctggccaacatggtgaaaccccgtctctactaacaaaacaaaaattagctgggtgtggtagcgcacgcctgtaatcccagctacccaggaggctgaggcaggagaatcgcttgaacccaggaggcggaggctgtagtgagctgagatcacaccactgcactcctgcctgggtgacagagattccctctcaaaaaaaataaaaaatgaaaataaaagtgactttttctcagataaagcgatggtggtagagcagagaggcacgctagcagccactgaagaagagaagcatctgagcacccttagccatcacaccactgcactcctgcctgggtgaagcatctgagcacccttagcagggcgtgggtgccgagagcagagcatggcagggggcccgtgtctgttgcaggcagcgcatgttggctctgagcccgcctccgccgcgctcaaggggttccacggatttcaaacaacgcatgcgtgtaaagcgtgtacagctcagggtggaacatgcactccatgaatagtggctctcatactgccacgtgggctctatgagcttaggatttttaacagttgctcctactcccgtacagacgggcaggaggggagaacatggcccttgaaagcagatggacaacctgctcccgctcctgcctggccacacactatcaaatcactgcacacaggttactcgcggttctggagaaaaggtgcccgggctcagactggctccaacactactacctgcgtgacctcaggcaggttagctcttccacatctccgtaaagtgaggtgcgtggtgacgaattcacacagcaggcccaaggctgtgtcctaccagggcctgtgtgcaaggctggcccttgactgacatctgggaactcggattctgggagacttcccagcaccattaactcctacgcgtggctctgtgaccacagtacttgtgctcacggcacagaccacaccaaacccaccctccttctggacaagtcgggaattcccacacaggccaggcagggggtaccacatgaccagcccttagcaaaagccccaggtgctgagtctccagtgagcttattcttaatagttaggtgtgtcctgtatgactccagggagtggatcctggggtgtccacacgtggctcctctgagcgccacccacacaccctctccctttgctgattctgctctgtgctgagtccaaccctgtgctgagtcctgtgagatctcccagcaggtcacgcacctgggggctggccttggggcacctccgcaaagcgtaatagtaatactcacttcacaggattcgactgaggattccatgagtgaacaggtatacaggctcaattcccagtagctatgtgtgacatggggtgataagtgcctgtctaccttgttggctgtggtaaacaatgagataatacatataaaaatattttgtaaagagtgaagaattacacaaaaagtggcattattactcataaatggcaagtattttgagtatatatcattgctaataagtatctgcttgctgaatacagacacaagccaaattccaaacacacattaggtaacaactggatacaacacacacacattaggtaacaactgcatacaacacacacacattaggtaacaactgcatacaacaaacacacattaggtaacaactgcatacaacaaacacacattaagtaacaactggatacaagaaacacttggtatttcccctttatggagtgagagagatctttaaaatataaacccttgataatataatattactacttyctattacctgttatgcagttctacacattatctgacaaattcttaatgtaatctggtgacagagaaaaataatttgaggagaaagtatttagggagtgatgaaacagacagaaaattacttgkgstaaggaccagtattgtatttgactttttaaaaaaccatttttaccctggagctaaaatacgaggttatactgttctgcttaatacaatactggcagcctaaaaatgcttcaagaaaccatatccccaacagcggcagagcatcgggaggagaccctctgtctctgaggcttcggtgcacttctgctcagacggtggcgggagtggaggtcgctgctgaagggtgacggtgtggccatgacacgggcagcacgggaacggaagacgccggagacccagaaggcgcatgactgcctggcctcgagtcactaaaagcagtttgatttcactcttgtcttacttttctagtatggcttcctctactctcttaaacttcttcagttcgacaacgagttcccagtatttgagatagagccacatgagtctgccattctggcgtttgttggtgttccagacatcaccacagtatgtatcatgctgaaatatgtcggtgagaccggctgccatctctaggtcagcggcgacggggtcgacggacgctcgcaccagtaagctcttctctatctccagccgcttgctgcgaggaagaaacagactgcagtagatattctgtctttctgtgagaacagcttcaaattctttcagcaaaagcctggctctcctttgccagttttcttccctttgcaggcagctcaaatacgcacttctcaaaggctgcacctgtcttttttcttgcatcacctgggcccgttcctgttccagaagcttcttttcttctaccaacttgcgtccctgagagataagggcttctcggtaactagcagttctgttttgttccttttcgagttccaaggacaactgagcgacagcacgccgattttctgagatcatggcgtggtacttggcttccagatcctgttgaaaagcagcagttctccgacggtaggcttctctctctttttctacttctttctgggactccctagaccaaatccaacctgacatgaatgaagaaaaatacacataatgaaaaagttagggctgaagttctataatcctcacttaaatcataaggcagctaaggatagtgtttcagtaaaagcttaagacctcggctgtaccaagaagatcacttctacgtgaaaatgtgtaacaggccaagttcttatctgaaaaccaggtaagggctgggtgaccaaaagaccctaaccctagccctttccgtcttctaactgtttgttgctaagaagatctaccaccatttgcctgctccggctctagtacaattggcaaagtttaaaatgtttgggtcgacttcaactaccgttggccaggttcttataaaagttgtatttagctttgcccggtggcgactagtaaacggcctgagtttgagacactgcttatgttctgataaggacacataaaaataaagtgggttaagaagttcagcctcaagacacagtgggcctctttcctcaaactggagactgctggaatctcacgaaaacgggacgaagattgctgggaggctggagggggcactgcccggctctgccccctacaccaaggagcagcagggctggcctgcactgcagagaaatccagcgcctctaagaccggatgactcacacagcctgctggccagcaggcacctggctccgtatagagccaccaaccctttgtccatcccacaagtaagagttggatgtgtttcaacaataaaaaaagaccgtgtgataacagttccatccacattccgaactgatgctgctcaataatttcatgcatgttggagcaactgcatgctaagtcttagttttccaaacagcgacgtgttctgcttgtacattctaaaagcagcacggagttgagtcttctggaaaacagaactgtttggcaaattttcaaagcccaaggccccaaaagccactgagagcagcagtctgggttccctcgtgtgcttctatcctgtaacccctcccctactaactgtgggactccctcgtctgcagccccttctagaaccactggagtttctatcaactttaatggttctcttcctcctcctgctgcctcccccaacccaggtggtgtccttgacattcaattattttctcccgggtcattaatggtcacctttttcttccaggtcattaatggtcacctttgcttttctcccgggtcatgaatgacctttgtgggagcaattccataacagcaagatttccattagcctgaaagccagtcccccttggatatgctgttgacacttcactgagtaagcacaaaaccaaactcatccttcctcaaccaaaaatagctgctagtcctacttcagatgacaactcaaactcacgtcacctttatctcctccctttgacgagagctcacaggcaggggcctgaccaggaaagaagctgttacaacgtcacttgataagcactgaggggtttgcaaaggtatgtgaggagagagaagggaaggctcgtctggttttggtgaagtcaagaacggcttcctaaaaaggtgaatgaacaaagtctagaaggctgaaggctgagcagaagctgcaaggaaaagtcacccgaaattaaacgagcaaggcaggcgagagcatcggagagtgagagcttccaggagccggatgtgcctggggacggggcttatgtcaaggacaagctggagctgcctctggaaagtcacaggtgccaaatgagaggggcccccaggagacccggacaaggagcacgggatatgttctgcagccacgaggagtcaaaggaattaacgtgacttaagagcatccaggaggtgtggaggggtggaggtggggctgcgaggggtggcgccgaatcaagaggagacagggagctgctccctgatacaatctggggacgatctcagtcgagtcacatcattgacacaccaaaccactggaaaactaacacagacaatgacgcacacggttaaacgtcagaccccaccatacaggctgtggttactggtaagtttttggctggacagggagccaggcaggggaggctacaggcagctttgcagaggaaagtgtggcaggacaggctggatgtcaggaaaacctgaattccgagtctgacctgacagactttgggcacacgcaacttttcaaagcctcagtttccggtgagactcctgcttctgggaagacggagtagacrtcctccctattcttcttctaagtaaactaaaaatcctggacatcatctgtaaaacaagatgactctgaaagatggagagaaggcagactggcttgggtccttgggaccccaggaacaacacgggggcaagtcctctagattttcattttgcctcatagatcccatacttggagctgaagacacagtcaattggaaatctcaacgggtgcagacaaaaaaagaaactccaacaaagcctgctgtctctgcccaaaggaccacgatagaggcctggcaagagagaaaatgttccgacagtaatcactctacatcagccaaataacacagaaaaaactacggccccacctccacccacatgggcaaaggctggatggagctgaggctcccactcccacccagcagcaaacacagggtggggtcggggggagccatgtggggagcagtgctgaggccttcccagccggggggcaccagtagaggccggggggctggaactcccatcctttcctcgggggcccatgggggccagaggctgagtggggagcctggacttccatcctcacctggcagtaaggaggctgcgtggcccttcccctgccagggcgccattcaagaaagccagctaagaccgaaggtttaaataaaaaccagtgtttcagcacgtaatgccccaaatgcgcaggttcaaacagaaaatcactcctagtaccaagggccaggacgggtcacactaaatgaacaaagatgatcaacagatgccaagacctggatgagagatggcagtatcatctgacaaggacttcagagcagctgccatgacagagagcctaagaaaataaacacaagacgtaaagaagaaccaaatgaaaattctggaactgaaaaacagaacaactcgaagaaaaactggaatgacggaatcaggactcccccacaaacacagaaacaacccttcgcagcctggccacacacatcattccacaacacataggactcccccacaaacacagaaacaacccttcgcagcctggccacacacatcattccacaacacataggactcccccacaaacacagaaacaacccttcgcagcctggccacacacatcattccacaacacataggactcccccacaaacacagaaacaacccttcgcagcctggccacacacatcattccacaacacataggactcccccacaaacacagaaacaacccttcgcagcctggccacacacatcattccacaacacataggactcccccacaaacacagaaacaacccttcgcagcctggccacacacatcattccacaacacataggactcccccacaaacacagaaacaacccttcgcagcctggccacacacatcattccacaacacataggactcccccacaaacacagaaacaacccttcgcagcctggccacacacatcattccacaacacataggactcccccacaaacacagaaacaacccttcgcagcctggccacacacatcattccacaacacataggactcccccacaaacacagaaacaatcctttgcagcctggtcacaaacatcattccataatacataaaactaattctacagcacggccacgtggggattgctccagagacaaaagacgggttcaatattcaaaaatcaatgcaatctaacacattactaagctgatgaagaaaaatcacgattccatcaattgaaaccaaaaaaaaacggaccaaattcaacacctattcatgaaaaacaggaatacaggggagcttccttgacttgataaacagcatctacggaaaacctgcagctgacactgtacttagctgggagaggctgagtgtgttctctctcaggtcagggaccgtccaacagagtcccagaagctccagctagtgccggaaggcaagacaagaaatcaaaggcaaacaggctggaaagaagaaatacaactaaagtcttactccttattaacaaaattaactcaaatgggtaagggcttaaatgtaaaatgtaaaactaaaactttaggaagaaaaaaccttcaggatctagagctaggcagaattcttagactttccacaaaaagcatggttcataaaaggaaacgatgataagctgcccttcatcaaaattacaacttttacactgcaaatgcccctatgaagagaatgaaaagacaggctacagactgggagaggatacttgcaagccacatatgcaactaaggactagaatctaagacatattaacaactctcaaaactcaacattaaaaaacaaacagtcctattaggaaacggctgaaaggcaagaatactcatttcatcaggaggatacgctgatggcaatgagcacgtgaagaggtgctcgacatcacaccctggagccacgatgagaaaagatgctcaacactgcacagtagagccacgatgagacagcaccacacacccatcaggatggggcagacgggacagcagtgtgagcacgctgrtgctcgacatygcacactgcagccacgatgagacagcaccacacacccatcasgatggggcagacgggacagcartgtgagcacgctgagatgctcgacattgcacactgcagccacgacgagacagcaccacacacccatcaggatggggcagacgggacagcagtgtgagcacactgatgctcgacatcgcacactgcagccacgacgagacagcaccacacacccatcaggatggggcagacgggacagcactgtgagcacgctgatgctcgacatcgcacactgcagccacgatgagacagcaccacacacccatcaggatggggcagacgggacagcagtgtgagcacgctgatgctcgacatcacacactgcagccacgatgagacagcaccacacacccatcacgatggggcagacgggacagcagtgtgagcacgctgatgctcgacatcgaatactgcagccacgatgagacagcaccacacacccatcacgatggggcagacgggacagcagtgtgagcacgctgatgctcgacatcgcacactgcagccatgacgagacagcaccacacacccatcatgatggggcagactggacagcagtgtgagcacactgatgctcgacatygcacactgcagccacgaygagacagcaccacacacccatcaggatggggcagacgggacagcagtgtgagcacgctgatgctcgacatcgcacactgcagccacaatgagacagcaccacacacccatcaggatggggcagacgggacagcaatgtgagcacgctgagatgctcgacattgcacactgcagccacgacgagacagcaccacacacccatcaggatggggcagacgggacagcagtgtgagcacactgatgctcgacatcgcacactgcagccacgacgagacagcaccacacacccatcaggatggggcagacgggacagcagtgtgagcacactgatgctcgacatcgcacactgcagccacgacgagacagcaccacacacccatcaggatggggcagacgggacagcagtgtgagcacgctgatgctcgacatcgcacactgcagccacgatgagacagcaccacacacccatcaggatggggcagacgggacagcaatgtgagcacgctgagatgctcgacattgcacactgcagccacgacgagacagcaccacacacccatcaggatggggcagacgggacagcagtgtgagcacactgatgctcgacatcgcacactgcagccacgacgagacagcaccacacacccatcaggatggggcagacgggacagcagtgtgagcacrctgatgctcgacatcgcacactgcagccacgacgagacagcaccacacacccatcaggatggggcagacgggacagcaatgtgagcacgctgatgctcgacatcgcacactgcagccacgatgagacagcaccacacacccatcaggatggggcagacgggacagcagtgtgagcacgctgatgctcgacatcacacactgcagccacgatgagacagcaccacacacccatcacgatggggcagacgggacagcagtgtgagcacgctgatgctcgacatcgaatactgcagccacgatgagacagcaccacacacccatcacgatggggcagacgggacagcartgtgagcacgctgatgctcgacatcgcacactgcagccatgacgagacagcaccacacacccatcatgatggggcagactggacagcaatgtgagcacgctgagatgctcgacattgcacactgcagccacgatgagacagcaccacacacccatcaggatggggcagacgggacagcaatgtgagcacgctgagatgctcgacattgcacactgcagccacgacgagacagcaccacacacccatcaggatggggcagacgggacagcastgtgagcacgctgatgctygacatcgcacactgcagccacgatgagacagcaccacacacccatcaggatggggcagacgggacagcagtgtgagcacgctgatgctcgacatcgcacactgcagccacgatgagacagcaccacacacccatcatgatggggcagactggacagcagtgtgagcacactgatgctcgacatcgcacactgcagccacgatgagacagcaccacacacccatcacgatggggcagacgggacagcagtgtgagcacgctgatgctcgacatcgaatactgcagccacgatgagacagcaccacacacccatcacgatggggcagacgggacagcagtgtgagcacgctgatgctcgacatcgcacactgcagccacgacgagacagcaccacacacccatcaggatggggcagacgggacagcagtgtgagcacactgatgctcgacattgcacactgcagccacgaagagacagcaccacacacccatcasgatggggcagacgggacagcagtgtgagcacactgatgctcgacatcgaatactgcagccacgaygagacagcaccacacacccatcaggatggggcagacgggacagcagtgtgagcacactgatgctcgacatcgcacactgcagccacgacgagacagcaccacacacccatcasgatggggcagacgggacagcagtgtgagcacgctgatgctcgacatcgcacactgcagccatgacgagacagcaccacacacccatcatgatggggcagactggacagcagtgtgagcacactgatgcttgacatcgcacactgcagccacgacgagacagcaccacacacccatcaggatggggcagacgggacagcagtgtgagcacgctgatgctcgacatcgcacactgcagccacgacgagacagcaccacacacccatcasgatggggcagacgggacagcagtgtgagcacgctgatgctcgacattgcacgctgcagccacgatgagacagcaccacacacccatcaggatggggcagacgggacagcagtgaaacaccaaatactgaccaggtggagaaaccgatcagctctgcattgctggtgagaacctaaaacggtgcagcaactcgggaaacatttcagcccttcttaaaaaactaaacgtgcaacctccataaaacccagtaatttcacttctggccctttatccgagagaaatgaaaacttacatcgacacaaaaacctacacaagaatgtttataagagctttattcataacagctgaaaactggaaaggacccagatgtctttcagtggttaaacacactgtggtacgtccatgtcataaaacacgactcagcaatgaaacyatctatgaactactgatacagcaacaatctgcatggacctcagggggttatgctgaatgaaaaaagtcaacccgaaaggttatatactgtttgattccatttacataacattcttgaaatgacaaagttctggagatgaagaacagatcagtagctgccgggggctatggagggaggggcggtacacagggcagcacgtgaggccccagggattggggtatcttgaccgcatcctggcagatgtcttggctgtgacactgcactatcgttttgcagatgcttccaytggggaaagctgggtagagggtacacgggctctctgyattrctgatgacaactgcatgtgatttacatgaccccaaaataaaatatttaattaaaagaaactgagttgggcccagtgaactcaaccagtccctttcagctctaaaactatgttttctgggtcaggggaggaaacaggaggtacaggaacrctagaggggagaaagcacggagagatgggaaaagcacggagagagagatgggraaagggcaatcaagaagactgagagaaaaggggggaagcagaatgacagaggaggtgtgaagagagagaagccctctggagcgctgaaatactgaatattctcccctgggagctactcagggtaagaatttctccagggactgctctttcaggcaagcacaattacacacatttctatgttatgttaagtaaaaatctagtaaatgggctgggcacggtggctcacacctgtaaccccagcactttgggaggccgaggcgggcagatcatgaggtcaggagatcgagaccatcctggccaatgtggtgaaaccccgtctctactaaaaatacaaaaattagctggacgtggtgaggggcgcctgtaatcccagctactcgggaggctgaggcaggagaatcactagaaccagggagtcagaggttgcagcaagccgagatcgcgccactgcactccagcctggcgacagggcaagactccgtctcgaaaaaaaaaaaaaattctagtaaatgaagcgagtgatcaggacaaaactagcctctcatcaataaatcaaccaatagcgcttatcaagtattcatatgtctgcctcttcttctagactacactaggggctggttaacgctcctatgtgcaacagaacctcaaacacatcgtaacacacctttggagaatccttacaagaacaccaacttaacagttctctctgaccacactacctcagcaaaaaaccaggaagaaaaaaatattcttcaacccttttcagggacagaaagcatcatttcaaaagtccaagaagggaaggtaagaatttcaaaagtgaaagttatcatgaaaggctataaaagctggagatgagtctgaaaaacaaatggaaaatgagtcacttcagggcctctcccagcctcaaagccaattaattattacattagtcagagtaattttaagccttccaatccactcaccctagccacaggcaacagtagcctctccaagtgttaagggttttttttcccaagcctgcaggcggatgagctttttacatggcagccccttaggattggatgtggacctgccctgtctttcaccaagaagcaagcactgcgcagatcactgaatcataaaaaccacctgctcttaccagcctcctcttcctctacagcaaaacttctgacctgagacatggaagcagataaaaagccactacacaaaatgtatcgctacaactagagggcagttttgcctttcttccattcaattattcagtttctcatgttcctaagtgccagcccagaaccatggaatgtgaagaaacacaaaactcactcctctgcatcagtgaattgattgtgtggtggggatgtaagtctgcatatgaccggcaggtccccaaagtggtgccaagtcaatctaaactagagagaatttttctggccaggccaagcagagatttcatggatgaagtctcccaaagactgatttcctaaacattaaacatcactggttttccaaaactggttttcttttttttttttttttaaccctgttgctcgggctggagggcaagtggtgccatctccactcactgcagcctcgacctcccaggctccactgatcttcccacctcagcctcctgagtagctgggactacaggtgtgcaccgtcacgacttgctaatttttgtatttttttgtagagacggggttttgctgtgttgctcaggctggtcactcgatctgcccacctgggcctcgcagagtgctggggttacaggtatgagccaccacgcccagcccactggtttcctttacacccgttttgttccccagcagtccttatgagggcacctgaaataaggaacctcctccccgacttgagagcagcaaagccttcagagggaactaagttattaaaacccaccccacacaaaatgcttctaaacgccttggctgacttaatccttgcagtgtgctgaggttaagtatgattatccatctcctgtgaacaggaagactgaggctcagagcttaagtgatttgcccacggttcactgcaggggataaaactcggctgtccctggcaggtcccaaagtcacggccttcaggctcccacaccatgctgcctccctcaccggggctccacactctcagcctggaaaacacgaattttaagaaaaccatgacttacgaaaagcagccaatcccagcattggaaccaacagggcataattccacctgcttccatcaccaccatccgccctggaattaggccggatattccaatttgggggatcatttaggttattcatggagatataccttgaagtaaagaataaaaacgttaactacttttattcaagaaatttttcttcagttttaactatgtgcttgctgcacagcactgaggccctacgggattcaaagaagaaaaaaactagaccagagccgggcatggtggcgggcacctgtagtcccagctactcgggaggctgaggcaggagaatcgcttgaacctgggaggtggaggttgcagtgagtcgaggtcgcgccactgcactccagcctggtgacagaacgagactccgtcccccccaaaaaaaaagaaaaagaaaaaggaaaaaaaaaacaagaacttaagatgaaagcgactcacaatctggttggggaaagtggagaaaacagacatgtcttaagcatctgaagtgcaggtagaatcaggtaagttctctggtacaaatatgtttaaatgtatggctgctgcgatggttaattttgtttgtcaacttgacggcatcatgaggtgctcagatacatggttaagcattatttctgggcgtgtctgtaagggtgtttttggatgagattagcaattgaacctttaaaccaattcctcacgtctcccttctatttgttgtgtctctggagaaccctcatacagttgtatcaaagatacagaatcaactcgataaaagtgggctcacaccggacactttcatatgagctagggtttgaagagtgagcagcattttgacaggcagagaaagaaggaaagggtcttctgatcagaaggaagactgtgaggaaggcagggaggggtgatgtggggaaggtgcaaacagtgctagaagcttctgaggcctcctcgtggtggtgatgaatgcagagattacagagttctctgcttcgggctcagcatgcaccctccatagctaggctgggggctaacgttagtaagaatttactgatttactgagtacctacacgargtttcacattttcacaaagtagagtcactttaagtttgtttacatgtgamctccacaaacacacacrattacaaaatagtttagttaatcaagggatgtataataaacaagaggycggaggccccgggccgctcccgcccacctccgcggacgagcgcccccctccgaccccattccctgcggtctgggcgttcaggcccttcggtctgggcgatcccggagaaccacccacggggctttaaaaatgttggtgcccaccacctccccggaacagggcccgctctacctcggtcggggagcgcgggacctcagcgttcccttaacgccaccgtccgcgggtccgctttgcgcaggcgcggcgcccccactcagtacccgctccgggcgtggcatggtgcgcaggcgcgatgtcccccactgcagccccgctcgactccggcgtggtgcgcaggcgcggtatcccccctcccccgccagctcgaccccggtgtggtgcgcaggcgcagtctgcgcagggactggcgggactgcgcggcggcaacagcagacatgtcgggggtccggggcctgtcgcggctgctgagcgctcggcgcctggcgctggccaaggcggtgagtccgtgccgcggaccggggcggggcaggcgggggccgaggcggcggtaggagcgggacgatccccagcgggtccgagcggagcgggcgccgggtccctgcgccctctgtcccgggatcgggaaggggctgagagagccctgggccggtgcgaggggaagccgcggggcggactcggggacccggggagctcggtccttagtagatagtccgcgtccgggtgaaggtcacaaccccgcgggcttgctgggcgtcccctccgccgccttggtccgggcctggggtcctgggaccccgcgggctgaggtagcccctcgcctcagtgcctggcaggtggactcggggaggagtcgtgtctgcccaaggtcacccgggcggatagcggccggtggccgccctggctgggctgggcctctgccgccctctgtgcgggttgtcctgaggagcagcccgcagcccgtgggtggggccggcggggcgggtgagaccgcccgggtgggtgcgaggagtggccgggctcggcccggtgggcgtccggtgggaagcgtggcgcgcccgagcttaggcttgcagttcgcctttccagaaagcgcaaatctgtccatgtccacttcgagaccttgtaagttaagggcttctactttgggtcgtgtttggtggtccttatgccaccaaaaatgtgccagtgtttaaaagcagctgtgccagtttttaaaactcaggcggagagctcagcgcactgaccgggcgaggacgccgggacctgtgcttgcctgtgcgctgagtgcctctagggccgggctcggcttagtccaggatggtggtcagggttatacttccctgagcccttgctctctgagtgtctgaatgtgccctctacgattgcatcttaagaatcggccttctagggttttatttaatcaagctaaattggataggtttagttgtttggttcttttaaatgaacttacccacccacctccttaattacaaagtaattttaaattgcagaataaaaatctcaataggaaccaaggcattcagcaatattgatttgaattatgcctgtaattgtgcaattttctcctttttgaaatacttattaaaaatctcgttgagttaaatgtgaggattagtcatacagccatcctgccaacatcagaaagcgtgtaaaccgttctagtgtgttgctgtggttggtactgactgagcagagacccctgccgcatcttgggcttttaagagctgctaggagggcgtccacaagcaggaaggaaagcccatggtcagtggggctttttaggggaaatggtagcttgtgattggagaaaagctagagctagtgcctttgtcctcaacccagatggtgcccggtgttccttctgcagactaagaccctgccagcggcggaggcacctcagacgggatggcaagatagcaaaattgaaccaaaatttagtcttgggttttgtaaaagtctttttatcttgatgaagttagcttttcctacagaaattctgcctgcaagcagcatatttatcggcatttcagataggctttttttcctgaagaattggagtttacgaaggaacagcataatcaaaaaattagcagaaaaaagaaagaaattcgtgatagccaactgagaaatgtgtttggaaaatagatgctgaggataatttcagtaaagtccagagagaattttttaacctcattttggccagttctgtggtgttttgatcattctgtatttacaactgctttcaagtgacgaacttatcagacttattttgcttttggtttctttttatggcccagtgcactgacacagcttgcaaactgttcgaaagcagtttaatcagaggaaaaagaaaaccaagaaacttcaatagttactggttaactgcttacttcaggtgaagtttttcaaatcccttaacatgaacatccaatatattgttctaggacaaattgatttcttttctttgaatggattgttctgaatatgtttaatggtgttctagaaatacattatttaggccattatagtagtaaacctttgctttgcttcttgggataattgtaacaacaatggcattccattctgcattcctcatgatgtttttcctgatttatttgaaaaattgtgacttgttttttgatatgaaacctggatattaatattagttgggagtctcagagatttttcccaagggtctttagataggggggcaagtccaggatccagagccaggccggccgacttgaatcctctctgagctccgtctttccgtggggttagtgaggattctgtgggtaatgtttgaaacctttggtgatgctcttgagaaccagggctcacagcctatgcacagtaaccatgtgtgaactgaatttttttttttttttgagacagagtctcactctgtcacccaggctggagtgcagtggcgcaatctcggctcactgcaagctctgcctcccgagttcacgccattctcctgcctcagcctcctgagtagctgggactacaggcacctgccatcatgcccggctaatttttttgtgtttttagtagagacggggtttcaccatgttagccagaatggtctccatctcctgacctcgtgatccgcccgcctcggtctcccaaagggctgggattacaggtgtgagccaccacgcccggccgaactgtattttaagtatccctgtttttaaaataataaacactaaaattctagtgagaataattacacgcagttgtaaaagaatcaatgagtataccctccctcacccagttcattttccatgaaagcaattcctgtttctgatactgactcctggcatttgtaatacctctgtttctttagcggatatgcaggtgcatttttatcagttttagacttcttgcctagagaggggatttagttcacttaaactaccctgcttccgcttcttcctgatacagtcgtgcgtttttaggttcttcgttggctgcttttgtgattgtgtaggttgtacatgcagattagtttcttgctcgtgatttataggtgcgttgtattagatgaggaccccttactttgctagatttcggatatgaatgtctctgcacttcttacttttcccctccacctcctaattcagtcatctgaaattctgtattgttaagcaaggtctaagtattccttttagttatatgttccccattttttttcttgaggaaatgtttgatagtttctcctaaaaaaattaacaattggcacaaaagactagttttgtgtcaaaactagttttgagttttatctaaagactgaaattggcttaaagttgggctttccaaattcaaaaatctgccccagattagatttagattgagagggttagtgtccttttcgccagggggatggcgtgataatttgttcaagattgtgttatagtagctgccccttttaagccagctctgtgtgtgtgtggtggggggtgggcagtgggtcttccacatcaacatcctagaaagaacgaataaacattgagtgatctcactgtttctacttacatttggtataatatactgttcttactggtgctattactatgttaatagggcactttacaacattttcaagaacatttgtattaaaattatttcaaagacttctttcttaaaatatgattttaccatgcaaaaattttactaaggtagaagaatatttgttctttctcattcattttctgaaaaaagaaaaaagctgaattagcttataccaataaaaacagagactagaaattggagaaatgaagaataattttttatcccacataataagtaatttctgaattgcaagtatttctaaatacttgaagacattcctcacatcccctcttctgattgcatttatttcctaaagcttttttttcttttcttttttttttttttggagacgttgtctctctctgttgccgaggccggagtgcagtggcacagtctaggctcactgcagcctctgccttctgggttcaagcgattctcctgcctcagcctcccaagtagctgggattacaggtgcccgccacgacgcccagctaattgttagtagagatggggttttgccatgttggccagactggtcttgaactcctgacttcaggtgatccacccaccttggcctccccaaatgctgggattacaggcatgagccaccgtgcccagcccctaaaactattcttgatgatatttctgagactattcagtggtcttctcaaatgtagccagcagaatggaaaacgtatcccctaaatggctggccaaccttagcatatggacagtgtcacctctctcacacagagccactaaaaactaaacaccaaaaccagttttcttgggtaaagttttctaagatggaaaatttaagcagcaagatgtgtcaagttgtagatgttggccaggaaaaagccagcagcagccaggcaggggagagtgtgcatccgacatcctcctgtgtgatgaagggatgacacctcgtccctctaggctgtcagcttttactgttccaggatacagatctcctgattcaatgttgagtgccttttgaactgaccacaagccctcctggacgattggaactgtaatgtggaaagggctatgatggagccagttaaaatgcttcattacttgcaaaataccacatacagtaatacaatatacacgtctttccccttctccactaagtagcatacattaagacttcacagaggaagtgtgcctttttcatttcgtatctgagtcagtgagtatcctgtttggaaacaagcttcatcctggttttctagagtgccaagtcagggtggaaacgaggacctgggggctcagtccttccttgccccttgggctgccttcagggttaagtagagggtcccagctgagctctctggatgcacaggagcacctgggtacataagaaggtgaacagtttgcaaggggaaattactatcccccacagcatttgttccttcaggacactaaccctctggatctgtgtcttctgtgtctccagtggccaacagtgttgcaaacaggaacccgaggttttcacttcactgttgatgggaacaagagggcatctgctaaagtttcagattccgtaagttcatgctttttgttccattataaatgatttttttggcttagggggtaaggatctataccagtttgttttcatatgagtcatagacataagggaaaaatttctcataggtatccaatgcatgctgaaattattttcagtgtaataatacttaattgcaagtacaaatataaacatagatgtttacatttttacttgtatctgttatgtatctataaactagatttaaatttagatcaagtaaagcaataaattaaaataaaatgaacagtgtctgctgtgatagatgataaaattcctactgaaaataggacggtggggccagtgaacagtatctgctgtgatagatgataaaatcctactgaaaataggatggtggggcccctcgggtgtgggttgctttgtatttagtgagcctatctctgttgaaaaactgaaacttgctgagaagttgttttcttataagcccacaatagcgactgaatactccttggcaccttctcaggcataagcataggcacggccctgaagtagagttgtggtcctcagtctgaccccatgggat

SEQ ID NO: 96480 - DNA, 13009 bp, Homo sapiens
tgagatgattaaaattgggggaggggaggacttggtagggtaaataaaaaagaactgaaatacttaatgatgtcatcaagcctaccaccagacttcttgttacatgaattcataaaataaataattgcttaaattactgttaataggattttttttttttacttgcagctaaatgctttctgatgcccactataacctgtcttattagcaaactgctcctggatggtaagatcacatgtttcctgtctcttacccttacctcttattcatttttcaatacagtctggtttttgccttcactggtatcctgaaattgttcatgccagtagcacccatgaccactctgcttcacctgagggatgcttttcagcctttagtcttatttgacatctttttatcttctgacactgttagccatcccctccttctcaaaatgttctctccccttggccttcatgacatcatgatttgtaattaaacacctccctgttttttttagttaaatgcttgatctctctagtctataaacttcatgaaggcagggccatgtctgtcttgtttatcactgctctttcagtgcctagcctatagtaagtactccacaaacatgtgtagactaatgaatactaagaaaagcaattactcatagaacttaaaatacaggagaggcattagtagatgttatgtagactgtgcttggttggtggcagacctgggaaaagcaggtcttgtgattttttagcccagtagctcttgtatcacccaccccaccacctctgtgcttcatggcatgctaatatttccaaaatcttttcctggagaaaatacaattaaataatgtattttatcattcataatgcagctttccatacatgttatggtttgaatttttccccacaacttcatttgttggagacttcattcctcagtgtggcagtgttgggaggtggggcctagtaagaggtatctaggtcatggcctttctcattattacctttctctcaggaatgggttagctattgcaggatttcagcccccttttctctctcacaagcatgccctctcacctcttctgcttttctgccatgctatgaagcagcacaaggccctcatcagatgcaaccaccaggtcttgaacttcccagcctccagaaccatgagctaaataaagctctttcctttataaattatccagacccaggcattttgttatagcagcagaaaacaaactaaatacactactactattctaattcattagtggcagggggataaataaaaataggacaataatttatattttttatatgaagattcatctgaagaaggatataattaatttgatatttggtgctctgctttcctgggactttggctaaagaatgctgtttgcatagccaaaactttcttcctttcacaactgctgtgtttcctgataatatcaacctttccttttgttcaagtaaaatatgcacaaaatcttctcagtaaaattccagaatctcatctgtctgctatttaatgtcccacatggtatactttaaaatgtttttttctgttatccttccttatcagtagaaaagaagaaagacacagattagttaggatgtgaacattagcaacataacaccacacattcatgttttggtaatgtgttaactagaaactgtttttgcaattctaaaaagctttcttcactcaagggaagaaagtgcctatcattcatcatcacattcttgagaatgtttttctgagctgtagatacggacttctgcacatcaccagagtgttttcaagtatgctggctgtttgctgttcatgtctgacgctaaccctggacccattcctttgaggcctccctggacccattcctttgaggcctctctctgtgtatgttccacttttcagaagctagtggttttagttggacccttttaagttaaggttctcacccaagaactggccagcaaaccatcaggagctgagagctttgggaactggtctttcattctctctcaatgtctccctccttattgggagctctcattgcccccttggctttatggcttctatttctatccatcttttcagcttcagcttttagtactaaccagtttttcctctgatagttcacaatccaaattcccatggaagaaatctggttaactcatctcaattctccatggccaagttgtgttgaaggtcattgtcagcccatgaattggctgatgccaaccccggtgctgaggccaggatgactggctgggtatgagtgggggtgctggggtaacctacaaaacctaatagcacctaacatacaacaaaagagagaatgagggcaacttcttaaggaaatcagagtagacgtcttttatattgtgggtaggatttctttaaaactttaacattcatctgaatagtctattcttttattcattagttttagcgctatattaactatatgatatgaatttaatgttatactttcattattgcttcttgataatatagtatccaaaaaagagtctagacctatttcacagaggaggaacccagagatggtatgtaactatcctaaagtcatggggttatagaaaggcagagaatgagaagcagatatcccaattcccagtcaaaaaagcggatatcccaaattcccagcactaacatgaactggattaaagaacctagataatattcccaataattaggaaattagtttgttaccaaagggatttccttcttttctcatctaagaggatatgccaaagagaaatgaacatgtgaagagttctaatatgtaactactgttataaaacatttaaaatgtaaaattggcaccttttcaaaacttacacattaagaaatcattttaaagtttattcaaatgacagaatcttatcatgcttcacattctgttttttgaatacttaagaaaacttctataaatgtgtaacaaatgtatgtatgtataaattaattataaatgagaaaccaccctttacaaaaaaaatttatttattccatcaactacacccaaataatttcaaaaagtatatcaaagaattatttctaaattgatttttttcttgctgtacgtagcgctaaggaaaacctgtcagctcttaagcttttgtttgacctgctttgtcaaatgctttgtgaaatgatattcagaacagcaccatgtgatgtcaacttgcattaattctttcccaaagagaggtgttcagtattcaaactgtgtttatactggcacaatctatttatgtgtcagcttcatttctgaaagtttacaagtacctcttcctttggaagactctgttctttcttgcaatttctcttctaaaacaacctttgaaaggacaataataatgtcctataaagctcctttcagggaagtcattaagaaaatgataaatatttcacagaattgaattaaaatgttggctatatgtcaatgttaagttttactattttcatcacagatatatcatgaaaaattaaaactttcatttattcatctaaggaaagatttctcaaagaagtaaatccataaacaatattgtacatgtttttatgtaaaagataatttattaatttgttttcagctgtcaagaaccgaatgcatttgttactaaaattataaaatgtcccttaattaggttatagtaatgattgtgtatattagcaaacacctaaatgttttactgattgggtaatgtggggtaaataaaaaaacattcatttcaaatttcttcatttaaaagaacaatgtaaatcatttatctattattctgtcttgcttagaaaacacttaacagaaaggtttcattaagattctaaatttagactttgatgattttgaaatgaattcctggtttcctctattcccctgggagccagttataataatttcaaggacagtcattagcaactctaattcagttgactgctgaaggtcttttttcaagttttgtcctttccaccttttttctgaagccggtttctggttggttcggtcaataccaaaggttcttgtatgatgactgctgggtaatttttgcctaatagttcaacttccacttgctgtcccacttcacttagttgtacagggacatatgcgaaagccagactcttctggatgctgtagctatagcttccagatgtcgtgttgccaaccacctggaaaacaagacccaacagtcctcagcatcttggtcacagctctgtgctcctcatctctgggtgaaaaaaaactaaaatacagattcaacttacaaaatggaagttttatgaagtgctgtctggggggacaacgccagagacacaggaggaaaacttcacattttgagaagatgaatgaaagtttacaaattatgaaaagtaattatcaaggtacacatctgtattactctgaaatttctcatttttaaaatagtaatacttggtttaggccaggagtggtggctcgtgcctgtaatcccagcacttggggaggctgaggcaggcggatcatttgaggtcaggagttcaagaacagcctggccaaaatggtgaaaccccgtctctactaaaaatacaaaaattagctgggcatgatggcgggcgcctatactctcagctaatcagaaggctgaagcatgagaattgcttgaacccgggaggtggaggttgcagtgagctgagatctggccactgcactccagcctggatgacagagtgagactgtctcgaaaaaaaagtctatataacaagcttgattaaaagataaaaaggttactggaaatcaggtctaaaggaaagaatgaaaaagaaggaaaagcagaaaatacagaaacattacattacatcaaaacattacatggaacaaaaataaaaggaagacaacaaaagtaaaacacgatatatagccctgctcaaaatggcttctcctggccacacaacattgcactaatccttaaagtcctaccgtctggcacagtggactgcttacagctggagctcaagacattcatggatggaaatcagcctggtgatcattcagctgcctcagcaaagagcacattacaaacaacaatcttactatagcacttctagtattttagatgctaacacattcatgactttaattgcagactcctatctctgtagtcccagtttttaattctctctttgaaaccccaaatcagaagctctccatatgatttctctctctcttttttttcttttgtttgagacagagtctctctgtgtcacccaggctggagtgcagtggctccatctcagctcactgcaagctccgcctcccaggttcatgccattctcctgccccagcctcccgagtggctgggactacaggcacccaccaccacgcccggctaatttttttgtatttttttagtagaggcggggtttcaccgtgttagccaggatggtctcgaactcctgacctcgtgatcagcctgccttggcctcccaaagtgctgggattacaggcatgagccaccacgcccggctgttctccatatgatttctaaacttactgtgaaaactggttgaccgtgaaaaaagaaaactttttgactgtgaaaaataaaatgtgaatacattcattagtaaaagtttatctctggctgattaataactgccaaggtataacacatgctttaaaattgcttttctcctttagatcatagttcagtgatacaggcagggattagggtcagagaggttagaattttaatcattgctttttttttttttttctggtgtggagtaagactactgacactccatatttattgctttatattataagaattaaagaagcagagactagaaaatcacttttggaaatttcacaatcaccaatttgcaacagaaatggaggcataatatttacgctaacaaatatgttggaagaattgtcacctcagcccataactgcaagtggatactcctggattttcacttactccattactcagtgatgaacattttttgttttttttccaaagccttagatgattttcaggtgaatgtgtgttgttcttctccactagtatgtttctggcacagttatgtttaaagtgatctggtcctacagaatccctccataccagcgtgataccaccaccatgatattcctcacatttaaaatctccatgagatgaagaagatgcccaccagctgctctttccccatcatcctcacaatcctgtaagaaggtctgtttattctcacaatatactctgtargcatagatgctgtgggtggtactagctattttcttattctcatacaagttggaaagaaccattttcacctgtttgggacaaactrctggatcaaagtctgcctgaaaagtacttattcggtctgtaacagaaatgccatgatcaatcagagataattctatttctctttgattttcactgatatcaaaatccagtgctktcaccgaactttctggctgacatgcaaaaatgagatcatcttcacattcaacatcttcctcttcagtttctttctttrcctctgggcctggttctgtcatctgaggtttttgtattggaacatctcttattttctccactcacaggtaaagaatactttcaccaatattctgtcattttctcattaaatattttgggaggaaaagaaacttagcctggatcccagggacacaaagcaggtactctcaccgaaccagatggggtggccacatatatatttcctcaggctattcaataaatggacaagttcttgccctttaagccaatgagcattcaactgatagacaggtggagctgtacckgggtcctcatttggcagcatcacttgcaagcaaagtgtccatttggggtcatctatatcgtagctaattctaatacaaaatattttggcacagtcatcaatgacacaccattcctcgccatcaatggctaccattgcttcaatttcctcatcctgcctttggttactccctgcrtccccctcagccatgtagccctggaagcagctctgcggctgcacctaatcattgcttttgtttgcttgttttttgagatggagtcttgctctgttgccccagctggagtgcagaggcgcaatcttggctctctgcaacatctgccttccaggttcaagctattctcttgcctcagcctcctgagtagctgggactacaggtgtacaccaccatgcctggccaatttttgtatttttagtagagacggggtttcaccatgttggccaggctggtctcgaactcctgaactcaagtgatcagcccgccttggcctcccaaagtgctgggattacaggtatgagctagcatgcctggcttaatcattgctttttgaaagactttcttgataaccttgttttcatttccccatctgtaagaaagagatttgggtttggagccctggaagagttaagctggtttgcttgagcatcttcagaaaacaggaagagacctaggccagtctcagggtgtgatcccctgactcactgggtcaaaagcacacaatcctcagcccttctcatctcctaacatcccagcagtgatttgtcttgcagtcattctgcattagtaacctaaaaaaatagagtccttatttatgagtgctatttttaaaatttgccttgctttctgctagaatttactttcatttctacttgaatttctctctaatccaggtttagaagcccaggatatttcagaaatctggcttttccttttaccttattactaaatctccagggaaatgttttcccttgcataaattttaaatagttctacctaaaatcttccaggttcaattagatccattctgccttttagttcagtgaactgtgagaacaatctgtccccaccctctgcctggcaaattctcattctttgttaaaacaaacattgaccttctttttaccaatgtgaataattctcatttatttttagccttttctcatttctctcgcaaattatgagaagtctctatctgacttccagaagataacatggcaaatggcctttgaaggaagttaacataatttaagtttgatgttctattgtgtttttctttgactgtccccgtgtgttttagtttacaaataataattttaaaaaaccttctaagctctccaaacctctccacaaacctctttttcaaaacttccttccaagctaagcatcttttaataactgagccaccgaatataaagaaagcctttctcatgaccatctttatgccttgatttcaaaaaaattaaacctcatttaaggttataatccctttctccagcactgcccagctccctgttggacttgacctttccccaaggcactaaagaccatctgacatgcaatatactttatttattttgtccattgtctgtctctccctcctctggaatgtaaactccatgaggtcagagattcttgtgttttgttcactgctgtattcccagtgcctagaatatcgctggcatatggtagacacacacacacacaaaaaagtcaataaacaaatacatttgtaccctatctccagcattggaaatgcttgcaagaataaaatactaaataccaaaagcaacacaagtcaagacaaagtctgaaaagaaaaagcaaaaattatttcatatcagtccagagtaaagaggatccaaggagggcctctgaaaaaggatcaaaaagaagactatctgtatgtaaaatgatgaccttactaagcatcaaagagcaggcaaactcatattaggaaatctaagagatagaatcctataattggattagcagctttataagcagatggcaaggaatatagcatgtaaatgcagtatatgcatagggcaaaggaaaaaacctttagattagaccttgggttttcagggttttaaaactaattttgttatcatcatatttaaggtggctaaaaatcagttgattgtggatgacgtgggaatacagaataatatagcataatatctctttcattccatgctgagtaaaacagaaggttggtggaagggtaagtgtagactgtattaagaagtactgagaaaactgaatgggaatagagtgaaaaatataaaacaaagggaagatgaggtgggaggaaatgtagtgacaagaagacgttatctcatccaatggcttcattttacagatgagaaagctgaggcccagagatcagctcaggatcaggtcaaatagttaattaatggcagagctggttataagtataaatcatgtgaattgtgggcaaatatgaattggaggaagaatacatattgagaaaagagggctgaaccagagatacagaacagaaagagaaagaagagatagggagaaaggtagcaacagttcaaacagaagagcaaactcagcccaatttaagaaggaagtggaggtcagcccatccaggcttacagacaggcgaaggcacttgagatctgagaaaagtcagttggcttcacaggctctaataacatccacctgatactcagatgcacaagaatgtgggcatagaattaaattcttaaggccaggggcagtggcttattcctgtaatcccagcacttcgggaggccaaggtgggtgtatcacctggctggtgatcaacaccagcctgggcaacgtggagaaaccccatctctactaaaaatacaaaaattagccaagcatggtggcacgcacctgtaaacccagctactggggaggctgaggcaggagaatcacttgaacccgggaagcggaggttgcagtgagctgagatcacgccactgcactccagcttgggcaacagagtaaggctctgtctcaaaataaataaataaataaataaaaataaaataaattcttaagaaactacagggggacatcaacagagacagaaaagagatcaaattgaagtgttcaacatgtcttagaagaaaggaccagaaattcaaagttggaaactagacctgggttggagatcagttctatcaatcactggccacgtaacctcaagcaagttacttctgagcccctcaaagcctcatctttaaaatggaaatgatcatatatatctgacaggtgtgctgcaaagttaaatgggagagcacatgaaaaatatctggtatacagtaagaactcagtagatgttagttctttgtcaaattgacccatgctttagccccaaaggctgtgatttgacaccactggctttctccacttctagcactctttgtgttactgatgagatagagaaaatggaaacaaatatcaagtaggctgcagtgaatacgaaaaaaacccaggcacagaagctctgagtcttgggtaatgaccaagctgaccctgttcattgtggaacagctgcttagatgagctttgaaggctccattccctccccatggtctaagctgggtgtcccacatatgcctgctaacaccaggaaaaacacacccacactcagtttcaacaaaattgggttttacaaatagtaataaaaaaatggagaaagtaactgaatgcagaaagcttgggagaaaaaatggagaaaataaagtcccattgatacattatctgactaactctggttttactgaacacaaatagaaagaataaaaagtaacattccaaaatgagaaggtgattttactcttcctgaagaaccaaatggtttccacttttcactttattttctaaggttttaccctctattgtcataaatgttttcatctggattttttctctgttaatatgctaattgcctccttctgaaagatccataaaaagttaaatcagaatgccaaattttttataaaatccatcttttgcatttacagacatggatgtggtgagcaaatagatcatttaccctctaaatcatatccttctcattgtccagtgtgtttcaagtctttgggtttgttttctttaaacagaatatatagaattttatgttttcaaaaatgagcaacattgcattttcctttcagtcaattgcgttctgtcttttgaatgtcagctcagaaatcaaaagcgtgtcatccctccaacaaataattaatagcaaaagggtttaagaggaaataggaacaaggggagtttctgttgcagaagatgccacagcccctggcagtgaggtcctcagcactcaccttgccattgtaccagatgctttcatttccctctggatcaacatcatccgttgccaaggtgaggcagaccagtcttcgtttcagccccttggctttaatctgtttcagtgcttgctttcctatgaagtctgctggctgcaggaatccaagataatgatgatgaatgaatgctcagacactgtgacaaggttagagatgcaagcatttaaatttgtctttcctattttctcaccaattacacattaaataaaaatacagatcggatcatatgtctagacaaatatttcttagtcctcaaatgagagtatcagccacctattccttcagaatatgttagacttaagggtaataacttgtgatgacaatttaccagaaccaggcagaaacctaggcagaaaaacataaggcatgttgcaatggtggattatgaaagtgacccttgtgtctaatgggtctggacagtggtacgggctgtcggtaagcaatgtgcaactcaatttctacctatagaaagtcttttacctgaagaaaattcacttttttgaaacatggtgctaaaacaaacccaaaatgcagtattttttttcttttgcttcttcagaataatgtctctggaatgtatttacctattggattgcattcattagttcattctgaaaccatttattgagcccctactatgtgtgaggcataatgctaggccctgtgtgggtaacaaaatgagttagacacagacatttttatcaaagagtttattctctaatactgtgcttttcaacctttttttttttttttacttcttccgtgcaacacatgacagatgacattcctattcctaatacactcccatgggcacactcagggccattcccaatgcaatcaatgcaagggaatgacagcgacattgttatagggataaccttgaattcattcttatgtgttacaaaaaaaaaaaaaaagtaggaatcaggcaaactggaagacttcgcacttactggtaatacaccttaatacaccttacctgtgagtaggacacacaagtgagcaatgactcctcagcagagacacttagctaataagggagatagaattctactcaaccaaatgccaggagacacatgataagtgtgataaactagtcagaggtgaagagagagcactgagagtgagcgccctggagggagggctgacatccgtgggaggttagtatgagacttctgcatactctgcctagacaagcatctcttatgtgaaggaaaggaaatttgtgatatataaatcgtatctatggtgaataagatttaatcagagatcacaatgtggaaaacaagattctccaaacagttcccacagacagactactctctgaacgcaaagaaaggaaacaaccaaaagctttaatttctttattggcaataagaaagagtatttcatgcctaagatgtcctccaccgctaacatttaggacttacacagttctttctgcacttgaaacatttaggactgagtgtaataaatccccttaacctccagagaagcagcagcaggggtcctcacacaccctcacctgagacccccccccccgccggtccattcctttcctagtttagaacctctaggatgaacctacaatgaaatatgatttctatggataatccaactttaaattgctgacctacacaggaagttagagaaagtttccattagccgaggttaaaataatgtgcaaaatgaacatccaattctttctccttccccagggtgatacaaatggtaagaaccaactataaagctttattatgaagccagatcatgaaaatttaaagaagattggaacccgtgttattta

SEQ ID NO: 96481 - DNA, 38002 bp, Homo sapiens
ccgcctccgcctcccaaagtgctgggattacaggtgtgagccatcccgcccagcctctctctctctctctctttccctccctccctccctcccttccttctctctctctctctttctttctttccaggttggggtgcagtggcatgatcttggctcactgcaacctccaccgcctggattcaagcaattcttgtgcttcagcctcccgagtagctgggattacaggcgcctgccaccacactggctgatttttgtaatttttgtagagacgaggtttcaccatgttggccaggctgatctcgaactcctgacctcatgcgatcctcccaccttggcctcccaaagtgctgggattacaggagtgggccaccacacctggccaagaaaaacggtataatttcgttattataatagcattaatggtcatttcttttttttccccccaaatccgagaactttattggacagagctccgtgcagggccaagggcccggtggcgagggcagctccatccaggaggtctcagcaacaggagcccacaaggccacactctagctaaggttatagacagctgggagaccagggcctctccgcagacgcgggaacaggccagatctttataaataaacatccagtgaagagaaatgacaactctaagtcatccgaatacacagagcactctagggggtggggcaccgggggcctggaggggcgatgagtggacccagatgtccatggcacggggcggcgtggggggtggggtgggggcaaggccagggcaacagacaaccggcactaggacgctgcgctgcgcatgtacaagatcaactactgggggccgcggtcccgtgcgtgtgtgtcaggctcttcgttctggaatgaggaggggtggtttttacatcatattcggtggctggtgggctcggagaggggctactctgtggagaggatgagggcaacgacgagaccgtacaggccgagcacctcggggaagatgaggatcaggatcatgcccatgaatagtcggggctgctgggccgtggctcgcacaccggcgtcccccaagatgtctatggcaaagccggctgccaggccgctcaggcccacgctcaggccggcgctagctggaggcagctcctgtagaggctgatgtcgtcattcggggagctggcgatgaggactgtcaccaccaggccatagatggcgatgatgccagccgtgaccaccgggatgatggacttcatgatcagctccggccgcatgacagacatggccgcgatgccggcaccggtcttgaccgtgccataggcagcgcgcggggcgctgaagaccatggcggccgaggctgccatgacggcgaaaaacgaagcatactcggggccgttcttggactcggacattgtctgcgggtggggagggggcaagctctgcggccgaggcggaggcgaagaccggggcgaggccgggccgggcgcgaaggcgagcacgcaggcggcggcgaagacgatcagcattaatggtatttctaaagaagaaaagtgaaccatccttggttccgctaacctcttctattatctctataatagatgtctcgcatctagactcacatccaacatggtccggaagcaggaaggagccctcccttctctgacagattaattactgcttcctttgcagtccacttttctctgcttgttcatcgccatatcttgccttgattcgtacttgaaaggtttggccagagacatttctgatgtgtctgttctttttctcttacttttctgggtaatttaacgtgctggggatgcgagcacgttaaatttccatccattgaagccattctatttagggccaccagggggcatccacagacttgctatgggctcagcaccgccctcctcgtcgtatttacaacctcaaggtcatttgaggagaaagaggtgcctgactaatcgggttacccttgtagagctatttttaaatttttgtttctggtttctacattaaatctttcttcctcttcttccctctgattttctcttgtctgcacgtgtgcttctaagaggctctctgtgatagcgtcacagtcatctacatcctatttcctgcaggacaattgtcttccaatttttattttactttttgtaggaggtatgagtcctctggttgtctgaacatcctcttttggaaaaagcaaaacaaaaggaaacaacttcaaaagtggcagcaattcttttcaatgtccttgatgataaagagttgaaatcctttcataatccaaagctattataagccaacactggctgttagaagagtgatcactttgggtaatattgtttttgacccaaaatgctgtgtgactatagtataacaagaatgtttccccatatggctcaggacctggcttttgaaatcactcccatttggagtccagacttgagctgagcaatggaataagtgctttgttttccaaggtgattgttggatgggaaaactcatgtcttgttgcttagttcttacacctcctctgcctgtggagactattcctctgatttacataatgatttggagaccttgaagaggagtgtgtgggtagtgagtctagtgtaggggaatcaatgcacataagggaagaaaggagattctggattagagttttgacccacttgccaccaagagctcacaggcttcatattctaatcatgaaaccctttttggtattaggtggacaggaatttgatgacaagattggtttgttctttttttttttttttgagatggagtcttgctctgtcgcccaggctggagtacagtggtgtgatctcagctcactgcaacctctgcttcctgggttcaagtggttcttatgcctcagccagcctctgggagtatagctggggttacaggtgcctgccaccatgcccagctattttttttttttttgtatttttagtagagatggggcttcaccatgttggccaggcttgtcttgaactcctgacttcaagtggtccacttgccttggcctcccaaagtgctggaattacaggcatgaaccaccacacatggccttggtttgttcttaaaagcccttgtacttatgcacaggctgttctgagaagtaagattattggatctttgggaattttaatgcattttaaattttagggtgggtgaggtggctcacacctgtaatctcagcaatttgggaggttgaggcagaaggattgcttgagcccaaggagtttgagactaacctaggcaacacagcaagactccgtcgctaaaatttttttttgaaaattgtaataggtatagctaaattgcccttccaaagggctgtaaaactttacactctaaagaaaacaaacaacattattaaaaagtgagcatgctgggcattgtggcaggtacctgtaatcccagcttctcaggaggctgaggtgggaggattgcttgagaatagtagttggagaccagcctggacaacatagatagatcctgactcaaaaagaaataaaagcaggcaaaagtgctgaacagacacttcaccaaagaagatatgcagatggcaaataagcacatgacacatgaaaagatcaaatgtcattagggcactgcaaattcaaacaagatgcagctacacacctattacagtggttaaaatctgaaacactgacaatatcaaatgttggcaaggacatgaagtaaaaattgctggtaggaatgcaaaattgtacagtcactttgcaagacagattggcagtttcttacaaagttaaacatagtcttactatgtaatctagccattgtgctcctagatatttacccagatgaatggaaaatttttcagcaaaaacctgcacgtggatgtttatagcagttttattcataattgtcaaaaactggaatcaaccaggatattctctgataggtgaaggaataaaccgtggtacatccatgtgatgaaacgttattcagtgataagaagaaatgagctattaagccgtgaaaagatacagagaatcattaatcacatatattgctaagggaaagaagccagtctgaaaaggctacatgttgtatgattccaactgtaagatattctagataaggcaaaactatagatctagacggtggttgcccagggctgaggagtgagggaaggaggaatgaataggcagaacatggcaggttattagagtagtggaagtattctgtatgatacaataatgatgaatacatgacattatgcatttggcaaaagtgacagaattatatgcacaaagactgaaccttaatgtaaactatagactttagttaataatagtgcatcaatattggttcattaattgtaacaaatgtaccacattaatgcaagatattaattagaggagaaactggttggggagatggagaataatgggaactccctgtattttctgttcaatttttttgtaaacctaaaactactgtaagaaataatccattaattaataataataataaatgtacagattcaccaagagtgtacacttctacttccactctctttgttgatgtatggtgacagaattttgacatacattcaatttgatggatcgagtttggtctttttctttttttgagacgtcatttcactcttgtcacccaggctggagtgcaatggcgcaatcttggctcactgcaacctccacttcccgggttcaattgatgctccttcctcagcctcacaagtaactgggattacaggtgcctgtcaccatacccagacaatttttgtatttttagtagagacagggtttcaccatgttggccaggctggtcttgaatgcctgacctcaagtgatccacccaccttggccttccaaactgctgggattacaggtgtgaaccactgtgcccggccaagtttggtattttattgttgtttggatttgcattttcctgcttattacccaagttgagatcttttccagattattggacttttcaagtttcctaattatgaattgtctgttcctggtttttgcctatttttccagttgattattggtcttttgattgtgaatttttgtttattgtgaatttgtgagacttaaaacatttttgcatattaattcttttttttttttttccagacagagtctcactgtcacccaggctggagtgcaatgtggggatctcagttcagtgcaacctccacctcctgggctcaagcgatccacctgccttggcctcccaaagtactgggattacaggcataagccaccatgcctggccactgtatattactttttaattttacaagttgcaaatgttttctcacgatctgtcactttctttctttccttccttcttctcttcttttctttgtctttttaaaatttgagacagggcctcactctgtcacccaggctggagtgcagtggcacgatcatggctcagtgcagccttgaactccccaggctcaggtgatcttgccacctcagcctccagagtagctgggagaactacaggtgcatgccaccatacccagctaattttttttttttttttttttgtgtgtgtgtgtgtgtgtgtggagatggggtcttcctatgtagcccaggctggtcttgaactcctgggctcaagtgatccacccaacttggtctcccaaagtgctgggattataggcgtgatccactgtgcctggccctgtcatttcttttctcagagaggataacaatttatttgtcctacagaaagttttaaatgttgaaggagattggcctggaaatatgcttttggggagcaacacggtctgagccagacatccagatacagcccattcttctggccagtcttgccctttgctcctgattctccaagctgtacccagagctttctggttcagcatgtacctggaggctgcttttgaccatgttttgagagtggcatggctttatctaatgggatgaacctggctaaagagattagcaaaatgtcttgtggatcccacttttaatctgcagcgttcaggctgccccttcttggctgggaagggcgctgaagaaacaacgcccaggaccaggactatcccctgctcaagctgtgattccgagacccctgccaccactactgcattcacggggatcccaggctagtgggactcgacatgggtagcccccagggcagctccctacagcttgggccatctgcacttttcccaaggccctaagtctccgcctctgggctcgttaaggtttggggtgggagctgtgctgtgggaagcaacccggactacmcttggcaagcayggcgctactgaaagtcaagtttgaccagaagaagygggtcaagttggcccaagggctctggctcatgaactggttctycgtgttggctggcrtcatcatcttcagcctaggactgttcctgaagattgaaytcygraagaggagcgatgtgatgaataattctgagagccattttgtgcccaactcattgatagggatgsgggtgctatcctgtgtcttcaactcgctggctgggaagatctgctacgacgccctggacccagccaagtatgccagatggaagccctggctgaagccgtacctggctatctgtgtyctcttcaacatcatcctcttccttgtggctctctgctgctttctgcttcggggctcgckggagaacaccctgggccaagggctcaagaacggcatgaagtacyrcygggacacagacacccctggcaggtgtttcatgargaagaccatcracatgctgcagatcgagttcaaatrctgcgrcaacaacrgttttbrggwctggtttgagattcrgyggatcagcaatcgctacctggacttttcctccaaagaagtcaaagagtgagtggcttccagtcctggggtcagagctatgaatatattggggacactgaggctcaggcctctgaccagcccctctcyccgcacccagtgccttttcctctccatcgggtgcacaacttattgctgcgtatgtgagggtgtatcaggtggaaccatatgaaattgctaatattctacctctttgacccataaaaaatgacaacttcatagggttcaacctaacattggctaaggtggtaggaaggtatcaatttatataagctgtttggataggagccccttgggatgaagagccaggcagcaatgtgtgtccactttatacagagggatggaagtcattcatagatcacaaacactgaggtactatttggctatttgtcccattcattcaaagtagatggattcagtcccagaagtttaaatttcctagttagttcccttgttttccaacctttcaaccctgagcatccattcccaagatgtttgtctggatatgttggaaagagcataggaaggggaagtcatgagatctagggtgaagttttggttctgttgttcaaggtcttgtgaccttgggcaggtcactagtcactctgcgctttggcttgcccatcttttaaatgagcactggaatagaataggtaattttggaagtcacctcctagccctgcctggtagctggcatgcagcaggtactcattaaatgcttgctggtgtttacttagcgagtcatgatagtgcaatgtgataaagcatttctaaagtattcttggcatatgtaaaagtaaaatgctgcgatgggctgtgggaggtgctggtgagagagagactctcgaccactgtgtcggagggaacagcctgtgcactggctccagcgggctgctcttcccaacacacccaccaacctggggctcgagtgacttttcagggaaagggcagcctgccttgaggcagccgctttccctcacctcttctttctgtctgactcgaccctacctggctgaggttaggggttcagttattcctaagggtggtttttttttcttcccagtgaggctggcaagtccaaagggaacttgaactcagggcattggcaccagcagcaggacatgtttgaagcccaaaacaacattaatgacgcccaaatagctagcttatatctgccctgcagatggaagggacgtccaagtgaaggtcacttcttgggattttattttcttgtggatggagattactgctgcaaatccccagtcaggagaggattgtaaagggctgtgcccttcccaggtgacaggtctgcaggggcagcacaagatgccacratttacataaatctcccgaggagggcatgaagccagggggacaagcagaattctggggagtgggagaggccgatggtagaaccagcctctgtgagcagaggctcacagagaaggggcttttcatcttttcctctatcatttcccttgattgtctcctgcatagagtcagttcttggacagatgtattcaaatctctcggtaactccaaatccccttttgtatcagagtgaaggaattatctaggtcactccactctcaatggtcaatggatccaaaatttcaggcaaatatttagctgaatcaaaactccttcaatgtcccataccaacttgttggtgggaaattttcctaactccactgacttggaaaaattcttctattacacgcacaaaaaatacagcagtaatattaaaagaagccaaaataggaaaacaaattcaagctagcttctcacccataacttgattaatgcctttagtttttctacatttcagtttcagtctagtcttgttaacatttacataatcatacagtgtaatgatagtataaagacaatttagggccgggtgcggtagctcacacctgtaatcccagcactttgggaggccgaggcgggcggatcacctgagttcrggagttcgagaccagcctgaccaacacggagaaaccccgtctctactaaaaatacaaaattagccgggcatggtgatgcatgcctgtaatcccagctactcaggaggctgaggcgggagaacgcttgaaccagggaggcagagrttgtggtgagctgagatctcgccattgcactccagcctgggcaacaagagcaaaactctgtctcaaaaaaaaaaaaaaaaaaaagmcaatttagtgttccattttgtaatctgatagtataacatttgcataatatccacaatgatcatgtttaatggttgcataagaagtccactgaagccaggtgcagtggctcacgcctgtaatcccaacactttgggaggccaaggtaggtggatcacgaggtcaggagttcgaaaccagcctgaccaaaatagtgaaacctcatctctactaaaaatacagaaaattagctgggygtggtggcatgcctgtaatctcagctactcgggaggctgaggcaggagaattgcttgaaccagagaagcagggaggcgggggttgcagtgagccgagatcttgccactgtactccagcccgggagacagtgtgagactcgatctcaaagaaaaaaaaaaaaaaaggaagtccactgaatgaaagtacatgcttaggcaagcattcagatttttatttacctctattataagtaacactggaatgggcatctttgagcattttgcttctctctgtctctgtcttttatttcccttaggctaaatttccctgagaaaaatggacctttggctttaactttccacaaagtttgtctaaagacacaattagggctgggatcagtggcgcacgcctataatcccagctctttgggaggctgaggtgggaggatcacttgagctcaggagttcaagaccagcctgggcaacatgatgaaaccctgactcttaaaaaaaaagcccaaaacataaaaacattagccaggagtggtggcttgcacctgtggtcctagctactcaggaggctgaggcaggaggataatttatttgagcccaggaggcagaggttgtagtgagctaagatcatgccactgcacttcagcctaggtgacagagtaagaccctatctcagaaaaaaaaaaaatatatgaattagcacacaaatttcttagaactgaaatgcttttatccttttcaaaacctccagtgacctcatactgcagtgggctacgtgttcttccaagggtgcagtctgatagggccacctttgcagagagactttcccacagacttttatttttatttaattaattaattaataattattttgaggcagggtctcactctattgcccaggctggagtgcagtggcacaatcttggctcactgcaaccatcacctccagggttcaagctattcttatgcctcagcctcccaagcagctgagattatataggtgtgtggcaccatgctgggctaatttttttttttttttttgagacagggtctcactctcttgagatggtctcactctccaggctcactgcaactcccacctcccaggctcaagtgattctcccacctcagcctcccgagtacctgggactacagacgtgagccaccacatctggctaattttctgtatttttggtagagacagggtttcgccatgttgccctcaggctggtctcaaactcctgagctcagatgatccacctgccttgacctcccaaagtgctgggattacaggcatgagccaccgtgcctggcctctggctaatttttctatttttagtagagacggggtttcaccacgttggccaagctggtctttaacttctgggctcaagtgatgctcccgcctcaacctcccaaagtgctgggattccaaacatgagccaccgcgcccagtcccacagacttttacatgatcactgaacaaggcctgcgagggaagtgaggctcctgggattatgttcagaaagctgctcagagctgggttgcctgaggaccagtgcctgagaccagagcacagcccttatctgttggtagaaggaatgaaagaaggaatgaatgagagactgtggaatggcatttactcccacctccaaggaaaactaaaaaattttttctgttcatgttttcatggcttcattttggagggtttagtgagtttacatgacaaagctggctctccaaaacccttccctgaaaaatgtaagttatatttatttattttttgagatcacaagcactgagaaatggtaagcatttaccttctggattatctcggcagcaccccccgggctaggattctgatggcaaagaggtgaggccggcaaaagggcagggagagggaggttatcatccaccaagatccttttctttttgtatttgttgcccaggctggagtgccatggtgcgatctcagctcactgcatcctcgcccccctggttcaattgattctcctgtctcagcctcccaagtagctggtattacatgtgcccgccaccatgtccacctatttatttttttttgtatttttagtagagactgagtttcaccatgttggccaggctggtcttgaactcctaacctcaagtgatccaccttccttggcctcccaaagtgctgggattacaggcatgagccaccgctcctggccacaaaatctttttaaaagaaattcttggccaggtgcgggctcatgcttgtaatcctagcactttgggaggctgagacaggaggatcccttgaggccaggagttcaagaccagcctgggcaacacaatgagacttcacctctaccaaaaaaaaaaaaaaaaaaaaaaaagaaaagaaagaaagaaaagaaaagaaaaaaagaaaagaaaaaaggcccggtgaggtggctcatgcctgtaatcctagcactttgggaggctgaggcgggtggatcacttgaggtcaggagtttgagaacagcctgaccaacttggtgaaactctgtctctactgaaaatacaaaattaaccaggtgtagtggcacacacctataatcccagctacttgggaggctgaggcaggagaattgcttcaatctgggaggcggagattgcagtgagctgagatggcaccattctactacagcctgggcaacaagagcgaaacttcatctcaaaaaaaaaaaaaaaaaaaaaaaaaccaaccaaaccaaaccaaacaaaaaaaattagctagggcacagtggcatgcacctgtggtccctgctacttgggaagctgaggtgggagaatccgttgagcctgggaggtcaaggctgcagtgagccaagattgtgccactgcactccagcctgggtgacagagtgagaccctgccttaaaaaaaagaaaaaaaattcttttcttaaaaaaaaaaaatagagatagggtcttactctgttgcttaggctggtcttgaactcctggtttcaagcaaccatcccacctcagcctccagagtacctgggattataggcacccaccaccatgccaggcagaattctccttttttttgtttcccctctccccatcaaatttggatgagccaacaaagaggttcgggtgagcctctttctcctacttgacctgaggactgtggggaagcgatcccaggagaatgagctggtctgagcatgggtagcctggagaaaatccacagggatcctcctctgacacagactgggcatgggcggtgtctggtgacagtgatttccaggcatttctgcaggctctgttcctggaataactttccattctgtgcagtgggcacttcaccggactgggctagagaaagttgaggtcctcactttctggcatcttcagtccagttcctgagaggaggagctgggtgcttgcattctggcctccctaggacctccccacttgtgcccctccttggggccccccagaaacctgaggatagagtgcattgcctcagtaagcatggaggggcgggcaggttttggagatttctcaggggaatctttaagatccaggactggctcctgaagattcctgatctaatgaataagatcaggcagaaacaattccatatttttatgggaatttacaagagttttttgttttgttttgttttgttttttgaaatggagtctcactctgtcacccaggctgaagtgcagtggcacgatctcagcttgctgcaacctccacctcctgggttcaagagattctcctgcctcagccacccaagtagctgggattacaggcgtgcacctccacacctggctaatttttgtatttttagtagagacggggtttcaccatgttggtcaggctggcctcgaacttctgacctcaagtgatccgcctgcctcggcctcccaaattgctgggattacaggtgtgagccactgcacctgagttttggctgctctgtcttaggggagtagcccagtgactgcaccccatccccaacctgcctatgaccrtgttgccaagtcatttgggagggggaaatgacccacatttatcctgcacaaaactcctcctgggaagtttttgtcttaatcttttttagtttttgtttgtttgtttgtttttttgagacagagtcttgccccgtcacccaggctggagtgcagtggcacgatctcgactcactgcaacctccgcctcccgggttcaagcgattctcctgcctcaacttcctgagtagctgggattacagacatgtgccagcacgcctggctaatttttgtatttttagtgaagatggggtttcaccatttggtcaggctgctctcgaactcctgacctcaagtgatccacccacctcagccccaaagtgctgggattataggcgtgagccactgcacccagctggtattattagctccattttatatatgagaaatctgaggcccaagaggttaagggacatgtctaagatcacacaataggaagtgggggagacaaaaaaagaaaatcagcttcggccacatgtggtggctcacacctgtaatcccagcactttgggaggttgaagtggatggatcacttgagcccaggggttcgataccagcatgggcaacatagtgaaaccccatctctacaaaaaaatacaaaaattagctaggtgtggtggtgtgtgcctatagtctcagctacttgggaggctaaggtgggaggatcacctgagcccaagaaattgaggcagcagtgagctgagattgcaccactgcactccagcctgggcagcagagtgagaccctgtctcaaacaaaaagaaaaaacagctttattgagatataattcactcactatacaatgtacccattaaaagtatgcaattcaatggtttttagtatattcacagtcggacaaccagcattacaatcaattttagaacattttcatcacttctaagggaaaccttacaccatttagctttcactccctagccttccctccccctagccctaagtaaccactcgtttactttctgtatctatagatttccctgttctggacatttcatatgaatgagtcatataacatttgtccttttgtgtctgccttctttcacttagcatagtgttttcaaaattaatccatgttgtagcgtatatcagaacttaattcctttatatggtgaaataatattccattatatggcatgtcagattttaattctgctcttttcaccttactctcctgtttcccagcgatgttaaagtacctcttgcatacattcggcattaaatgaatgtttgctcactgagtgacagaaacctcaaattatccaggctgcttggggtacgggaagtcttgcttttctccctcttctccctgtctttccctgtcttttttttttttttttttttttttttttgagatggagtcttgctcagtcacccaggctggagtgtagtggtgtgatcttggctcactgcaaccttcgcctcccgggttcaagcgattctcctgcctcagcctcctgagtagctgggattacagacacccaccatcacgcccagctaatttttgtaattttstagagacggggtttctccatgttggccaggctggtctcaaattcctgacctcaggtgatcttcctgcctcggcctcccagagtgctgagattacaggtgtgagccaccgctcccggcctttccctgtcttcttcttctccatttcctctccaagaaggacagggaaaggggtgggcagagatgatgcagggttggaaaacatggatggattaggttcggattccagtgcttctgtgccaacgtctcagataataacgaggtggccccacagaaactagaaacaccattccgggctctgcggcgcctgtggtaaatggggctgtcactgggcttcaacctcccacatctccctcccctggcctggtggtcctgggtgggccaggaagagggggacacacttcctgctacacttggaggaggctctcagagggaggagccaagtccaggaatgctgtctccctcactgactctgtcttttcagagcaaggtatcagtgaaagagatttgtagttctttctctttttttttttttgagatggagtttcactctgtcgtccaggctggagtgcagtggcaccatgtcggctcactgcaacctctgtctccagggttcaagcaattctcctgcctcagcctcccaagtagctgggattacaggtgcccaccatcatacctggctaatttttatatttttagtagagacagggtttcaccatgttggccaggctggtctcgaactcctgacctcaggtgatccacccaccttggcctcccaaagtgctgggattacaggcatgagccactgtgccaggcctgtagttctcaactgatgctcttttatcttattttattgcatttccgacttctattatagaaaaaactcaagctttcacaaaattagagagttcattataattaattctcatgtagccatcacctagccaggtgtggtggcaacacacctgtaactccagctacttggaggctgaggtgggaggatcacttgagcacaaggtctctaaaaaaaaaaggaaaaaacaggctgggcacagtggctcatgcctgtaatcccagcactttgggaagctgaggcgggtggatcacctgaggtcaggagttcaagaccagcctggccaacatggtgaaaccccgtccctatcacctagccatcacctaggaacaaatatcaatattttgcctgtttcatctatactaccctcccccaaacacattttccccttctgaatatcctaaagcaaatcctggacatactttccttttacctgtaaatactttaataggcatctccaacagataaagaggctttagttgttttttgcccttttgtttctgctgaacataagcacaagaccagtcatagtcaacagatttaatggcaatatcaatcaatacccagtctatgttcagttttccctgatagtctcrgaatgctttttacagttggtcaattcaggatccaaaccaagtccatgctttgcatttggttgtttggtttcctgtctgttttactagaaaactgtcccctttttcataccatatgtgtgagagaaactgggccacgtgtcctgcagaatcccccatagtttggagttgggcaattgcagccaaatggtgttgtctaacttgttcttctgtcccctgtatttcctcataaaccagtagtctgggtcgaggtatggttggatcaggctcagttgtggcaagaacatttcctacagtgccgctctgtgtatcttaccgtagcacatgaggaaggacatgaggtcttcagtcagtttacaacacttcttttaaaggttgcaggatgagcagagctgcagtgtcttggggtgagaggtagaacatgcgggagctcagacattttggaaccaggaactaccagccaggaaggcccagcctggggtccccagtctgagggagaagctggcaccaagctcttgctcttcaccattcttcccagggaacccacagactacaggtacctgcttgctcttcttaaacaattcgtagacatctcaaggagaagattagaacttgactctatggggtttctcccctctcagacgggaactctttgaagagagctgtgtctccccttcaaattggggcttcctgagggctgggctatgtctcccctcagaccagggctccctgaggatggggctgtgtycccctcagaccggggctccctgaggatggggctgtgtttccctcaaactagggtcccctgaagacagggctgcatctcccctcagactggggctccctgaggacagggctgcattcccccctcagactggggctgcctgaggacggggctgtgtctcctcctcatgtcacccctcaccgtctagtacctcacactcagtgacttattttcttacttcactgtgagctgctataacagaatacctgagtctggataattgataaagagtagagatttatttcttactgttctggaggctgggaagtccaaggtggaggggcccgcatctgctgaggggcccgatttcatccttttcctcaggaacccactcccatgataatggcattaatctactcatgagggcagagcgcttgtaatccagtcacctctcaaaggtcccatctctcaccactgtcatgctgggcctcacgtttccaacacaggaactttgggggacacattcaaaccacagcactacacaaaaaagcaatcatcaaagcatactaagcacatagtgtgtaccaaatgctccacgtgtatgatcccatttaatttccaccatcccctgtcgagtgtttaaaatgtcatttcttagatgagaaaactcaggctcagagaggttaggccagttctcaaggtctcacaggtgtccctcagccagcgttctgcttggcatgacccactgtcaggtatacccctgctcattgccctatggctggctttactaatttgattcacttactaaattatgttggtttttctggaaaaactcagacgtgatcattttcccaggctctttgtgccttgcttatgggagagtggcctagaacatagttcttatcttaatcaagaccctttcaaaccctagtgactcctcctccaccgcccccggccccttccgcgcagagtgaaattygtagcctgggaaacacgctgtgatataaatagccggctcaccactaaggcgctctcctctgcctggctttgtcttaagagggtgagaggagccttaatctgtggttggaatgagggcaagcactgagtaaacaagatgatgtttggagtgggggagggatagctccagaagtgagagaccccaggagttcccaggctggtgacccaggcaggtcccaacgttcaccaagcttggccttttcccccaggctgacctggatgttgcccctgggaatacactgggaagttcccagtrtgagggagacgcagccctgtctttaggaagccccagtttgaggggagacagccccatcttcagggggccccagtctgaggggagacacagccccgtcctcagggaaccccagtctgatggggagacacagccccgtcttcagggagccccagtctgagggggagacacagccctgactcmgggagccccagtgtgaggggagacagcctggtggagaccaktagggtgacttgtctgggggctcagggaggcgaggtggggagacggggaatgtccgcaagcccagcctgcagactgagggyggctcagagcctctgctggcctcagcccacacagttttaggcctgaccctcacatcacagacaccttagtgtgcatgaggcgggtgtgcaaggtttgctccaccttagggccacctggtaggtacctgagggtaggtggtggtggctaggaaaggactcctgggacagggaagaggggagaaaacacacagttttccaggaaatttaacttccaggcctggaaacacctggctggaaagggccttggccaccagtgacctgtaagggggagatgaggttggtgagggagctggggtgtcaccaatggcagccagatgctcgtccatcaacggctcccatcctgctgctcctcctaccctccaggcatgaccccaaggaagggcctggccccacagagtggttgggtgaatttctatattccctattgacttggtcttggattaccatctacctcaaccctctaggccataagatcgaggaaggcaggggcatttattcactgctctgtcttcagcgcctagaatagcagctggcaggtagcaggtgcacagcaaatatttatcaagtgagtgaatgaatgaaaggtcaagtcaggagggacaagggaggtggggaactccaatgggaccagtgggcaactgctgtgggctggacccaagtttttttttttgttttttttttttttaatttgagacagagtctcactctgttgcccaggctggagtgcaatggcatgatctcagctcactgcaatctccacctccctggttcaagtgattcttctgcctcagcctccccagtagctaggattacaggcgcccgccascacgcccggctaattttttgtatttttagtagagacggggtttcaccacgttggccaggatggtctcgaactcctgacctcatgatctgcccacctcagcctccyaaagtgctaggattacaggcgtgagccaccgcgcccggctggaccccgacttcttgtgtggctttgggcgaggccttgccctcctctgggccccacttgctcctctgtaggacaatccgatggttttccaggtcttatccaatggctctaagcggaaggagggacaacattttctgaggcctccagcatgtccagcctgtgtcaaatgcgtgactcgaattgtctcatttatatcccccataacccctgagaggcagctgctatcactcccagctcacgcaggtccacagagtttaagctccatggctcccaaatrcatatttaggactcagtggtgtgctttcaaycacccccaccctgtccacaggacactggcaatggctcagctgggacactgtactgaggggaaggctccagggacagcctgtaggtcaggaggtgggacagacagcatttgggttgggaggcccctagccttgaggaggacactttggggaaggtcttgggggaagaagggagrgaccactgcagagatgccatctgctcagtgtgtccagggctactggcccctccagagggccagtagaggggagcgggaggcccgagctgaaggcccccctcacactgctccagcttgtcttcccacccctgccccacttccgtcaccaacagcccggtgcccagagaggggctgcagaaggacagctgagcaagacacagtttctgccttccccacgcacatggctggagtggggctttgagtggtgggcaggcagtgccagcgggcaggtgctccgtgtcaggcccaccatggagggtggcccgcacgatcctgccctcaaggagctgacagcttctttgccacagctggtagaacctgcacggccaactccccagggagggctctcccatgatatgatatggcgtggtgggctctgttcttacaacctgatgtcagctcccaggtgctcagagtaccacccctgatggctcttgctcggccacctgcccagtgaggtggcttttgctcacagcgcatggctactatgtattaataccagcactcttcaagcactcttacatgtatcacttcatgtaatcctttgtttcaaatataaggaagcagaggcagggagaggttaaggaacttgtccagagggatggagctggcatgtgggcgagccaggagtaaacccaggctgtccggctcttgtcaccgatctgtgctgcccatgccacccagggccatgtggtctctgggcagtgtgttctgcccacgaagtagagggcagggattacagggcgtgtggaaacatggttgccatgacccaggccacctcatgcagcccttctagaaagtcttaatcataataggcggaagtcaacatggttcatggaaatggaaccaccagtggcccttgagcacaccaaaagacgctcaacttcactcataatgagaaaaatggaaatgaaaacaactctgagatactgtttttcaaagattaggttggcaaagatcaaaagtctgacctgtgtggatgtggctgtggaggacaggttctcctgagcatggctggttgggctttgtgaaccgcgcccccacctcagcccccagcaggagagaccagaggagaaaaatggcaggtatctggcaagatcaccctttgatgcaaggatccatcttcaaggaatttacctgctccatatagtcacaatatgcaaaatgactgatgtccatgtttgtattaacgagagactgggaaaaacccaaacttccatcagtctggaactggctaggacccatgtgccatccacgcaatgggaataccatgcagctcattaamaaacaaaaatccaggacactccacagacagatacgaaaatatctcagccgagcgcagtggctcatacctgtaatcccagcactttgggaggctgaggcaggtggatcactcgagatcaggagttccagagcagcctggccaatatgacaaaaccccatctctactgaaaatacaaaagttagctgggcatggtggcacaccactgcactccagcctgggtgacagagcaagactccatcccccatccatgccaaaaaaaaaaaaaaaagatctccaagatattgctaagggaaaaaagaaaggttcaagacagtatgtatataatgttctaatttgcagtaataaaagaacaggaaaaatgaaaacatgtttgcttgtccatgcatgaagcctctctctggtggaactggccatagcggtcaggacctggaggctgagagatgaggagtgagaggcattttatattaaagagattttatttagaagcaaaagatggacatcttttaagagattcgtgaccaattcaatgaacattgtttaaaataatctctattggaaacagttatgctttctattatgttctaaaagtctattatgtaacgcattcttcgcgtgcaatttttttttcttttttcctttctttcttttttttttgttttttgagacagagtctcactggcgtgatctcggctcactgcaacctctgcgtctcgggctcaagtgattctcgtgcctcagcctcccgartagctgggactacaggcatgcaccacaacgcctggctaatttttttgtatttttatttttatttttttattttttatttttattttttttgagacagagtctcactgtgtcgcccaggctggagtacaatggcgtgatctcggctcactgcaagctccgccccctgggttcacgccattctcctgcctcagcctcccgagtatctgggactacaagagcccgccacaacgcccagctaattttttgtatatttagtagagacggggtttcaccgtgttagccaggatggtctcgatctcctgacctcgtgatccacccgcctcagcctcccaaagtgctgggattacaggcttgagccaccgtgcccggcctgtatttttattaattgtagagatgaggtttcaccatgttgcccaggctggtcttgaactcctgacctcaggtcgtctgcccacctgggcctcccaaagtgctgagattacaggtgtgagccactgcacttggcctacatgcaactttttcttttttttttttttgagacggggtctcactgtrtcgtacgggctggagtgcagtggtgtgatcttggctcactgcaacctcttcctcccgggttcaagtgattctcgtgcctcagcctcccgagtagctgggactacaggcgcgtgccaccacgcccagataatttttgtatttttagtagagacggggtttcaccatattggccaggatggtctcgatctcttgaccttgatgaagatctgcccatcttcgtctcccaaagtgctgggattacaggcgtgagccaccgcgcctggctgcaactttttatttagatgacaagcacccagtcaagtgcacaaatatatatatatatatatatatattttttttagagaaagtcttgttctgttgcccaggctgagagcagtggtgtgatcatagctcactgctgccttgaactcctgggctcccgcctcggccttacaaagtgctgggattacagacatgagccaccatgcccagccaaatgcacggatcttaagtgtgcagctcagggagttttgaccataaaacacctgggtaatcacccccaggctaggtagaacatacccagcctgcctgaggggaaggggagacttttcactgtaaagatcccttttgaattctgaacctgtgtgaatgtatggtragcgctaaacaaatacacacaaaaatatagaagtgcagaagatatgctgggagccccgcccatcagcctggagaacctgcttgcagctgtgtcccttaggtgagtcaggagctcccacctggctgggggtggagtcctccgagggcaaggactgtgcctgcctcgggtctccatcccctgcctctgcacaggccctgggactgagcaggccttctggaaacacctggctggaaagggccttggccaccagtgacctgtaagggggagatgaggttggtgagggagctgtgggcatcaccagtggcagccagatgcttgtccatcaacagctcccatcctgctgctcctcctacccacctatgcaccaggcatggccccaagaaagcgcctggcagcacagagtggttgggtgaatttctatactccctattgacttgggtyttggattaccgtctacctcaaggtcgaggaaggcaggggcatttattcatttttttgtcttcagcgcctagaacagtgactggcacgtagcgggcgcacagcaaatatataccaagtgtgcgagtgaatgactattctargtttccagaggcaggggwtgggaggargtggcccctgttgagaagcccgggaagcccatctccagctgtctgtttccctttaagtcgaatcaagagcaacgtggatgggcggtacctggtggacgrcgtcybtttmrscygctvcaatyytagctcgcsayrgccctgcatccagtatcagatcaccaacaactcagcacactacagttacgaccacyagacggaggagctcmavctgygggtgcgtggctgcagggctgccctgctgagctactamagcagcctcatgaactccatgggtgtcgtcacgctcctcatttggctcttcgaggtaggccctgggccagctgggggtagagggtaaggagagcctccggtcccatttgggtctaatgggggcggagccaggcttggagagcatgcctccctctttggaaacagccttcagtggagctgtgggtcagatcagtctgggcttgaaccccacccagggcctccaccttttgatttatttatttatttatttattcatttatttcttttttggtttctttcccaccacttaaatttttttttttatttttttttattttgaggctgagtctctctgttgcccaggctggagtgcagtggcatgatctcagctcactgcaacctccctctcctgggttcaagggatccttctgcctcagcctcccgatagctgggactacaggcatgtgccaccatgcccggctaattttttatatttgtagtagagacaggttttcactgcattagccaggatggtctcgatctcctgacctcgtgatctgcctgcctcggcctcccgaagtctgggtttacaggtgtgagcactgcacccgaccgacaattgtttttttaattgaggtgagatttataaaaggtaaacaatttggtgtcatctagttgatttacaatgttgtgcaagcacctctacctagttccaaaagacttccatcagccccyaagaaaatctcacacccatgaagcagtcaccacctcccaacctgccctccagcccctggcaactgttctctggatttatgtattttggacatttcatataaatggacccatattacgtttggcttcttttagttagcatgttttggaggttcatcctgtgtccccactttttggtaccgaggtcttagtcatttaacctctctgttatatggggtgacagcacttagctttggggactattgggaggcaacatgaacagcatgtgcaggtgttcaggaaatgggtactgtttggatttgtgcttcttgsgatgctggtcctcatttacctgttagtctarttatgtgtgggttcatcttatctgcaacgctcagtttctctgtagctatagggcttgcaatgtaagcaaatcctcggtgagtgtgctgaattcgctctttggttaaagagatattcattttttatttttattattttaaattgtttattattattttttttagagacaagaagaaaaattcacctgtcrcccaggctggagtgcaggggcatgatcgtagctcactgcagccttgaactcctgggctcagggctcttcccacctcagccttctgagtagctaggactataggcacatgcagagtagctgaaaacaggtgccctgagtcatactccgtagagtcttctgtagaaatggggtcttgctatgttgcccaggctgctctctaactcctggcttcaagcaatcctcttaccttggtcccccaaagtgctgggattacaggtgtgtgccactgcatctggccaagagatatttctttctttttttttgagatgaagtcttgctctgtcacccaggctggagtgcaatggcacgatctcagctcactgcaagctccacctcccaggttcaagcaattctcctgtctcagcctcccaagtagctgtgattacaggcgtgcaccaccaygcctagccagtttttgtatttttagtagagatggggttttaccatgttggccaagctggtcttgaactcctgacctcaaataatccaccagcctcggcctcggcctcccaaagtgctgggattacaggcgtgagccaccacacgtggtcagagatatttcttaaacatgtacccatatgccaggcacagctcaggtgttgaatgagagcctgttagtaaatgaggtggcatggtgactcagggtagctgctttgagctaccttgagagcagaaaatccaaacttcaaaatcccaatgtacaaagccaggaagatttggtgaggaagctttttccattgaggagattcccaaagattcctttaaatgagtcactgtcctaatgctatcagccagtgcatcctgcctgtggctgataaacacctcctctaactcaccacatgaaactaaagggtgactgtatgtccaggaagccgcctttttttttttttaagacagagtttcactcttgttgcccaggctggagtgcagtggcgcgatctcagctcacggcaacctcagactcctgggttcaagtgattcttctgcctcagccccttccaaatagctgggattacaggcgcccaccaccacgcctggctgattttgtatttttagtagagacgaggtttgaccatgttggctgggctggtcttgaattcctgaccacaggtgatcccccaacctcggcctcctaaagtgctgggattacaggcgtgagccactgcgcccagccgaagccttcttttaatgctgaggcaaacacagcatattcatgactatttattggtcgctgactccttgacacagagtcttgggtgggtagaatgaggagaggaacatactgctggaaatttagatggccacattccctgaaaacacacaaaaagaagactgaatataaaagaagtcataaaagttcactagcattgagctcaggagttcaagaccagcctgggcaacatagtgagccctcatctctactaaaaaaaaaaaaaaaaaaaaaaaaaaaaaaawttgctggacgtggtggcgcatgcctatagtcycagctactcaggtactcggatggccaagatgggaggatctcatgagccccagagatggaggcataaaagaagtcagcggagccaggagcggtggctcacacctgtaatcctagcaggcattagctaggatttgggaggctaaggcaggaggatcaattgagcccaggagtttagaccagcccrggcaacatagcaagatctcatctctacaaaaaacacaaaaatgacggccaggcgcggtggcttatgcctgtaatctcagcactttgggaggccgaggygggggatcacctgaggttgggagtttgcaaccagcctgaccaacatggagaaaccctgtctctacctaaaaatacaagattagccgggcctaatggtgcatgcctgtaatcccagctacttgggggctgaggcaggagaattgcttgaacctgggaggtggaggttgtggtgagcygagatcaygccattgcactccagcttgagcaacaaaaacaaaaacataaaaattagctttgtgtggtggtgcacacatgtagtcctggatcctcctggctcaggcaggaggatcacctgagccctggaggtcaaggctgctgtaagccatgatctcaacactgcactctaacagagccagactctatctccaaaaaaaaaaaaaaagaaagaaaagtcagtgggaaaatgaatggggttccattggcagcctcttagtggccccacctttacaggaatctagtggactgcattagacaagratcagcttattgggaagagggcattcaaatgccccttttacttggggcctttaatggacagaggtctgatgggccaagggtggctgagcataatgttargagtctgatcttggctgtgcctgcctaggcttcacaatccagtcaggagatgatgtctaatttatgagccaaagggaggatcactaccaagtgcaaaactcacagtgcagagagcctccttcaggaamgcaggaggggatcagagtggacgcgttcacatcaagaggacttcatggaggaggtgactttttctgctgtaaaaatatttattcaacttccagttgacaatagcagtaacataaatctaaaactctatcagttattattatctactgccataattataaaatgtcccagagcattcattcaaaagagatttactgaggccctccccctacctggtactgttctaggtgctgggattctgagtgagccagatgagtcagggccatccctgccctcagggagcagcttcatcctcttgtagagtttgctatgccatacaaagaagtggaggagagcaagccgggaatttgtacagaaacaagtggctaacggaatatacggaatatattatagaaaaatgaaaacagggtgtggtggctcacgcctgtaatcccagcactttgggaggctgaggcgggcagatcacctgaggtcaggagtttgagaccagcctggccaacatggcgaaaccttgtctctacaaaaaatataaaaattagccaggcgtggtgccaagtttttgacgcctgtaatcccagctactcgggaggctgaggtaggagaattgcttgaacccgggaggcggagattgcagtgagccaagatcgtgccactgcactccagcctgggtgacagagcgagactccatctcaaaaaaaaaaaaaaaaagtgaaaacaataagctaattatcagctacagctgactcttctgctcttctgttggtccttactgtgcactaggtacagtggtggtgtttgctggagtgcagtggtggagtcatggctcactgcagcctccatctcyggggctcatgagatcctcccatcttggctacccaagtacccgggtagctgggactacaggcacgcgccaccacacccggcaattatttttatttttatttttagtagagatgaggtctcgctatgttgcccaggctggtctcgaactcctgagctcaagcaatcctccctccaccttggcctcccaaagtgctgggattacaggcatgcaccattgcacttggcctgtgtgttttacacatattaaagtggcacagtatccacacggggtgggcaccacttcatctgaaaatctgcaaaccggatgaataaagtgaggtttcctggtcacacggctggctaagtgcccgggtttgaacccaggcattttggcaccaagtctgccacacagtgaatgctagtgaacaaatccaaattattttttaccascatccattcatcactgtgctcatcaaaataatggaagggctgggcacggtggctcgcacctgtaatcccagcactttgggaggtcgaggmgggtggatctcgaggccaggagttcgaggccagctggcaacatggggaaaccacatatctacaacaataacaamaaaaaaatacaaaaattagtcaggtatggtggcaggcacctgcaacgttagctattcaagaggctgatgcatgagaattccttgaacacaggagatagagtttgtagtgagctgagaccacgccactgcactccagcatgggtgacagagtgagacttgtctcaaaaaaaaaaaaaaagtaccacacatcagatgcagaaaaggaggtgacctcttaattccacccaaggcagttactgaactacccaatatgtgccaagcaatggggtgtagaggtgaaggcacccaggaataatgcacctgggatgggggcgacccgaggggatggggagggaggatgagctgcmggggagctcaccaagggctgaagatgaattaacagatgaacgtggagaggarcaaggttctaggcagagagcatagcagatggtaaagacctagaggggagaaagtakggggcatgggcgaatccgaagcagcccaggrtggctggaaagggaggaggagaggggtctgacatgaggctggagaagagtcaggtgtgttgagcactgaggacagggcagcgtggggcaggctgtcaccaacccacactscacagtgctcaggttgagtcctctctgggaccctcaatttgaggctcctgtggtttcctaatggtccagctcccagcgattctcccagattgcctctaaatctcctctcccaccaccaggtgaccattacaattgggctgcgctacctacagacgtcgctggatggtgtgtccaaccccgaggaatctgagagcgagagcsaggrctggctgctggagargagcgtgccggagacctrgaaggcctttctggagagtgtgaagaagctgggcaagggcaacyaggtggaagccgagggcgcagrcgcaggccaggccccagaggctggctgagggccctggggcycctcccctcccgaacactgagaaatagtgcactccaagaaacgtggatctccccctcatccaactccgaaagtctgaatctcccaaggagggcaccatcttacagagactctccctgacgrtggaatttaartttagggtccctaaaagcatttgacacacagttgttgaatgactgacccaaaatgtgaatgaagctaatgtgaatgtgagtgaagctcccttcaggcccgctgccctaggatatgccctcctggtgactcgggggctgtctcagacgactagcccaggacccatctttctcacacggatttagtcccaccctatggccactggccgtatctgagggctgctccccttttagaatttacctcttatgagctccatgttgcttcactctatccaaagtgtcacttggtgcataagcacagaaatctgaaaaatggccatgttgtcttttttttttttttttaatgccaagattgacaggttggccgtttgcttaatgccagaagttgggggaaagttacrcttttctaagaataatggactcttaaggcattgagggctctaaacaggattctttaatcatggagcaagagaatttcaaggcaggggattttatcccccaccaaaarcacagtgaaaggcctgcttttgtgtcccattcacatgccctcggtcactgagtctggagtgaaccacgggttgaggaagtcaggctgttggcgtgtcccagcaccacaccayccctaaagtgccaggtgatctcctgtggctcatcggtggaagcagtggggtaggctgctgccctgctgtggaagaggagcaacaatcagacatgagtccaccctttggagaccargcctcagctcttggtgggccmagggacacccacacaggtggccatcacagccccatggacaacactaattgtccacagcaaagggcaaggaatcctctgggagcttcttccgtttcttccccccagatacccatcttgaaaaacactatttctggaatgcttctgcatcaaaggagattctttgagatagcccatcttcctgagctagcaaatacaggagttttcactttctttaggaaagagaagctttcaggggaaggagagaatgattttgctgacttcccaagccctggtgaccagaccaaggcagggcccagcataattcctccagttggatgaacattcaagagagctcgttcctacctggctggagaccgaggccagaaggcaaaaaccagaaagggaacagtccataacttacctctgcttctgaccgatggtgtttgggaataggttactttggactgagtttgggttctytgctgtcctaagwacttyagtgtagagaaaataagacttctggtgctgctggggtatgttctgggcttaattcccccaagcagaagaccagatccaagatgtttggacaccctgtcagacgttggtcccaagtttaattagatttctgaatctcgttgaggccaaggaatgatccatactgaaaaaatgctgagccagccatctttggcaaaggtccctgagctcttgctatctctcaagagtgctgagaaccacggtgaaagtgctgctctaggcccacaagtgtaactatgctgttaacagctgtcaatagataattaaaattcatactgtatgaaaatcacttttgttaaatgactgtttaagcccattcaacaacatatatcagaatcccctactaccgctagtatttgccaaaaaagaaaagaaacccaccctaagggaagcattggtaacaatcgttgttataaacatggcttgggtatcacatctctccatcttgccatctcttacctgtaagaacggtgactattacaacagtgactattattatatccaaataatctcagcatttgctggagtttgaaccagagctgaatacatggaattttaatgtagaaatttaggcaaaactccaagccattttttcttctcctctggccaaaacgttatttcctcaaacagggaaatatgagtctctatggggccaggttataggagcaaatgtgaacaacctgagaatctgaaggttgttgagaggaccaagagtgcattgactctacaataaatctcactcattggttcggagcaggcttagggttaactgcattttaacaggtcttctcaggtagccggtagttgcgagagaaacctggaccatcccttttggtcacctaccagtgcccaggaagtctctgctatcaggtttttgcttgtgtgtaacttcagtctttccttgggctggtgtaaatccttttctcctgagggacccagcctacttttttttttttttttcaaatatggagttttgctcttgttgcccaggctggagtgcaatggcatgatctcagctcactgcaacctccgcctcctgggttcaagtgattctcctgcctcagcctccctactagctgggattacaggcgtttgccaccacgcccggctaatttttgtatttttagtagagatgagatttcaccatgttggccaggctggtctcgaactcctgtccttaggtgatctgcccgccttggcctcccaaagtgctgggattataggagtgagccacctggcccagctagcttttaaagttctgccagcatagccccgggatggggtgggggtagacagggccttaggactttcatttttaaaatgctcactccacagtgaagaaacaggtgatgactatcctgaatatttgggaagctgtgtcctagaatttttggcctcagttccagaacccacagcttctttacaacatgcttcaagcctgggactgagctgccagtaaataaacccctagtaaccttaatatgggttaataagattaggtgcccgctctgcacgctcccctgcccctcctcgtccgggcacctgttacgctaggccagcatgtttgcagcttagccagggaaaatcgtggaccaagacagggcttttcatccacgactggctaaaaagatggctctcaatgacagcgcaggcaggcagcaccactgtgttaggaagagaaaagtgtctgtccaatactatgaaagtccagggaagagacaagtgccttcccaggtcacaatggatagattggctggaaggggaaaaacatgtcagttcttaactcctgacagcattttatcctgtccatcacagaggactgtaaacagcaaagttacagattagagaatgctgagctctcaggatggcatcaaatggaggattaagatgtaagggacaacttctagctatttacctgagggaagtgaaaattcaggtttgtacaaaaacccatccatgaatgtttgtagcagtaatcaccaaaacaatcacccaaactcacccaaatgcccttcatctggcaactgcccagaagtctgtacaacggaatgctactcagcaatccaaaggaacagggaggacccgaatgcattcttctttagtgagaagccagactcaaaatgctacatatgatacaattccatttatataacattcgggaagagacaaaacaaagggagagaaaaacactggtagctgaaagccaggatgaggcaagaagctgactacaaaggggacttttggggaagatggaattgttctatttctcgattgtggttgtttaactgtatgcatttgttaaaatgtataaaactgtacactaaaaagagttaatctgtttgtaaaatatacctcaataaatgtgacttaaaaaacaagagtaggaacaggccaggcacagtggttcacacctataatcctagcatttgggaggctgaggcgggagaatcatttgagcccaagggttcaagaccagcctgggcaacatagcgcggctgtatctacaaaaaaaatacaaaaattagccaggtgtggtggcatgtgcctctatagtaccagctactgggaggctgaggtgggaggattgctcgagcccagaaggttgaggctgcagtgaaccaaggctgtgccactgcactccagcctgtgggacagagcaagaccctgtctctttaaaaaaaccaaaccaaaccaccaccacaccaaaatcaagagtaggaagacagggaggagcatgtcagaaggggcttcatgagttcctggaactaaagacaagagtggtgaaggcagtaggctgggagcagtgttactgaccaggaggcagggtgagtgcaatggaaaccttgctgttttagtttgatgctctcaagaggatttcaaaaaaaacagaattctcatgggcaatgactcccctaggaagacagtgtagctgcctttctatgtctctctctcaaaagcaggaagtggtcataaaaaaaagaaaaaaaaaacctccaacagccctgaaaaaccagccagcacactaggggagtgtgtaaggacaaggaccttgagatcaccaggtaaggatgaacaagagtttaaacccagacacaggtcttggagtgccctgtttcccagtgatttgagttccaaaatggtccacaaaggtcacacgctgtcatggctaatgaatatgaaacttaatcagctgaaatgatgatcacactttctctgggaaggtcaagatagtttggctagtggccataataatataaccctcttaaatttaaagctaatacagatatcccactatatttgtagcaaggtgacacgggcaccttgctgtggcaggtaaatgtgtaaaatgaaacagaaagatatatgctaaccaaaagtaatgccaacacctaaagcatttatttggatatctttaaactttttacatatgatacattccaaattttacaagttgtccacagatattaaagttatagccaatttattaaacagatatgattttccctgatatggaaagcgtatgttatataaacatttctacaataaacataaaacatgcggaacaaatcataaaactaacatgatttgtaaggtaggaaagacaactagcttaacaccagaaaataaaaaggtgtgtatgttgcaatttcatgtaaattcatcttctcccaggctctgtgatattctcagagaatgaaatccagagacaacctttgctaactccaggctcctagaagtcggaccggaaagctggagtattgttatgatttggtgaaaatgtttataatccacttgtagagagagaaacctggtcttattattttaaattttagcttggtgaacatatgaaaaaaagccaaaagaagcttaccttaaaagctaaagaaactggatgtgacagaggccaaaataaacatgaattatgccacctacagcccaaacaaccagatcttatgaatgaaggccagaaaaagggggagagaggtggactcaaatgtgaattttctttctattggtcctcctctcagctgggtgagtcagtcccacgcaagaatggcgacggtcatcctcctgtcaagagggggcggttctttcacacactaccttggagaggaatgtggcttctacatcctcacttcttttagcttcagttccagatttctgaccttcttcctgtgatactgtggagcatgcctagttgactggtagctgagtggaacaaaacttgtagatgtaattcaaagaaaactgattgaaagggtcagttgcattggttaaaaaaatccaagagcctcttattactcatctgttccttagccccaccttagacaggctcagaatttattcctctactaagtcttcagtcactctctgcatgtattcaagctctcagcagtcatacatcaaacaatagtagttgtgtggtacataataattataagctattttgtaagtggctcttgttctaggaaggcacctcagtaagaacaatgatcaaaaagaataaaaagcctgggtgccagaccatcccaggaatgcactaagtgagccagcaaggaagcagcagcttgtctgttccaggaaatgctggctgggtgggagcgggttctcaccttcttcagtgtttggctttagatgatatactctgccaatttagccttagaaataacaagagaatatcactgtctgaaacattagggtattctaaaagaatacagataagaaaattaggatactcttttagaatacctattattttaaacttaagcttggtgaacatctgaaaaaaagccaaaagaagcttaccttaaaagctcaagaaactggatgtgacagaggccaaaataaatatcacttatgccaaccacagcccaaacaaccagatcttatgaaggaaggcctctcatctagatattaggatatctaaaagaatatcctaaatttttaatccatattcttttagaatatcctaatttttcttcctaattctaaaagaatatcctaattttttagaccatcctaagtttttggaaagccctctaagtgagttttctcaaagccaaaagtcttgccataaaaaaaaaaaagaaaaaaaaaaacctctaacagccctgaaaaaccagccagcacaccaggaatccaccttctccccacgggcttcttctgcatgtgtgtcccccaactctctcatagtcaatggagagaagggaacactgccttcaaaatcaaccactttgctcctaggagtagggtcctgtcagcagaggggacaccaacccagtcccagtgttgggccactcagtggaaccaggaagtatgacccaacagaccacagagactttgttccctgcctccgttgagtcagcttcggacccacggttcactatcatcaataacgtgaaatatcacataatggctgggactatgcagtcagacccccacaaaggggctgggatccaatctaggaagagaagctccttgctcgatcttaaaacccaagacattatatttgaggggcacagcaaacagtgcaagaaaatctgctgatggaagatgattttcatcagtcctcagaaccagaaactataaaactgggaaggaaagtttaaataaagaatttatttccaaattcagcagaacttctttctttcttaaaaagccaactgggttaaaaaaatccaagtttgtgttttttggtggtgcaataattataaatgttgccagtcaatgccaaccagtgtctgattggcttcctgtgcatgtccaatttcctctgtgacactgtgttggtgccagagcttctgaatcttcttgaatcgctctttgcataaatgtaaaggatttccccgtctagaaagagaagacacatgtcactcagaatgtgttctgtttattcctctattataacccaacccttcctgatttaggcaaggttacaagttattggttttagactccctgcaacatttctgtctggcaggtgactgtggctattaacaaaaacatcagctctgaccctttgccaagagcaggtaaaagggaataagtgctgaaatgaggaaggaaaggtacacaaaccagacttacccggagtgaggtgagggaatagaggttgcgggggataaggagggtctgggttgagaggctaaaactaccaattcattgcccattttgttggtaacgtgtaaaaagggaagagggcagaggagaacacaaaagaagaattataggagtaaaaatattcctcacagattttactaagagtgcaaagaaaaaagaaaaga

SEQ ID NO: 96482 - DNA, 16566 bp, Homo sapiens
gtccacagacagtacaaagtctggcctaaaacctcctaaagttaggtttgtggttaggaatgtccaagggaagcgtattttgttttgtttttctttttgtccccttctatccagagccaagcttgagataagcaagtatgacaggcagaattctacaatgccccatgatctctgctcccttgtgttactgcaagtataatcctccctcccctgaatgtgggtggaatctatgacttgcatctaatcaacagaatatggcaaaggtgacaggctgtcacttccatcatgacattatgttatatacaactttgtcttaacaggctggagagactcttctgtggcattcaaactgccatgttgtgaactgcctgtggagagaaccacaaagcagggaactgtagacagcctctaggacctgcaaacaggctccagctgacaaccagtaagaagccagggccctcagtcatgtaagtcacaaggaaatgagttcatccaacaaccagagggaatttggaagtatatcttctcctagtcaagcctctgataagaacacaaccccagccaatacctggattacagcctggtgagaccttgaagcagagaaccttgataaaacatgtccaagcttttaacccatagaaactataagataaatgtgtattgttttaagcctctaaatgtgtgatatgttaggcagcaatagaaaactaatacagcaaaggtctccaccatctctatctgtggcatggattttttttcctcattcacccaccaggggtcccttttcagagggtacaatccaaatcgccacctttgtgcaggctctagacttggtttcctaaccttgcacacatggcctttaaacccaaccttcaggtcaccaaaaattggtagctatatccagagcaaacacccatttcaggtctcaatcaactttcttatttcccacatctactttagccatgtgcttctaaattatggtgtttaaaatattttatccaacaagtgttatgttttttaacaagaggatttccttacatacctaatctgctatacacctgggaatttccattactcatcagcccattgaaggtaaatttcctactactaccaaaccccaggctacttaagcaaaagagattatgatctcttaattgccaaatccagtcaactctttccagtcctcatgttaattggcctctctctttcagcagcatttggcacaggtggccacagcttttccttcctttctttcctcctctggctcctaatcacatatgtttatgctatttctgctgtcaccatttcttctcaatttccttagctgactctactttttctgcctccctcttaaatcttggtgctcctcagagttctatcctaggaattttattctcattctgtaatacatactgtacgtggattaccttatccattcccatggcttctactatcatgagtatactggtgacttcctaatctatacctcaaattgtatttggaaagatagattaggttcagtgagatgagacaatagctgggatcataggtgtgtgacattgcacgtgtcaggtgcaatgatcccagctattagggaggctgaagtgagaggacagcttgagctcaggagttcaagaccagcttgggcaacatagtaagacctgtcttaaaaaaaaaaaaaaaagaaaagaaaagatctacccaaaatctcagtagctcaatacggaaaagtttactttttgctcatatagagtctactgggggtccaagtgactccccagagaaactgtcctccatatgttgactcagtgatccagggttagaactcttaccttcaccttcccatcataaaatctccattgttgtgggagggggtcagagcaggttttgcattagcaattaaatgctttggctaaatgagacatgcatcacttcattcactacccattggccagaacttgtcacatgacattacccaaccacaagggaggctccacacaagaaggagaggagaactggttattggtgagaactagtactgtctaccacacaaatctagatctcttttgtgagccccagatctgtgcatccaactgctctctcaacatctttacctaaatgttccacaggcaccccaaacccaatgtgtccaaaattaaactcattattttttcccaatcctataaccccttattttatattatcaacattagttgatggatacaacgcaggaaacctagttattgccacatcccctctctctcttactttcctctcacacctaataaatgactagactcatcacctatctgctctacctcttccccatggccattgccgctattcagatcatcctagtttctcacttggaactctgcaacaccaaaggattcttcacccactgtctggcacctcaccagtcccccctacactctgttgcctaaacccaaatgtgcttgtgttagtcctcttcagcagtctttccattgcctatacgggtaaaatatgtttagggcccgccattacctggttttatctatcctctccagcctttcctcttccatcacccacccttatcctatcctcattccccatagcaccacctatggtgaaatacttgcatttccctaaactcaaccatcgtgccaaagcatgcccttgtttaccctgtccctctacctggaatacacttcctccctcgctctgcctagaaaattattcatctttcaaggtgcaactcaaacattgtctcctctatgaggcttttcttgacacctatcctccctccttattgtgtagcctgacctctttgttcattgcatctcactctatcctgtacggatgtctcacatctacaatatttcattatgcttatttatgtgactggccagtctggaacatgcttttgtagatgaatgaagatatctgtctctctgcaacggacagatcccgcaagtcaagaactgttgtcttactcattattgaacctccagagcttgacagggtgttttcgtaggtgctaactaaatgtctgattaattagttaatcctccctctaagtcttgaaataccgctgtttccttctgtggctcctcttcctccttcttgccctttggttgtatctttgatcattgtctaatcttttatcctcccttgtttttgctgccaccttcctaaatatctcccaaatccatatatatctcttcatctctagtgctaccatcctagtccacattactattaccctcctcaactgtatcactgcagtaatctctcagccggtctattcatatctattctggctaacttccaatctgtttgctccagttttagtgattgttccgtaatgcaaacctgatcatgtcacccttgcttaaatatctttagtacagataaacccacttctcttaaagacaaaagttgtgacggactggccccttcctgcctattcaacctcatcctcatcatgctccaccctctgcccacaacccagtgccacctcacatacttcctctttcagcttttgtcaaactagtcttttttttttttgcccttcaacttcctaccttccttctggcacaggatttttaaatgttctgttccctctgaactttcccttcctcttgttctagtggaactgcaactcacatttcagatttcagcttaagtgttgggtcattttgttatgttttttggctctaggaaggcttccctggtcctcttcccctctgttgtaggcatccatggcacagggtcctgatccttcacagcacacttaacaatcacaatttaccatttctttgtgtggtaagggcctcctttactagtctgaaagttccatgaaggcagcccctcacgctcgtcataatatccttaaagcttagaatggtacacagcacatagtaaatgttcaataaatgttttggagtaagtgaatgaagaaatgaattatctcagcaactgaggttcaaaaacttgaagtaatcattgactcatcctactgttttattcccaatatccaggtcccaagttatatgtcctccaattttatgatccctgtggtttcagcctatacccttactacacaatacccagaatatcaccgtaccatctagcttctttgtctctacccacaatttatcttatatgatatggtacaatctgtcataaaggctatgtttatcatgttatatctcaatcaaaaatatttagtgtttattttttaaatatttcaaatatgtcttgcttggacttaaagctccccaccatctggctgcaatccatctaagtcaactatttttcatctcccaccctctccaaatgcccctccctatttatttatttatttatttaagcactctgtcactcaggctaaagtgcaatggcatgatcgtgactcactgtagcctcaaactcctgggcgcaaaggatcctcctgcctcagccccccaaagtgctggattacaggcgtcaaccaccacacccagccaaaatgttccactcttgaactgtgctaatatcccagaaatacatcacttgaatttcagcaaccaaccctgggcctagggcacccctcccacagccctttctccctccatccatccaaagcctatccacgctcaaggtttacctgaatacttccttgcctgatttctccagctctgccagctgtgagttactcttctccacgtggaaacctcttccccagactctgtgcctggctagctccttctcatcttcgagttctctaagtggaaatgtgcactccttagagaagccttccccagtcctccatcttctctgaagacattctcccagtgtattctgtctagctagcactcttttttttccctcaaggcccttaatacaatgtgtcattgacttatcatttacttgtttttcatttctcttctcaattatgtggtagagtctgtgaggcaaggaacttttctgccttgctctccgaaaaacctgtaataatctggtcagttattaaacctatataacctggtcaggcacagtggctcacgtctgtaattccagcactttgcgaggccaaggcaggcggatcacctgaggtcgggagttcaagaccatcctgaccaatatggtgaaacccgtctctactaaaaatacaaaattagccgggcatggtggcgcatgcctgtaatcccagctacttgggaggctgaggcaggagaattgcttgagaccaggaggtggaggttgcagtgagccaaggttgcaacattgcactctagcctgggcaacaagcatgaaattctgcctcaaaaaaaaaaaaagaaagaaaaaaaaagaaaaaaaaaaccctataatactagctcactgtatggcctatagcatttacttaatgagtatatttattaatattattttacaaataaatatttataaagaaatgattcgccttccctttgaagggatcttaacactcttaacacatttgaagtctgcacagctagtacttaactcttagcactgtttgctcttcatttttcattatcagcctcatctccctggttagaatagatgagattataaggtttttgatgacaatgtcatactgatgcgacctccacagtaaatctggcacagtggttaaagtaaacacttaataaatatttaattagcaagaaacctgtcttgcctccttatgttctgtcattcatgtgtcagacacaaagaaaaggtacaaaagaaagattaaaaaatcataatgttgggctgggcacggtgactcaggcctgtaatcccagcactttgggaggccgaggcgggtggatcacgaggtcaggagatcaagaccatcctggctaacacggtgaaaccccgtctctattaacaaaatacaaaaaattagccgggcgtggtggcgggcgcctgtattcccagctactcgggaaactgaggcaggagaatggcgtgaacccgggaggcagagcttgcagtgagccgagatagcgccactgcactccagcctgggccacagagcgagactccgtctcaaaaaataaaataaatcataatgttgacctcaaagaggaagcctaccgttgagtttagtaagatctttgctacacacaatgtgatgctggcagtggcaggggcagtaatctttatttcgtcatttttgaaacatagaagccgtaacggaagcaagtgaaatgctcagtcttagaygactgcgtcgtgctatgaccggactttttcttgaaaggtaaatgcatttaccacatgcttttaatctagattaaataatcactcaccaaaagaaagtgtcgtctaattgttagtggwttctatcacttgttttctttgatgcaggaagggttgtatttgaatggttctattaagttgatggattttrcgctatcagtaagattctccagtgctggatgaaacgtgaaaaagtatatatagcaccgcttctattttaatttatgcttctgccaactgtttgggttgtgctgaaagggaaatatatttcctgcttttcttggcctggatttgtgagtagctatttccctgtggtattgtacgatgattttgtccatttatgtgaaagttagggtggggtggcctaatgttttcacagcggctatggtaacatttttgtaaattcagaactgctactgtgaatttcaggattttacagaaacctatgatcctatcttcttccacctctccagtggcaaagcctagtgtaagctcatactctgtttagcaccagcatatatttcaatattttaaaaatattatgtcaatattttatgatggtctgcaaagagcaccactgacttacaagttagaaaaggagcaaaaagtgtgagaaaaattaccactgccgattctgctgcggactgtgggcctcctattctcatggctcagattcctcaacacattttcccgttggcccttttcttatctgacattgcatgatctaaaaatgtttggtgaattgtaaggtacttggtaatgttgttgttgctgctattgtaacaggtacagggcgatgaggtgtccttctcccaaccctcccacaggtccaaggacttggaagttaacttttgagagctgaacaataaaacaataaataattgatgacatttgtttaaagaaatgaccttaaaatatagaagaaataacaaagccaaaacattttcccatgagtttgcctaaatacaaagtaaaattttggcctcctaaaaaaaaaaatcagggatgcatacaatgttttatgcacaaaaatatctctttcattgttattgatttaaataaaaatggaaacaattctatcagtaagtggggaatttgttaagcaagttatagtacatagctataatggaaagacctatcaccactaaaaaatgttataaaaagtttttagtgacatagaagaatgtgtatggcaaaatgctgagtgtaaaaggaagatataacctcttataaaaagaaatatctcaagtagctttttaaaaaatgcatggaagtctgactaaaaggaaagacactaaaaacattaatgagtagtaggagtttgggtgatttcactttcctgcctttagatattttatacattttgatataaagcctaaacaagaatattggcaaacttgagaagataatacgtgaacagattagaagtgtctaatgaggtctagagtaagggtctccaagagcaagtttgtcaaagtttatgtagcaatgccagggaagagtaagattgatacatcagacccagttggcagtcaatataaaaatcatccattcatcttctctcatacttacttcagttcagtgcttaccaagcaaatttatgattttcattggcattcttatatgttcccctgataggcaaaattcactgattgcaccaacatgtacctaatgttatttcggcttatacatcagtctcctgtgagttggttggtgggaatcagttctggagaaatcagtcatttcttggtgccctgataagatcaaatttctggacctgcaaacctgaaggctggctgctgagctgcagaaacaacaccagaattgttaaccactgatgagtgatctgtgaccactgatggcactagaacacccacaaattgcctctcattgttactactcttatatgacaatcacagtctcagagctggcccttaagccggctctcccttccaagctttctaagagataccttgttttattctcaggggatgacagcatgggargcaatggctccacatgtaaacccgacactggtgagtttacgacaggaataattacctgcctcacgtctgagttaaaataactagaaattgtgctgaagggctgtaatggaaaggcactagctagtgcatttctgaaactggaagaatccaattttaccaggacacagaatttaatgccaggaggggtgaaagggggaaccacagagacctgcctggccctccaaatctgagtaaagggtgtctctgctcaatatcaaactaggtgggtcctgctcccctatttgtggtgtaggcattgggaaaaccactgtggctgtttttggctaggcactgcwaatagctgctctgcaaaaagggcaaacataaaagggcagcagtttcaaggtcaaattccccaaggactttgggaagcatttgttgtttctccctagctgggagatgctttccttaggccagagggagcatatctcttcaggagttcctattaaaatctttgaggagrgcaacatatgagatttttttttttaatcaaaggaacactaggcttgtatttcatgtatgtagttgatttttaagttctatttttcatttaaaagtacttggaatctaaaaaacaatgttctctcatttttgtaagagttgcagccccatccttaatttccactggttgcttgggtagaatggggcacctggggaaacttaagctggaagggtatcatgaaaagtgacagatacactaattccttttgtgttttcttgtagaaagacaaggcactctctccacagcagccccaacaactagccctgcaccctgtctctctaaccaccacaagtaaatgagcattctcctatctgtttcatcttgtaccacgtgggatttgatgttgtgctgacagcctcggcttggggatttgggcagggagactggggagaaaggactagaaacagtaaaagaacaaagtcagtttgtgatctcaggagtatggctcttaatttggcatcccctaagcttcaagagatccatggatcccctaagcttataggtaaaatttgctgggtggggaattatgaacattgtgtgggttgagggagggggagaggaagaggccacagcttcctctgaggcctcaaatggatgtgaaactcaaaagcaaaagctgaaaaccactgggtgaaagttcattaatcagtgtgaaaaccatttcaggagtccatccataggcaggaaaggtttcactctttaggaaaggccttcaaaagcccaacagttcatcccctgcctttctttgccaaaacagcaaaaaacatttaatccttgccttttgtgctggggttctactgacactgctgctgatagcctttatcttcctcatcataaagagctacagaaaatgtaagtggtctccaagggataggacagcccttctctctctgccattgatactagaattagctatgagtgagtaatgggaggaggtaggggagggtgcagtgtgataaaacctgcttagcccaccctgtctgcagactgaagattcaaatcccttcatttttcttccgccctgmcccccacccacctgmcaacacctsctccccaccccacccttcacccaagatcgaagggagaggcttcccatttccccaggcccattgctgagatgggtccctcttctttctggcaccatggcagatcactccaagccccaggccccagatcctcactcagatcctccagccaaggtaagatgaccacactgttttggggacactgaagggctaccgtcattggaattccsctccatactcttcattatctgctagaatggtggtattgatttccagacactgggcaagtgattctttgaccaaagtgctcaggttgcttctaaagagcaaccttttgctccagactggactcactcattcctcctttttctccctctgcagctttcatccatcccaggggaatcacttacctatgccagcacaactttcaaactctcagaagaaaagagcaatcacttggctgagaaccattctgcagactttgaccccattgtctatgctcaaattaaagtaacaaactaactcagcttttccaatgaggcttgaatccatttcctctcatctcagccctatcttcacacatcactttcacttttttacaaattttggaccaccacctgtgtgaaactgcagtcggagttgtttagatgtgatctggcaatgctatccagcatctttggagaccaatggtcagtcttttcctggccagaggaaagattgatggccctcccacttgaactgacagcctgtgagccccttgggggcatagactgccttccttggacccttccaaagtgtgtggtacagagctcagtgcacagagtattcacccagcatcatgaatcaacttgggaggagtcaaccaaatgaacaatctaccaaaaatttcaaataaagtcaaaccccccacagtgctgcctccatctttattatttgtttgtctgttcctgccaccttctccagaggtcaagattaaaagtccagagctcattcacagccaaaaacaccaccaaaggtgatggcacttggaaacaagctcagatttgattggggtgcaggtaccaaactctgccactaactagcagcattcatttaggcaaacttgttaaacttttcaagcctgaagtctttcatcttgaaaacagagataacacttaccactaatatttagtgtgaagattaaatgaaatatcttatacataaacattctatacatccaagagctctacacaaacacaaggtccctactgtataaagcactatgcaaatggagatttctacctccatcctatagcataagaggtatgcataacaacattatatgagaaccaaagataaagattaaacattaattcccccaaaatcccaatgaataatcacatataaaaatcccattaaaaatatcatcagatgagttcccaaaggtgaacaacaacaaaatatcaataagattatttttcaccgggcaggcttactctaaatttcctatgtaaaccataaacaagacagcaaatccagaaaaatgtataaaaataaataattaaagttatatgggaaggctagccctagtagctaactaaaagtacttgttttattaagcatcactaattaaagcaatatgttaatggtacctgaataaataaatcaattgaatagaatttaaagaccagaaatacatcaaaatatataaggaaatttagagtatgatgaagatggcatatgaaatcatttgggagaaattggtttattcaataagtggtagcaagataactagataaccatgtaaatgaaaataaagtaggatccatatttcacttcttatatgaaaataaatcccagatgtgaaaaatttaacagtaaaaaaaatcataaaagcactagaagaaaatatgggagaatttttaaaaatatttttgtagagcatgcctttgaatgtatgtcacaaatcccagaaaccagaaaagattaacttgacttctaaagtacaattaaaagtccaaagtaccattaaaaagtcaaaaggcaaatgacaagcttagaaaacacttgcaaagcatcttatagatatataaagatcatttgtaaatcaacaggggaaaaaatgaacaactcaatagaaaggacaagggataggggtgggcaatttgtaggaaagaatatataaatggctcaaatatatgaaaagatactcgacttcactcataataagggaaataatgattacaactaaaattacataattttttctatcagtaagactggcaaaattcaaaaagtttgctacctgtgtgggcaagacttggggggaaccaagacacacatacactactggtgggagagcacgttggtacagctaccacagaagaccatttggcaatagccaacaacattctaaattcttttctaagaatttataaataatcctatttctaaggatttatcctactcaaatacatggaaaattgcctacgtaacttgaactgcagcagtaatcaaattggctagaacttactgaggcttattacacttttagtacgattctaagtgcgtggcatgtattcgtggaatcctcacagaacactgtgaggtacaattattactcattttagatacagaaatggaggcacagagaggttaagtaacttgcccaagttcacattgctagtagtagtggcaccggaactcaaccctgggtaggctggctccagagtttgcatgtttatacattatgctcaattctctgaaacagcaaaagatcgagaaaatcttcattgtacatggagaggagactggttcattgagtgcaatgtagccattaaaaagaatgaggcagctctatatgttctaataaaaacagatatctatgatatattgcaagctgttgaacagaattatgaatatgctctactcacatgtagtagagtatatgtgtatctatatatttagtatacctctggaagaaaacacaatgaatggtcttggtgatggcctctggggaggggaaattgctacctgtgggactgaggatccctaaacatatagatataaataagaggactgagcagacagaaaccaaaatatcatctttattatgaacatggtcaacattggagaatagagcttatactacagctgcaaagaagttcagaatactgaactccactactgagttataagctgcaccagagcaagcccacccgtcccaacaagcaatgcagttgttcaaccttcccctaaggagttgcagaagagctcatgtgctctttcaaatctgcacccaaaagagtaaaagaggaagaggaagaaagaaagtatgtatgcccagttcctattcccagtctgccatgtcagatagccccctctacctcccatggtggggggtcactgaggagtgttgccttaatggagctcagtctacaccaaaggaagcaggagtgggagagaagcatccaccacagatctttcaaaaatacattaaataatattttggggtctgggtgtagtgtctcttgcctgtaattccagtcctttgggaggccaaggcagaaagattgcttgagccccaaaatttgagaccagtctgggcaacatagggagatcccacctttacaaaaaataaaataactagccaggcatggtggtgcatgcctgtggtcccagctacttgggagggtgaggtgggaggattacttgagcccaggaggttgagcctgcagtgagccaagattacaccactgtactccagcctgggtggcagaatgagactctgtcttaataataataattcttattattatttgcaaaatcaagttaagaaaattgaagtccaaggagatgaaataatttactcaatgacatctggctaaaaataaatggcagaacaaaaatttaaatcaagtcctctgacttcaaattccttgcatctggcctccacatcaagccgccccacagcacttatggtgtcaaggagacgagaaaggcaaagagtcaggtgacgtgatccagacagcatgttctttctgagagagagcaactgctcctggaagttggattttgagggagaagccagtggaagacagtttgagtaaaaaaaaaaaaaaaaaaaaaaaaaaaaaattagtctctctgtgggagtgaacaggtctagaagaaaaacaggtttaagggagataattcagtgaggtggccacagcaccaccagggcagccaccccacgagggcagcagagacccaggaatggccttctcccgttcgctgactgtaggaagtgcacacagggaggcctcttgagctttcagctgttcccaaacttggggctgacatcaaacaattctgccatccctgaagctagaggccatatcagctttccagttcagggccagcaccttataaacatcgctacaagagtagagtaagcactgtcacttggctagcactgtcacttggctatctacttgtacaagaaatatcaaattaattgctctttcctgttttcttgaagctgcccatttttttttttaatggtatagccctaaacagcgtcttgttttttgtcttcacattatgcagccagccttgctggaggataaaatgagtaattaaatgattgaccccaaattcaaagatctttgctaggtaagagcagaacaaagctcttgaatcctggatcatggaatcagaacaaacctacagggaaatggttctccagacatcgtgaatgtaaatcttccaagacatctgtagatgtcttcatctgctgcggaaggtctatgtctgctatctcgccttgtagaatggaatgtcctaactgaacccaaactgtattgctatttgcagaactggtgggttaatgatcccatttgtttaaattcaatacagggccacaggggaggaattggggctgttttgtggctaagggaaaagagagcacttttgatgttgtttgatctgagcctctggcaaggaggtgggttgtacagaaacacagaggtgtggtgtccacaccctcatcccttcccatcaggccgttgagtagctttgaattccctacctttggggaattaggacttagggtggaagctgaaggaagtgtgttcatgaacgattttgtgggagtctggatctaaacacacaggacatgtgcagaattatttcaacaaacaacctccctgttccaactctgctcagaccagaaggccacttgagtatcctgaggactgaggctggccagcacacccattagaagagatcgtaacacaatgaaaagcaggcttgtgatgacggcagcacagacagtgagtgggaggccctgagaattcccagaaatagcaggagagaccctatatggggagagagggtgtagatatgcaggtgggagctaagagtgttggtaattctggcatgaatggcaatataacctcattcacacccatggctgtgatgtcttgttcttgatttgtatttcctgatttgaatgaatatttcacttaagttatcacaccttggtttctcattgatcaaaagcagcatccctttagtcaggtggaagtttcccattaaggatgagaggaatggccttttcaccaaaagaatctgagaaccactgatttagtctatctccctttctttgggttgggcagcatttgataccaattcagaaatgagttagaacgttattctttgaaagaaacttttccagaaatatttttacagtgataccctagaagaagttactcataccttggagttcattcaacactggctaggaatttattggctaacaaaatacaagtgatttcctggtccccaatccagattctccacctcttcttcacttctgactgatggaatgcataagaactaagatcttgagatgttatttgagggcagccttgcttgggtgtggtctatcatagctcctctgactaccgccgttgctacctggctgcaaatgattgttgtcaaggatagagggtccttcagaattcctgggagatcagaatcagtctctgaggtgtgggccagttgtcatggtgattattctgttgtagcatcactttatgaactaaattaaaaaaatcttcagtcacatctgttcagtaggagccatttcctttggagtcaggacacgcgagaagggcttcaaagtgttgcctactttgttggggaatagaaagggaaaatggagttgagatctattgcctacccctgaagagtgtttctgcagcaaaagttccaaactctgtcatggggctttcatggggactaaacacaagtttattttcagggctgagatcagatatcattactgcaaagcccatcagtaggaaagtcaataagaaggcttggtacacagggcttgcattcacctctgtgaacacagctgaacttcttcagagcccaagaatgtcaaagctaggagccttggttcaggctgccacatttcatctgcccgagtttgaggaagcaggccatggctacaacaggctgtacaacttcttgctaaaaagaagtagcgttgagttctactgcctcatctttcatagtatcatgtgcctttccttaagagcactgactcctggtggcaatgttacatttgggtgttgatgtgtgatgtgtgatagtttgtcttcctccccctctacaagttccatggacacagatggcatttcttttgcccatctttgtatccccagcatctagctagcatggtccttttttgttgaactaacgaataaaaatattggggagtatgaaa

SEQ ID NO: 96483 - DNA, 242155 bp, Homo sapiens
  misc_feature (1)...(242155): n = A,T,C or G
caggtgctttttgagtggactgaacttcacgatcattacctcacatcctcacatcacaggtcaaatcctgtctcctttcttgatgacttcattcattatgagaaaaggttcatggagcgcctaccatgtggtaggcattgctaggttctggagacatccatttactcattcagtcagtcagcaatttttattcagagctttctgtgccaagtactatgctaagttgctgggggacacagcagtgaggaagacagatgagatctctgccctcttagaacttgtgtcatgtcggccaggcgtgatggctcatgcctgtaatcccaacactttgggaggctgaggagagtagatcacctgaggctgggagcttgaaactagcctggccaacatggcgaaaccctatctctactaaaaatacaaaaaattagctgaatgtggttgcacatgcctgtaattccagctactcaggaggccgaggctggagaactgcttgaacctgggagacagaggttgcaggaagccaagatcacaccactgcacaccagcctgagcaacagagcgagactctgcatcaaaaaaaaaaaaaaaaaaaaaaaaaagcaaaatttatgtggggacaacagttaataaacaagtagataaatgaaacaattacagattgtgagaagaaatgaagagatgaaaagcgtaccttattcagagaatgatgagggtgggcatgggggagggtgtctgcttgggtggtgaaggccaggctctctgaagagctgatactggaaaacttaaccaacccatgtgtcctccttttgaagccctcacaggccttggcatagaggctgagcacatgaagatctgctaaagtgaatgggaaactagggaaatgaaaataaatatctagcttagtgtaaaagtaaggaaatattttttgaaaattgaaacctgttgggtaaaggtcatgctctcttagagcttttgaaaaaaaacacatcatttaacagtcattaagaaaaaatgtgtgaccacaggaactgcagagttcataggtttcaatacatatttcaaaacaagcctcagaaataacaatccaatgtgtcattgctatacaactccttgaaaaataaatccacaacaaaaggaaaaaaataagactattttgcagtccagatatctaagtattaaagaacttataggagcctctgaaaatccagtaggcatgtttatgtctttatgatgatcttctcccctggataaatttgtttttagaaagaactaaaaacttctattttgagattgctctgtacacatgcatgatatttgaccatgtagagtcatgaacatgctctgtctatacattcacatacataaagacagggggatgtggaaaggatatggatttagtcagatagaattgggtcccaattctggttccagtacttttttttttttttgaaacgcagcttcactctgtcatccaggctgtattgcaatggtgtgatctcagctcactgcaacacccgcctcccaggttcaagcgattctcctgcctcagcctcctgagtagctggaattgcaggcacccactgccacacctggctaatttttgtatttttagcagagacggggttcaccatgttggccaggctggtcttgaactcctgacctcaggtgatccaccagccccagcctcccaaactgctgggattacaggcatgagccaccgcgcccggcctggttccaccacttattagctgtgtgattttgaacaagttatttgacttttccaggcctcatttctcatctgtgaaatagaggtaataataacttcacagggttttctgaagttttcattaaatcagatgtgttgaatgctaggtagatgtattgaatgtgaaacagaggcaaaccctaatgaatggtatttattcatttatttaagatttacttatttactaggcctggacaagacataatctcatttctattactcttacagtctatgaaagagaaaattcagaatatttcgtttgcttctgattctgatcacactagaaacattaaatgacaaccactactatttcattaacatatcaggagtcaattggaacaagttcagctgtgaaataattttgaaaaggttaagtgtttttctgttctttctgctttagctcagaacatacatgggatacatttaattattcatgtgtaaaggaaagatcccaaataacattcagtcaaaccagtattttcacaggccagaggggccttggccatctgtgtgagtgttgttgcctctcctaagttttctgctcattcctgcatctgtgatctggttcaaggtgcttttttctttttaatttttcactttttatttttttatttgagatagggtttcactcctgtcacccaggctggagtgcagtggcacgatcttggctcactgcagcctccgtctcccacacttaagcgattctcctgtctcaacctcctgagtagctgggactacaggcacatgccactacatctggctaatttttttttttttttttttttttttttagtagagacagggttttggcatgttgcctaggctagtctcaaactcctgagctcaagtgatctgcccaccttagcctcccaaagtgctgggattacaggtatgagacaccacacctggcctcaagtgctttttgacaggactgaacttcacatctactcatctcaatttcattcatcctcctacctagttattcatcctccttacctagttactcattccatctgccatcatagctttggttttagggaaaggggatttcacagttcttttgttccatcaacaaacaatatttactcttgaatgtctcaaatttttctcacctttttataagcaggaattcccccttaaattgtctcagcccgtctttaagtcatgctgcctcaaaaatggagtactggtatcttatagttacttatagtgacttggtccatattccacctaaagtagaaatctttaaaatatcctacttgagatgatggggcaatcaatacttgaagacatagccaagtccttatgggtagctctaatcttaagaaaggttttcttttcgttaaacagttcacacaggctatctctggagagtagagatggaggaaggtgagaggcaggaaaggaaagggaaaggaggagaaagattttcaagtttcataatatacccttttgttatgaatgtattttttcccttgtgggtgaattacttaaatttaatcaaaatctgcatccccttaaccatcagtactagaattacacacagtaaatctgacgcttcctccaaataacactttcaaatcttaaactaccttgtccttttcatgtctattcatctttaagctaaggacactattccttcaaatgttcctcgtatgatcaagcacatacctttattggttacctcttgcagcatttatttttttcttcccttgacccaatagcccctgatttctgagcggggctccatctggttctggagaagctgactctgcccctgctccaagggtggagtatatgacctagcctatcgttcctttttcctggccacagagatgggttcaaggggtggacacttgatcaacgctagtccaatcagaacaaatctcaggggtgaactagaaatgatagttttaaagtgtggggtgaagatgaggatgcatggaaccttgggaattgttgacgtttatcttggaccatgaagggaagagcctactgaaaaatgcaccaatattcaaaaagcaggtggagagatggagagaaaaatctgagtacttcttgtatgagaagaaaggccttgtttgaaggcaattctactttagaattatgtgatttcaactacaagtcaacatactattttgcttagcccagtttgagtctagtgctttgttacttgcaactgaaaatatcccgactgatatgtgtgagatggttcttccctagagttgcctgcctttggacagacttcagtttgtcagtgacctgcttaccaggttcccagaacacaacctactattgtagatgagattgaccatggcaggccacagaggctttctaatgagcctggatcccaatgtattgctattatgtctgaacttgaaactgtactggaattttgatcaccccaattccaacaactatcaccagaaaactacctattttacgaatcatttgggaacacaaaccctaaacacccaggagcttgcaggagaaaatagaaaggatatttcagaatatacttttgatatttcagaatatccttttctataaaaagttcaaagtcccttctgtttctgctttagctttcagaaacagaattaccaactccttgcttagtttaattttgacatgtgtatttaacaaattgcaggttttcaaaataattactatacacaagtactgtttaaaaaaaaattttttttctgagcaaagtaaccaccatgttttgcaaccatgttgagtggttgccatcaacgatgaagtaagagcaccggaggtctttcctggggaagaacacagctcatgcacccccaagaggcctctgggttgacatttccttggtgactttaccaagatccagattctggacctcagtttgggcaggtccataaactagactttataagtgtattcccagaggtgcagactcagtggaacactcacatgagatggacatgtaaatcagaatgccaatgctttcatttttcaatggagatgaccttttgcaggagatagatgacctgcatttcattcagaacaccacacttccctttcctaggggtagaaaattggaaagctggattagtaataaagacaactgctgggtgagcatggaattaagagaaagggagtggattgtcttgaggactatttcacccaggtcatgatgagactctgataaaatacatcctcacacatgggtgatactatttatctagggggctgggcacggtggcccatgcctgtaatcccagcactttgggaggccgaggtagatggatcacctgaggtcgggagttcgagaccagcctgaccaagatggtgaaaccctgtctctactaaaaatacaaaaattagctggacatgatggcgggtgcctgtaatcctagctacttgggaggctgaggcaggagaatttctcgaacccaggaggtggaggttgcagtgagcccaaacggcgccactgtactccagcctgggtgacagagcaagactctgtctcaaaaaaaaaaaaaaaaaatctatctgggggccaaagggaatgtggcatggtccacattatcaaagttctctttgtagaatgacaatagctaatacttatttatggtagttcttaccatgtgaccaatcactattccagacatctattaactaacttaatctttgtaataagactttgagacttatgctatcattagccccattttacagatgctaacactgagtcacaaaaggggaaaatgacttgctaaaagttgcattgctaatcaagtggtaaagctgggattcatatgtagcctgactccagagtccatgccttaaattgctatgctatactgcttcttgaatgctgtgtttttctatgctacacactcatctctgctgctacatcctacataacacattaactactttatatgctatttgacaccacctctatagttagttctgagtcctgataatactatgtctctgaaatattttcatctgtatatatacacatacatgcataaaatgtatgtatatatataatttctcaagaaaatatatacgtgtgtgtgtgtgtgtgtataaaatcctttactgttgcctctatacataccaaaaaatataaacaaaaccatgctagtatgggctgttggctaggaaaagaactttgttatattgaactggacagtgtgatgatagttgttaaaataggattctgcctatatttaatccttctccaaaaaaggaaatatttagtttcagagaggtattacagcaagaaacattagagaagaatgaggaacgtgcattggccttcaatcagaatgtaatgctccagtcgaagccagctgttcctgcatcaggcctaaggcagcacacccttggccatgctgtctctgaatctctgcaaaagagccaggttaagtctggattttattgaactgatcctatccttccttcacaaggattgttttaaaaccactataatcttaagaaatattcccttgttattttcttttttaaagttacattttaaaaaaaagattaaaaatgtatgattcaaaagcctaaatgtatgaaaggtaattcagtgaagtcttttccatgcccaaactcctaacacttggtttccctcctgggaggcaattatcagttccttccttacttatccttccagagatattccattatcatttccttttattgtcacttttttcccccaggatatatgtagttgggcctttttagcttattttgccatactttctttttcttcttctcctatcccttctttcaaaagacaaggttaagctctcctgcagacttttcttctaaatgccaatctgcccttggttgatattggttttatcatcttccaaatccagtttctgttctagctaggattaagcttgtatgcgacagctagtggtcccagtcaccttccaatgaatgatggatgggaccaggaggagcaacggttccctaataccattaattacaagattttcataagctcaaaattctagaactgacagttgcttccaactgttaccagctgttaatttggcagaggtgttggggatctgagtgccgttctgcaaacaatctgggacagcggctggctcaccatatatcttctttcacaggctctgtgatggtcaattctggatttcttgggtctaaaataatatcctaagcccattccagagtccacatgtctatcactagccatgtgaccttgcaggagtaatttactctaggtactttgtttcttgtctgtaaaatgaaggaattggatgcaatgatctctcaacttccagttctaaaaattccgtaagaaaatgggatctgttgttaaatggtgaatgtaaccacagtccttttctctttccccaaaagcacttaaagcttgaaggagtgaagagtttgaccatgatctcgaaacaatagctgatgcgtccctgtgcagttttaaagcaactgcttaggggtttctattcttctgttttctcctagcgggtttaagaactgctgtcccatagctggaaaaaaaagaaaagaaaagaaaaaaaaattctggccccacacactggcaagtagattttaaaataatttttagttattatgaaaacagaattatgggctgggcacagtggcaccctgtaatcccaacactttgggaggccggggtgggtggatcacctgagatcaggagttcgagaccagcctggccaacatggcaaaaccccatctctactaaaaatacaaaatttagccgggcatggtggtgggcatctgtagtcctagctacttgggaggctgaggcaggaaaattgtttgaacccgggaagtggaggttgcagtgagccgagatcaccctactgcactccagcctggatgacagagtgagactctgtctcaaaaaagaaaagaaaaaacagcattatgtatgtatgtatgtatgttatgttatgtatgtatttatttattttgagatggggtctcatctcactctgtcacccaggctggaatgcaatcttagctcactgcaacctctgcctcccaggttcaagcaattctcctgcctcagcctctggagtagctgggattacagaggcatgctccaccacactcagctaattttttttgtttgtttgtagtttttttagtaaaggagtttcaccatgttggacaggctggtctctaactccagtcctcaagtgatctgctggtgtcggcctcccaaagtgctgggattacaggcataagccaccgcacccggccaagcattaattatttttaaagtatggaaaggcagtggcaaaagagcaaccccctcctttttaacgtcacctgtataagatccagttaatctataattctcacccaatttgaatgttattttgagtcttcacagtggcagttttgccatatgcttgttgagttagatgcatctccctacgaaaggccaacctagctgcagtgacttggctttttgggtggcagtacactgggtgccgcatttccatgtaggcacattggcttggtaaattctgaaactcagttttgtcgggacactcagaagtgtcactttttcaggacccaactgcacaaaccaaactcccaaactcctgatagactgatactcaatccagactgacatcttatctatttgcaatgggagatgtactttcttcacaaccaggttgctcgggcctgctgtctaggcaccacctttcctatatcaaggtacctggggaaattttttttattcagaagatttgaggagcatggaattagtaaaagacatcacatccaggccctgatagataggataagatgaacaatttctactttatgaaaagttctaggctgcaggtgcttcacatttgattcatttactcattcagtgaacatttacaagcccactagcagatttactgggccattaaagcttaagtttcatggccctcacttacaagggccctttcaaggctgttggagtggccttggtaatatgttgatacattcatactttttgtaagatttgcaaaagtaagatattttacatgcagttggttaagactactatctctttgtgcgctgacttcctcggtcacacttcctcttgagtagggtggcattggagtatctcacaggcattttggggatctggcaaatgagaagttgagttggagctacagtatgctggggtttagagggctgacttcgccatgtcagaatgcctttggggagtgcttctactgccactgagacagcttacccggtattgagacccaagggtctcagtggtcaaaaagccagattgcaacatgaacatgtcctgtagtattgaaggtaagtggaacaaaagagaaagaaggtttgaaatgtagagtcagaagctaatctgtgggaaacccttctagccttcacatatgtaatgttgtaagtagaaatttcagtaatcttgaatgcctattcaaactgcgagttttctcccatcgggaagaaattatgcaatacatacaattatccaatacatacaattataaacatgtcacaatttttttttcttgatgagaatgaggaagagtagaacttattagaacctttgtatttgtattgtagtattacaaactatgaatatatttgtgtgaaaagttaagtattttgtataccccaatcatcaataatttaatttttttttttggatcagccaagctagaaaactgaattagctttcaattctgtctctataaattgagaatggcaatgaggtcatggacccagcctatggtcccttaaaagccagcagcattctccttccacacacccagtgctcaggttcaggaatcttcgctgagactgggcccctggtgctgagatcctagcccttagatacaacatgcagccagcctctgctgatgcttcccggaaactgctgctgagcagtgtgagattccctgtggctccccctttctccatccaggggaatttctggagagaattaccatttctctccaaaagttaaaaaaaaagaaagaaagaaagaaagaaagaaaagtatttgccctcttctctttcctccaggacactcttcataattctcttcaagggccttgggatttttacaaaacccaagaggaggctttgactctattgctggtaaattttgcctgggaaaaatccccagtcccaggaaagcaatggaagatgtactttctcccattgagagaaactgggaacccactcaaaatagggagaagtgaaaaatattgaaaatgcaaattaatatgaatggaatgaggtagagggtataagggagtagaatataaaatggtgtgtgcgtggtgatatttgacagacactgccaaattcttgctctctgcatttctttgatttgtttggtttatttttttaattagtatttatttatttatttatttttatttatatttgagacagtttcccctctgtctcccaggctggagtgcagtgacatgattttggctccactgtaagctctgcctctcgagctcgaacgattctcctgcctcagattcagactcctttcctctcctctcctctcctctcctctcctctcctctcctctcctctcttctactttcctttccttttttttgagatggagtcttgctgtgttgcccaggagtgcaatggtgcaatctcagctcactgcaacctccgcctcccaggctcaagcgattcccctatctcagcctctcaagtagctgggattacaggtgcctgccaccatgcccagctaatttttgtatttttagtagagacagggttccaccattttggccaggctagtctcgaactcctgacctcaagtgatccacccgtctcggcctcccaaagtgctgggattacagatgtgagtcactacgcccagcttagcctcctgatcatgcctcagcctcccaagtagctgggattgtaagagtacgctgccatgactggctaatttttgtatttttagtagaaacagggttttgccatgttagccaggctggtcttgaactcctggcctcaagtgatctgccagcctcggcctcccaacgtgctgagattacaggcatgagccactgcgcccagcctacttgtttattttttgagacagggtctcagtctgtcacctaggctggagtgcagtggcaggatctcagttcattgcaatctctgcctcccaggctcaaggatcctcccacttcagcttccagagtagctgagactgcaggcatgtgccaccacacccagttcatttttgtatttttttgtaaagatggggtttgccatattgcccaggctggcctcaaactcctgggctcaagcaatcaacctaccttggcccacaagtgctgggaacacaggcatgagccttcgctcccaacctgtttattttatttttttttaagacatggggtctcactatgttgcccaggttggacagtagtgactattcacaggtgccattatagtgcactacactttgaactccaggtctcaagggatcctcttaactcagcattctgagtagctgggactacaggcacataccaccaaatctggctgcattccttttagggaggctaagcaaatcagatcattctctttccaagaccttctttttgcaaagtccaccacaactggttagtttaggctttgtcagttgcaaacaaacatggaggtttctttaatcaggatgacctgatgcaactgaggatgacctgaggtcatcctgattaaacgtgagagtatttttggacacttgactaaatctttaataaatattgagtggattgaagagaatactaactatgtaaaagggatagatagatagatagatagatagatagatagatagatagatagatgatagatagatagttgatagatagatgatagatagatagatagatagatagatagatagatagatgatagatagatagatagatagatagatagatgatagatagatagatagatgatagatagatgatagatagatagatagatgatagatagatagatgatagatagatagatagatgatagatgatagatagatagatagatgatagatagatgatagatagatagatgatagatagatagatgatagatagatagatgatagatagatagatagatgatagatagatagatagatagatagatagatagatagatagatgatagatagatagatgatagatagatagatagatagatagatgatagatagatagatagatgatagatagatagatagatagatgatagatagatgatagatagatagatagatagatagatagatagatagatgatagatagatagatagatgatagatagatagatgatagatagatagatgatagatagatagatagatgatagatagatgatagatagatgatagatagatagatagatagatgatagatagatagataggtagatagatagatagatagatgatagatagatagatagatgatagatagatagatgatagatagatagatgatagatagatagatagatgatagatagatagatgatagatagatagataggtagatagatagatgatagatgatagatagatgatagatagatgatagatagatgatagatagatagatagatgatagatagatgatagatgatagatagatagatagatagattagatagatagagtagatagataagatagatagattggtagattgggctgggcgcagtggctcacggctgtaatattaacactttggaaggcaaggcagacggatcacctaaggtcaggaattcaagacaagcctggccaacatggtgaaaccctgtcttcactaaaaatacaaaaattagccgggcatggtgacgcatgcctgtaatcccggctacttgggaggctgaggcaggagaatcgcttgaatccaggaggcggaggttgcagtgagctgagattgtgagccactgcactccagcctgggcgacagagccagactccatctcaaaaaacaaaaatgatagatagattgacagataagatagagttatccttcacctaaccttcaaccttcaagtttaaaaaatcaaatttaacctgtgaaccccttcctatacttcctcttcctttctcccacagagacaaggactgtcctaaattttgtaaataacattcctttactttcctttatagtttttatccctaaacactacattgtttacttttgcatgtatttgaactttctacaaatgagatcatgcagtgggtattcatctgtgacttgctcttttaccaaaattatattcctcagattcatgcatatatttgtaattcattgattttcaccactgtatggtattttgttgtatgaaatataccactgttgatttatccattttactattgataaatacttaggttgtttcttggttttggcttttgcaaatcataccactctgatctttcttgtgtgtgtctcctagtacacatgtgtaagtttctctaaggcattaatatttatctagcagtggaattgctaggttataagatacatgcctcttcaaccttattagataacactaatagttttctaaaattattgtcccaatttgcatgcttattggttgtttatgagagtttctttctgttgctcaatatacttgtcaacacttggtattattatgtttttagttttagtcaaactggtttcatagcagtgtcacattgtaatcttaactttcatcttcctgattactaataaagttaagcatcttttcatgtttttactgagcattcaggttccttctgtgaagttcctattctaatgtttttcccttttttatatcaagctttgtaagagttgtttacattctgattataaattatttgctgttatgttttacagatttgttctccaagtttgtggctcgtctttaatgaccagggtttcaaatatatatataattaaaaatattaattttttcttttgagtttgtgattttaaagtctggttcaagaaattcttccctacactgagattgtgaagacattacgtatttatgtatttatttattttttgagacagagtctcactctgtcacccaggctggagtgcaatggcatgatctcggctccctgcaacctccgtctcctgggttcaagcgattctcctgtctcagcctcccgagtagctgggattacaggcgttcgccaccacttccggctgatttttgtattttaagtagagatgacttttcgccatgttagccaggctggttttgaactcccgacctcaagtgatccatccacctcagcctcccaaagtgatgggattaaaggtgtgagccactgcgcctagcctatcctatattattttctataagttgtatagttttgccttttacttttaagtatataatccacctggaattgattaggggggtggggtacggtatgaggtagaggtccaaattaattattcccttatgggtaaacaattgtcccagtaccacttattgatttcccatgacctgcactgacagtgctgacataattcagtttttcacatctatgtggatctgtttataggttctttattctattttattggccattttttctattcccaaactaacaccacactcctaattacttcggcttcataataagtcttgctatcttataaggcagttaccctgccctacctccaactatgtttttcttcagactattcttggccacttgttcctgtatatatatttttaaattagcttattaaattccaaaacaaacaaaaaaaaaccctgtgttgtcattttgattgaaattacattgaatttttagaataatttgggtagaacttacatgcttatgaaattgggacttctaaaacataaaatagtatgtctttccatttttataggccatctttaattatttcaataaacttaaagacaatttttgatatatattacacacttctcttgttacatttatttgtaagcttttttttttggcttaaacaatagacatttattcctcacagttctgcaggctaggagtctgagatgaggatgtcatgacctttattttttatgcttttttttttttttttttttttttgaggtgaggtcttgctctgtcacccaggctggaatgcaatggcatgattttggctcactgcagcctccacctcccaagttcaagcgatgctcctgcctcagcctcccgagcagctgggattacaggtgcccaccaccacacctggctaatttttgtattttttagtagagatggagtttcaccatgttggccaggctggtctcgaacttctgacctcaagtgatccacctgccttggcctcccaaagtgttgggattacaggcgtgagccactgcacctggccagtttagggcttctaagtagaattgaagccacagaactctcaaagcctagactcagaaatcacacaggtaacttccattgtattctgttggtcaaagcaaatcactaggaaagctcactttcaaggggaacagaaatagagtgaacctcttgatgtgaggagaaataaaatacttcacatgtttttctaaacgataacatagcctgtcttttcttgacttgctgaaattatgatcatggatgaacattgaattttatccaaatctttttctttatttttagaataatcatgagattattctcattttttctgttgatgtggtgaattatattaatcaattttctaatgttaaggtatcttatatttcagggataaattcaacctgctggagtcagttatgaataatttgtttagtattatatttttgccactgtgttcataattgagactgagctttttgtttcttgttctgtccttactagttttgattccaaggttatgttagccaaacatcataaattattctctcctttgctgtaacctagaataagttttgtttttgtttttgttttaaaggagtctcgctctgtcgcccaagctggagtgcattggcatgatgttggctcactgcaacctccacctcctgggttccagcaattctcctgcctcggcctcacaagtagctgggattacaggcatgcgtcaccatgcccagctaatttttgcattttttagtacagacggagtttcaccacattggccagactggtctccaactcctgaccttgtgatccgcccaccttggcctcccaaagtgctggtattacaggtgtgagccaccatgccaagcctagaataagtttttaaatattgaaatgatgtgttccttgaatgtttggtagaaatggcagcaaagctggtggaggtagtggtgatggcatgtttgctttggtttggtttagttggaagatttctaagtatttattttttaaaattgtagacttagttttcttgtatcttcttgaggaagttttaagttatactctccaagaaatgtttccattttactgaagttttcaaatctcttggcatgttcattgttcagggtattctctcaccttttagtgtctgcaatatctacaacatggcccctttttcattcccagtattgtttattgatgttctcttttctttttcttgataagctaccagaattctgtccattttactcatcttttcagaaaactttgactttgttgattttatctaatgtatttttcccattagtttctgttttcttaactgaattatttcttttttctactttccttggatctgtgctgctttagctgggtgtttggctcattaactttcaaactttcttcttttgtctgagtactactgcagtattttcattatgattcaattacaaatattttctcgttttcattatcatctttgctctctgagctatttcaaaatgtgtttgttaattttcaaatgggtgagtttttactagttatctccttgatatttattagtaatttagttggactatatgaagagaatgaataaatatattgtgttatctggcataatataggttactactatataattatatattaattgtattaattgtggctatctttggcttatttctaccatcttattttgtgttatttgtcttgttttttcttccactgtgtttttttctatcttttcttgtctttttttagactgattgaatatatctttctcctcccatctgttttttcttataataattaggaagttatacactctaatcttattcttttagtgactaagacattttagtctgcctacttgatttatcaaattctaacatttatcaatacctttatttccctcttaaataacataagaacatttgaacattctatttctatttatcccttgacttatatgttattgcagatgtgcatttattctttattgattttgaaccccacaaggtgtcgttatagtttcatctagtttagatttatgtttactcacatgtttaccatgtttttgctcatttcttcttgcatctcagactttccatttgaaattatgttacttttgcttgaaatatattctttagaattttcttcagtaaattggcaaactcaaattctggaaagattttttgctggctatacaattttaggttgaagattattttctctcaacccagtgaagatatgatttaccaccttctggctttcactggtgctgtttagtctaattttcattcctctgaagataatgtgtcccgccccctgtctttttttgagatctctttcactttgctgttctgcagttacactagatgtgtaaatatgattttttaaattttcatttatcttacctaagattttttaaaacctcacataaacatgtgaaaaagaccaaaattgaagaggtagtagggggtcagattatgaagggttttgaaagtcaggaatttattctgtagagcagtgatctttaagcttttagcttatgcatattatataagaattttgaaaaatgtgttctcttgcacatatttaagttgacatatacagttttcatcataattaaataagtttacttcttgctaataaaagagaacatatattaaatattttataaactaaaatcaggtgacaatcaaaattagaatacttttatgatatgccttgaatatatcatatttgatatatatttggatatggttatatgctatttgaagtatattggtgcacttatcaaacaaatcatgccaattttaaaataaatcacatacaatttttactagttttattaaatgcttttaaaattttatactttaaaatattatagtttcatttaaaagaataagaattatttacctgtactgcttcaaatgttctgaatttataccatcccaacatgaaaccaacactgtttctaacttcaaacttcacttttaacagaaatataggtaaaacattaaaaggtaggaagacccatggatttaaggtgctttgattaatccttaaggaggcctccctggaacaaaattgtcattccagttggggccctttcaggctgcaatcttgtcacaaaagaagtctaaacaaactctacaaagtcgcaaagattttagctgctgcctgtgatactttttctccctgtctccctcccctccaccacccctcacttttatatatgcaagcaagcctggatgtgtcacatttactttttggaaagggacttacgcaagacacaagaatttttgcccacaaacagctgcttcaaaggcagagggagtgagaccttctttttggtgcaaaaatgattagttatggagaggtcccagtcttaattctatttggaggtgggtccaaatgacctaataagcagatccttctctgctctttattgtagtattaaacaagaaactgacacaagttgggtcatagagtttttccacaggcacatgtaagcattccatgttgtattattgcaatactgtgaaattcgtctttttgagaaaagcacacacagatcttggcatattttacttgaaaacaataattgttactattagttatttccacttttttttttttccaaaaagagaatatgggaagagtggtgctatggtaactacagagctatagagaagaatttgaccaaggggatcctaaaacaaggtttaacacatgttttatggttaagcattaactaccatcggttataggttgtatatttgatattatatatactattaagtaattggaagaggtaaaacaatagtgattaagagtgtaagcacaaaaccagagctaataagggataaaaccgagatttttttttttattttatttttttgaggcagagtctcactgtgttgtccaggctggagtgcagtggtgcaatctcagctcactgcaacctctgcctcctggattcaagtgattctcctgtctcagcctcccaagtagctgggatttcaggagcgcaccaccacgccaggctaatttttgtattgttagtagagatggggtttcaccatgttggccaggctggtctcaaactcctgacatcaagtgatccacccacctcagcctcccgaagtgctgggattacaggcgtgagccgccatgtccggccaaaactgagatttgaacccagactgcctgagttcaaatctcagttttatcccttattagctctgtgaacttgggtaattttcataaccactctgagccttagttttctcatcagtgtagaggactaaaatgttatctaccccagatgattgttttaaggattacatcagtgcctatttcctcacctgtaaaatggtctctttctcttaagattgtggtgaggattaaaagggttatatgtgaacaatgcttagcatgaaggcctggcttatggtataacttcaataaatttattttgttagcaagtagagaaataaatctgacttaacaatataaaattaaatgtttattttacttttgcatagcatattacaactgagaatttggagatttaacacactctattgataatgaatatgatgaaagagaaacagacaaggcattaactttgaagagaaaattcgttgacatttttgtatttcattgtataaaataccaattaaatgtgatggaaaattatagcaaagacttacaaagacttcaatgattttcaaatttttaaataaagcatatcttgattttagttctttgttcaactctattatggaaatgtaatggcaatgcaatttctcctttctatcttatattagttctctggtttagctctagcttgtcgagtggaaacatgatatggcaagacaataaattgcctattaaaatccaatgtttttttaattatgtaattacgattcagggttacatgttctagattctgaatggcattaagttgggtttatatagtattaaaacaaccagattttaaaaaaagagtcagtcaattacctatatatttgtaagacaccaaaattaatatcttgaaacatctttatgattgaatgaatttttcactttttatttagacatttgtcatagccaataaggcatatgctaagtacacaaagtgtttatcctaaagctggttttggctttttgagttatccaatgtaagctataatttgtctctttaatttccctaattttcaagctggagataacattgaacattacaggagacagctatagttttgattgcccagagccatccaactttattagagcatggcggggttatcagtcacagtactctgccatctactccccacatcatggtgacaaataaataaactagacctggctaatcaaagaaatccagctcctcatgtcaagtgattggctcaggggtggacacacaaccccaaataagccaatcaaagcccttcactggtacttttcagctggagctagggtggaagcctgtcctcattttgagatttatgggctgaaaggatgtgtatctggggtgctatcttctcatctgtagaaatagatgaggtcaacacaccaacagaagatctgaaagatggaaagagggggcttaattatattgcttgggtccctagatttagttcatgtctgacattgtgtccttacatcccaatacacatgtgtgttttacagatagtttgaatcggttcatggcacttgcaactgaaggagttctgataagtacagacatctttctaatttgtttacagctgtaacaattaactgtgaaagtcaatacatttacaatgaagtatgttaaaaacattgtccaagtgtgacttgaacccaggcaggataacacagcagttaagagtccaggctctggagtggaactgtctgcttgcctgcctactaaaaaacacctgggtctgagaagcttttgtctctctagagaggatacatgctgtctggttgccacagagagagcctcagcacaccaaggcacccgagctgatttccagttactattggcactgacactgctgccagtcttataggtcttttatgagaaatgtcaaccttttcttgtatctgtttcaaaactgggaagagaaaggtagaatgagagaatcaagaaacataggagataacttttttctgtggatgggaagaacattcctataggttgtgcctatgaggaaagaatccaatctaagccaccaatagtaaagccaccatttattcgttttcatcacctacttgagccctgcaaagcattcttatttttttttcttttttgagacggcgtctcacccttgttgcccaggctggagtgcagtggcgcgatctcggctcattgcaacctccgctttcccaggttcaagtgattctcctgcctcagcctcctgagtagctgagattacaggcacctgccaccacacctggctaacttttttgtatttttagtagagatggggtttcaccatgttggccaggctggtctcaaactcctgacctcgtgatcagcccgcctcggcctcccaaagtgctgggattacaggcgtgagccaccatgcccggcctcattctcacttttcactctggccttgtgcctgcctgtcccagaatatcttctctgacactacttaaatgttgtttacttctctgttatgctgcttaagatgtggagactcagttgggttaagcattcattttaaagaagaaaatagacttctttaaaatgagcgtaagatcacaggcttcagtataagactgcatggattcaaataccacctctaccactgactatagcgttatgaccttggacaagtcacttaacctctctgtgcctcagtttcctcatttgtggtatggagataatagcacctctctcacagggttgttgagaatctagagagttgatacatgcttaaaatagtgccaggcacacaggaagcactatgtgaatgtcagctcttattaagcttaggtatttacagattatttaaatcagatttccttctccctaatctagctgaggacagcttcactgaaggagtggaagtttgatgggaggacaaggtgggggtagggcgaagaccagcggggttagagatggaagatgggggtggaggagcagtaggagaatggtagggtggaaatggagaggatagagaaagttagtaactttgtagagtgaaacaggtgtgggttggatcctttgggtccctaaaggacattaagaagatggaagagaggaaaaggaatggaagtgggaaggtgccaaggtaaacagcacgtatttcaaagttttgtctagtgttgacttgcatccagaaaaggaaaaagaaattctttttcatccctcttacccttggaatgatatcataatttaactacctttatgaatgaagtagattgctgtggacaaacctgagatcccaaccgtcatttataatgttgttccaataggaaaatagtttctgagttccaagtaacaagtttccatggtcttttggaacaggatcatttgtaagttggggcctgcttgtctgctgagcagggaggttgcagctgggcaggtcagacagagagccagcatttcacaatcgaataaactggagcctgctgtggttgacttgtctgtactagtgacacaactccaactacagcccaggtccccaggactctacaattctaatttagtagccttaccttcataactaatgctgttcaatgaaataagaatagtgatgtgcatttaatgggctgaacagcacaatatgccactgaaatgcttaattttaaaaaagacaatagaatctgaatttatgaacagtattggccaactagagattggtaattgcaagctgtcttgtcttcatgagctgcatggtgggggtgaagcagaggctgaatgacattttgtcattctttataaaggaatctaaatatcaagtaggaggaggtggaagaagagaggaaaatggggagatcttcaagactcctccaaatgcaagattattttgttcgacactgcttaatcttaaaattgatcatagtatcaataacttgttgtctttttccttttaggtattgcaacaacccaaatcataataattcctcattgacaaagattgatttgtacaatctgccctgaattgttcagagtattaaggacctggccaggtgcggtggctcacgcctgtaatcctaacactttgggaggcagaggcaggtggatcacctgaggtcaggagtttgagaccagcctggccaacatggtgaaaccccatctctactaaaaatacaaaaattagctgggtcatggtggcacatgcctgtaattccagctacctgggaggctgaggcaggagaatcacttgaacccaggaggcagaggttgcagtgagcccagatcacatcactgtactccagcctgggtgacagagtgagattccatctcaaaagaaaaaaaaaaagtattaaggacctatgagacacatttatagacaactttgcatctttgcattaggagagtgataggaaatttttaatttattattctttacttgcaagaaacatcccaaatcaatgatgtcattgttctatctatttgacagctgtgggactaaccaaggaaggtgaaatgaccagctgcctcacggcaaattctctggagtgactgggatctaaagcaataatatgcaaatccataaagacactatgtcctttcactgattaatggggcacaagaatctgtgagatttataattgaaacagttttaacaacagcacaacaaaaaaactacagtaccaggaggctcagtgagtggcagatctttaagaacagctctatgttgataattcttgcgcagcaatgcttgtatgaattgctaagagaataataacaactactattaattcagcacctactgtgtgccagaggctgtgctagttactttccctacatcatctctgaaccttacaataacgctctcatgaagattttattgtccttgtttgtctgatgaagaactgaggtgaagacaatttcaatgatttgcccaagtttccacagctggggctgggcacagtggctcatttctgtaatcccagcacttcgggaggccaaggtgggcggatcacctgaggtcaggagtttgagaccagcttggtcaacatggtgaaaccccatctctactaaaaatacaaaaatcagccagctgtggtggtgcatgcctataatcccagctacatgggaggctgaggcaggagaatcacttgaacccaggaggcagaggttgcagtgagccgagatcgcgccactgcacttcagcctgggaaacagagcagactccatccaaaaaaaaaaaaaaaaaaactaaagaacaggttccacagctggtaagtagcagagacccaccctcaggtaaatctgctgttgctgttgtatgtgaggcagcagcagcaaggggctttgggactgacattctgagacatacacaagtgtcagaaatgaccaacctgtcaagaagttgtggtgttatggataacttggtggtagtgcagtattttccatgaaaaacagaatcacattatggtagtaaggcagctattttagcaatataaataataaaaggagcaaagagagaaacaaaaggagcagaaaaatctcttctgtctgactacagcacaaaccaccatttaccaaaaagcatgcctgtaataaactttttagattaaaccaattgttcttgaagccactgtaatgttttctgtctacagggcaataaagcagatttgtattaatgtttttttgtttaggaggcagtaaagtagggtggttaagacaaggggctctggagcaagactgcccaagatcaaatcctggtgctgccactttctctttgtgtgaccttgagttagttacttatgtctagtactgcagtgttgccatgagggttgaatgatcaaatccatatgaagtgtttaaaaaccacctggtacctggaaagcactggataaatattagttaaaactgtatgcagaatcgtgtatgaattgtgtgaggaaattgaagatatggttccttactttcaaaaatacttagaaactagctgggaagagaaagcatctgcttataatatgtctttaaaacaggtacaacaggccgggcacagtggctcacgcctgtaatcccagcactttgggaagatgaggcgggtggatcactgaggtcaggagttcaagaccagcatggccaatatggcaaaacatcgactctactaaaaatacaaaaatcagccaggcatggtggagtgtatctgtaattccagctactcgggaggctagggcaggagaatagcttgcacctgggaggtggaggtttcagtgagctgagatcacgtcactatactctagcctgggtgacagaacgagactctgtctcaaaaaaaaaaaaaaaaaagaggaaagaaagaaagaaaaagaaaaagaaacatgtctaacattaaaaacagcttctttagtcaaggtatgcactgtcatatccctaataaaaatcaagaaataagaattaaggaaacaagggataaaagagaatgttttctggagaaagtgagccatgacctggattttgaaggagctgtggtttaatcattgtggaaattttaatttgaggactttggtaaagtaacttgtccattatcagtattgttcacctcaatttgttatgtatgaaaacctttcagtgaaaactttctgtgtgcgaggcattgggatggtggtaataaaggactacaaattcaaagacacctttatcctcaaggaacttatagtctattacaagaagttatacattaatgaaatacaagacagagagtgccacggaagggcaatgccaactggcaacacaataataagcacatttaaaaaatgggttagtctttggtgcacaaaggagctcagatgccaaatgtaaaaatgaacatgaggaacatgaggggaatctagtcctttaggaagggcctcgtggggtacaatagctattaagactagttctaccttgcctttgcaggatgagaaatttaatcaggctgttcagaggctgatgagactcccattaaatgaacaagaaatgaatcagaataagaatttattagattacatagctaaccaacagaactgatcatctgtacaacccctgactctcctctctccatctccaccccccaccattcctggtagagagattcattttaggaatagattgtgtatcaagaaattgcttggtatgagtcagaaagattgacattttccactctaagaatatttgtattaactatgtgatcacttttgtgtccagacaattatttttccagactcctctttttatattttttctattataacacattctttttttcatgtgaagagagatttttaacatgttacaatttccaagtttacacttttagtttcttcctgatgacattcaaggaggaaacttagtttcttatcagtatgttctaaatcccactatagcatgggttatgttggaagtttttctgtagaaaacaaatactaacctagtagttgaattatttcttttcctgaggatttcatattcttcctgactttttgtctccacctcttgtcctagatcttgaatactatttttagacttaaacttctgtttgctggttatataacaaattttatacagttaattgaataggattcatacctcatttgaaacctaactcatttgtagcttaagcatccatttggctgtcgctagggggttgtatgaaacctgagaaaatcatactggtgccctgcataatggaaaatagatgtattcaggtaatatcaaattgaaataaatatccaaggaaaagaagtcagaagacagcatatgtttgtaagaagaatgggatggagctttgtccttcctgaagggggatagatgttgaagatgattaattgttctgataccatgagctggctgtctctcttaagatattgcagagatgtggcaggagaatgagattttacaatgcgagtttggagcctgacgtgggtttatcatttgaacaactcaggagagaatggggtgtgttgattaagtgctacccaggtaagtttgtgtgaattccctttccaggcaaggtgggcccgcttcattttccaggagcctgacctggacatgggtaggacaaggctagccaggggttggggaagcggagaattggaaggtgtctgaaagatagtgttgagggacaaatctggaagtaggcaaacacagcccagcctgcacattggtgttttgatccgggtcagcaatttggaaacaaaggaaagaaaatggagacgactaagaccctgcaggtctcacaacttcaagtgaacaccaaacactcaaattaacttcagtgatttcaggaagtgctctgaaattgacattatgacacataaccataatactacttataatacctgaaattttaaaactttttttttgtttgttttgtttttgagacagagtctagctttgtcgttcaggctgcagtgcgatggtatgatctcagctcactgcaacctccacctcccaggctcaaaaaattcttctgcctcagcctcccaggtagctgggattacaggtgcctgccaccatgaccggctaatttttgtatttttagtaaagatggggtttcatcgtgttgacctggctggtcttgaactcccgacctcaagtgatgtgcctgcctcagcctcccaaagtgctgggattacaggcgtgagccaccgcacccagccttaaaacacttttcaaatttatctttgcttttgtaatattatttaatcctcaggctaaagttataaagaagataaggcaaatattctcatcctaattttaaagtaaaagaaactggatatagaaaggaaggttgagttgtttattgtggttcactgggagaacagggactaacttccacatcaccctgctcccattataatgttatttctactgggataaatagtgagaagtattaataaataaaagaccagtctttaataaggaggctggaaaatagtctatatctcagccctttgggaagccaaggtaggaggattgcttgagcccaggatttcaagatcagcctgggcaacacagtgacacccttctgtacaaaaaaaaattttttttaattagctgggtgtggtggtgcgtttctgtagccccagatactcaggagtctgaggtgggaggatcacctcagcccaggagggcaaggccgcagtgagccatgatcatgccactgcactccagcctgagcaacagagcaagaccccatttgaaagaaagaaaagaaagaaagaaagaaagaaagaaagaaagaaagaaagaaagaaagaaagaaagaaagaaaagaaaagctactcaggagactgaggtgggaggatcacctcagcccaggagggcaaggccgcagtgagccatgatcatgccactgcactccagcctgagcaacagagcaataccccatttgaaagaaagaaaaagaaagaatgaaagaaagaagaaaagaaagaaagagaaagaaagaaagaaagaaaggaagaaagagagggaaaggggagggggggaaggagaggggatagagaaagaaggaaggcaggaagggaggaaggaaggaatgatggaagggggaaagggagggagggaaggaaagaaggaggaaaaagaaagagaaagaaagagagagaaagagaaaaaaagagaaagaaaaagaaagagagaaagaaaaaaggactctgtatcataattagctgggtgtggtggtgcacgtctgtagccccagctactcaggagactgaggcgggaggatcacctgagcccagcaggtcaaggccacagtgagccatgatcatgccactgcactccagcctgggcaacagagcaagacctcatttgaaagaaagaaaagaaaggcaggaaggaaggaaggaagaaggaaggaaggaaggaaggaaggaagaaggaaggaaggaaggaaggaagggaaagaaagaaagaaagagaaagaggggggaggaagggaaggagggagggagagagagagaaggaagggaggaaggaagggagggaggagggaagggagggagggagggagaaaggaaatggtttggcacaaggaatagaaaactactcgcaccagcttaagaaacagacagcagacaagcaccaggatatacaagcaaaaaaaggccaatgggtctggaattggaaagacaggaatcatctctcatgtggtttctgtcccccatcagccttgtacctctcgttggagactggcttcctttctctgcttacttgtgtcttttctgccattaatcaagcattacataactttgtggtttggcttccaaggctaactgactgtttctcagtgacccttttccaaattcctgggggaagcaggaagattgagcttggcctaggtcctccatcacctttgcaggtcaggggagggatgtgtacaggttcacagtcactcagggccaccattttactagaggctgtaggtcatggtagaagtgtaggaaaagaggtacatgcacaatgactatgataaaatataggatcaccagttatcagtattgccatataattaaaaaccaaaaagaggacggtataccttaattgattataataagatgccatgttcaattcaagggtattgtttattatagttcagggtcttattttgggcacttgaaccaaaagatcgtaaaggatttaggaataaatcagatgagagttacaaactttattttgattagagatgaataaattttaatgaagataaatggaagcattaactctatagattaaaaatagttttaaaaaatagatacaaaattaaaaagatacaaaagggcacacattgaaaacttagtctccctcttacccataccccagccctcagttccccttatcggaggtaatcatcattgtcaattctggtgtattcttctagaaatgtgctctctgtatttaaacacaaagttccatatcttgctttttccagtatgccatagaaatcattccatgtgggtcatttagagcaacctcatttttaaaatggctgcacagcattccagtgtatgggtgtaatgtaattttttgaacagtctcctactgatgacatttagtatatttagtcttttactattactatctttgcgtatacctctttctaaacacaagtgactttatctgtaggataaaattcctggaaatggaatttgtaacatttttaattttgagagaaattgccaaactgtcctcaggagaaattttaccaatttctttcccattagcaatttataaagcactgatttgcctacattcttagctcagtgtagagttaaaatatggttaggtctagagtttttttgtttgtttgttttttagagacaaggtctcactctgtggcccaggctggaatgcagtggtatggtcatagctcaccgcagcctcaacctcccaggctcacgtgatcctctcactttggtctcccaagtggctgggaccactagcacacatgaccacacctggctactctttgtatttttttgtagagacagcttctcactttgttgcccacgctggtctcgaactcctgggctcaagcagtcctcctacctaggcctcccaaagtgctgggattagaggctttgagccaccacgcctgggctagagtcttttactctctgggaaacttcaatttaccttccaacttcctgttaatatctttatgttagctattatatttgtaatttgtaagagcctttttctgttcttgattgtaactttttcatagcatcatagccttatttgaatgcaatgttaatgaacgcaatgttgtatctttccacagatattaattaaacttaaaaaaaattctccctgttcctgccatttgttttctggaggggacaggtatgttgggggctggtgagggggtgggtgttggttgggactgggagatgctctctgcctatcatgttagagactttcctaaaatgtttggtggtgctgcactgcttgctcataattaagagtcagatacctctcctcaatctctccggtttaaatctccacagagcaaaagtgcattctccctttagggtgggggtggcgtggtagcttgaggtaggacagaggctgcaactgttctttttacagacttttatccaatcttgtttttagaggcatttctcatccccattttccttagtatctggtgtctccaattcctaaaatttccaaagttctgcggtgcaaatcagctggcttatttttgcctttcacctctacaggcagttgatttcatttttctctgcttagctaactcaattactatttgtctttttcactatcttccaaaatttatcatttgttagcatctcttccattctttttgttctttgttataattttagggaaatttggggaggtagcacagataaacatgtatattcaatttaccaagtatagaaggtggtcagtaaatttggctttatctgccagaagcactgcctctgttgtgggtatatttcaaaattaataacattgataggaacaaaagtataagtaagtcttcgtgagtatttatatttagatgtaactcagccctaaagcccattcattagttttgaagtgattttattttaggttcaatgtgtatgctgttaacatttatagtgtaatacatatcagtacattcctaccaattttttgaaaaatgactaacatatccggctgttttcatttttgaagtcatgttttctaactagagtcgtagtttgaaagtcaatttgtaactaattttattaccacttatactttctcaagtctgacaatcttaattaataactactctgttatagtgccttttagtgacaaatacaattgccagcactcaacaatgaatatcaagcctgtatatgttggattatatcataattaagaaagtctctcttgctgagtggtctcaattaaatgtagtaaaaattatataaaatgtactggttgatctaacataagtactttaaaatgcttatgttactaatttccagaaggagtaagaatctttctttctggaatgtgaaaccacagatagaattgcatctctccaggaaagtagactcagtggttatgcagtaagcctttcccatctgtaatgtgataaccaactttattactgtgctattatggtagaaaattatctcctgaaacatatatttttaatacacttgggtggacaaaatgaggaattgaacctaatgccatttttttttccaatttaactttcccattattctaaaagtgttaagattttgaaactagttttactctgcggagctcttgaataagtttctataacaggactaaataatagaaaatactaaacctgtattagacgtgtaccgagtagcacatgttggattgctgattgatagcacaaagcatattatattcaataagtatctttcaagcctcattgacatctgtgacattgtgttgttaactgacaaatacatgggaaacgcagttttatagggaggcaatagagcatggagactatgaatcggtctgcttggatctgataactcactttgccatttcctagcagcatgaccttggacaagtcatttaaccttgtcccactaccaaaatgtagcaaaaatatctacctttcaagattgttgtgagaactaaataaggtgacataggtgaggcatttaatgcattgtctgtctattataaatgctcagcaaaaatgaatccagggaaaaaatcagggatcgtgctctccaggaatttacagtctgttgggggatatgagaagttcacactttgacaaaactgtaaggcattatataataaattgccaaagtgagacaggatgccaatgaaaacctcaacaggaatttggagaagggagacgtcagtgtgaaatagacatatcaatcagcacatcctctaggaaggagtagaggtgggtcttaagtcagatcctaaagaaactgttagaacagacagagagaaagggtagggaaaaggtgtactgcaatgaaatgataggagtaggggagtatttggtgatcagagaataagtgtttgcttattgaatacataaaagaatggtttggctagtgtgtagagtggtgatgaagtgaattagtaggggagactggggcaatggtagtccctagatatcaccttactaaatcaaaaagcaacagctagggatttttgaattgggaagtgaggaggatgaagaagacatgtgacacaatgaagatagtggtgtaggaaaaggtgtgtgaaaagaagggggtggggagtagctaaatctaagagatcagttagaattacctttctacatatgtggttggggctaataattgcaataaaattttttacaagagtcaggactaaatggatacatgacgaaggagagaaaaagagttaaaggtcattttaaagcctgagagagaaaagaaataatggaaacagtgatgttgcaggggatgttgattaaggaattaaatattttcagtttaaaaagaaagcaacacctttgttgtttttatagaaggtatacatgcttctagcaaaaaaaccctccaacaacaacaaacaatggaaatatataagtagaaaatgaaagttctcttctccgtcccccaattctattatcttgtgataatctgttgtatagctttctaggctgatttctatgtacataaaaggaaatgaaatcatagtatgcatatttctcttcaacttttttttccaatattggttcatatagagctatcttttcattgtaaaaacatactgtgattttgtatttactgactcacctattgatggacatatattattctaatttttgctattacaatgcttaatgaacagtcttgtatatctctttgaacagcatcacagtattttttttaagacaaatacctatgtgtgaaattgctggatcaaagtctatgtacatttatgtttttcattgactttggcaaattgtacatgaaagagatatgcttatttacacacccagggtatgaaagagtctgtgggccacatccttgctagaacaaaatattacaaatcttattaattgggcaagctattaggcaaaacaaatcttgttttaatgtgcatttctttgattattggtaaggttgaatagattttcttagccgttacaattttttcttctatttttttttcagtttgaacctacagaggttgaactgatgatgaaatgtcctaatgtagacatcatgggggcaatgagagatgtgctacagaagcctgggtaagaattactagtggagcagtgatagttcaaagagtaaggccgcatatgggttccttgtataatcatagaaagaagacaatacaaagctattaggaaactcagagtcaggaaggagagaagagagacagtgatagaaactggcagtagcagcttagcagttgtagagatagaagtagaatcaagattgtcctctgtcataactggttaagggactttgagcaagtctcttgaatctctgagtctcagttccctcatttataaaatgaaaaggtgaataagatgcctcttcaattataagacatcttgtctctaattttaacctgaaaggtgagacaatttcatggaggcagtcaacaacttcagaaagcataagggatcttgcagtaaggtggttatttaaaattactctgatgttatagtctatgaattgcttacttctgctgctcttgcttctttaaaattgtaaccttaaataaaccgttctattttgaactaatttcaaaattatagaaagactgcaaataatatctactctttacccagagtcgcctattattaacattttacctttttatcatttctgttttctctctcactatatatgtgtgtgtgtgtgttttttttttcagaaccatacctatgtcctggccctttattctgaaatactttagtatatattgtctaagaatagagacataaccacagcacagttaccaatttcagtgactttaacattgatgaaatatttttatctgatcaatctaccatcagttttccaattaactgaataatgtccaatatagcatttttttcctcctccaggaaagaatctagtctagtatctcatattacatttagttgtcatggctcttcagctggaatattttcacagcctttgtcttttatgacagtgacatctttgaaggatacagcaccccttacctcttttaaaaaacaaaacaaaacgttgctcacttggaatttgtctggtatttcctcattagattcctcatttcctcattatatgctatgtcttcggggaatcacatctggaggcaaatgatgtccgtctgtccctcaattgtgatgttaattttgatcacctggtgagggttttgtccaatttatccagtgtataattactcatttccttgcaactaataagaagtctatggaaaaatactctaagatcatgcaaatatcttgttcctcatcaacatttcttcctatgtttagatataagatggtttttgccttacccaatctttgccctaactggttgcaaaatgatgattttctaacttcaacaatctctcaacactctaccataagcaagagtatttcctttttctccatttgttttatcaattaattattggtatgcctttatgaattcctgtttttttaaaaaatttctaacctattttaacatgcaggatatataaaaagaaaactatagagatgaacactcaaccaaaatcctttcctatcattaaatataaagaataatgcctaaaaatattataaaggaagtagaatacaataataattcacttatctggaaaaaaagttgcctggtaaatgtaatgatccaaaatatagaggaaaatatcaaagcaagtgaaaggtctttacactaagtaaatgcccccaaaatatcagagttgttttagccttttcttattttatatgcttatttatttatttatttatttatttattttgagacagagttttgctcttgttgcccaggctagagtgcagtggcaagatttcagctcactgcaacctccgcctctagggttcaactgattctcccgcatcagcctcccgagtagttgggattacaggcacccatcaccttgcccagctaattttttgtatttttagtaaagacagggtttcatcatgttagccaggctggtctcgaactcctgacctcaggtgatctgcccaccttggcctcccaaagtgctgggattacaggcgtaagccaccgtgcccagccttatatgcatttttaaacattggttagtttcccagcccactctaacatgataagacaattcaaggggaggtgtatgtgtgtgaaatgtgtgtgcagagctaacctgtagcagcaggggcagcaacaagaaggcacagcagaaagatcaattatgagggccaccaaatccattagactcagaagagtgcaggaacatagaaggctgtgattacttagtgtatggtgaagagtactaagtacagtacttgttggctcctgaggatatcttggtactatagcttttgttttttaactttacctgttcctgaggtacctctaggctatcagaaataggttcagctatatagttggccttccatgtcaatgggttccacatccatagatggaaaatattagggaaaaaaattaaaaataacaatgcaacaataaaaaatgatataaatttaaaaatatggtttaagaactatttacatagcatttacattgtatcagagattataagtaatctaaagatgatttgaaatataggggaggatgtgcataggtgatgtgcaaatactctgccattttatttatttatttttttgagacggagtctcgctctgttgccaggctggagtgcagtggtgcgatctcagctcactgcaacctctgcctcctgggttcaagcgattctcctgtctcagcctccccagtagctgggactacaggtgcccgccaccacgcccagctaatttttgtatttttagtagagatggagtttcaccatgttggccaggatggtcttgatctcttgacctcgtgatccacccacctcggcctcccaaagtgctgggattacatgcgtgacctactctgccattttatatcagggacttgaacatccacagatttgggtatcccggaagttcctgtggataccaagacaactgtgctgtgttttattagtttaagacggagttggtgatatttcaggaaaaataaataaaagtggtttaaattgtttctagtacttcaagatgaaaatctcagttatttagaatatctaattatatctaatcctttactgccccctttcctaatactgtcagataaacaagtcattactaaaactattttttttttttttatgagacggagtcttgctctgtcgcctaggctggagtgcagtggcatgatcttggctcactgcaagctccgccttacaggttcaagcgattctcctgcctcagcctcctgagtaactgggactacaggcgcccccccaccacgcccagttaattttttaatttttttggtatttttagtagagacagggtttcaccgtgttacccaggatggtctcgatctcctgacctcgtgatccgccagccttggcctaccaaagtgctgggattacaggcctgagccactgtgccggccctactaaaactatctttaaaattaatattgaaaagcattagtgtatgcaaacatttatatactttccggccttttgaagaattagtctaggaaaacattaaccatcattaagcaaataaatccctgctgcttaacaccctacatagagttgcccctttgagatgcagcttaactgtaaatgtaactgtaaaattaatatggtgctcagatttgaacggactgttgattatctttgttttggtatctgaagacttgtgacatatctctgtcgattgggaattacggcaggctctccttgtaccatagtgtcagttttctggagaatgtctgtctagcccttggaagttcccttatgcgtcctttccctcaaggtgaattttgggaatgctaactttgcctttattttaaattgtgacatcgtaaacacaaccaacaaatttcttcaaaatgtccagccactatatacatttgaaaaaagagatgaaaggttagagaaataacaaaggtatatgttattactgaaattcttttggttgtaatagaattaagtattactgaaaaaataagctttcttaccatgccagtttgattttgttttgacagctgtaatgaattgtgttgcttgttgattggtttactgcagtggtggtctctttgaactgtttgttctatatctaaattagttccttggcttgccccttggaaataatttggatggatagtaataaaactattacataatggtgattcctctgaaatgacttttaagcatattgaattcttatcgatttctatttcatataatggcatttctattttatacattagtactttttgttatactaagactttgcatatttcttgtattttggcaaaagcaattggaatccataaagcaacatacagaatttaattgtgataaaagtgctctggtaaagaaaatttggtataaaaagccactgctttcatttatcaaggaatgggaagggacacttattttataaaagatattgaggacaaacttttttctctatttttatatacaaattctttttttcttttgagatagtatctccctctgtcgcccaggctggagtgcagtggtgcgatcttggctcactgcaaccactgcctcctgggttcaagtgattcctcagcctcagcctcctgagtagctggaattacaggtgcccacaaccacgcccggctaatttttttgtatttttagtagcgaccagcttcaccatgttggtcaggctggtcttgcactcctgacctcaggtgatctgcctgcctcagcctcccaaagtgttgggattacaagtgtgagccaccacgcccggcctatatacaaattcttaatcttaccaagttcacaaatttgaacttaacacaactcttaaggttaataaaagtattgttttataagttatcaatgtgagaaacagatttggggtaattattcaaactcaaattcagtaggcataagaatttagtgtatccatggccttgctcatgagtcatatgtttttttcttttcaaagtccaagtgaaaacttcactgcttttacaataagctgtgaaaattattggcagatgtagggaccctgcctcatttatatctatgaaaccctaattcaagtttcaagtaattgtatgacatttaacaacataagagttccgttcctcagttttcatatttcttaagagcagttaattatgtgtgataatggtatgtatgttgcatgtattattgttggcatatagccaacgacattttccttaatctcttagtaacactttaagaagactaaacatttacccaactcaataactggaaggggtttttcctccaagtgctaattcatttagttgttgtttatttgggacttgaagcaactaacatctatgcgaaaactttctgtatacataatgcacttccctcctttttaccaatcatcttcctttttcttttcttttttggactcttgtcatttgaaatattgggtgggggggaacgctttttttcttcttttgattgctctacttcttctagtgatttcgtcatgattcaagactttctttgaaagtaaaatggaataaaaatgaaacactacgaactttgttgcctatcctcgctgtttttctttttgacttaactttgcgttggggtgctttaaagtaaccctatttgagagaaggaggttgaagggcattctagcgtccccaactagagtaaaagggctatgacagaaggcaatcaaaggaggaaataattagcaatcttcaacgttcaagattaatcagttctgtttagcggttattaaagggaagaaagaaaccaaatgggaatagtgaattattggtcctttcatgttttacacttaatgctggtacatagtattctttccacattctactgcacattgcctagagaaagaactgcagatcatcaaataattatccatttccaaatggtctaatgacagcagatacaaaggcggctcacttaaaaccttccgttaacagtcacactgcatcaaatggtgctagctttaagtaggccacccatttagtagactctgaaacaacacctttccgcccaatttctgtcatttgctccttaagtcaagggtagtaccctgcgtaacatcttacaaaggcctacttctaacacttcccgaatcttaatgtgtgaggatgttgatcaccataatttatgaccttatctaagacagtggggtgactctccacattgggagccccctcatttgtcctcagtgacttctaaaaacaccgctggcgtgggctggatatttgatcttggggccaagtgcttccagactttgttctctggccttaaaggtgaagagcccggcgctgaaggccacagacatcacggcggatttcacagagggccgcgttccgggagcgggtggccaggcggtggcggacgccccacctgtccatcctcctaccccttcccccccccgttgtttggccggtgggagcccctcctttcagcaggcgccgggcggtggggttgcggatggctgcgcgcgctgcgggcaccgatcaccggcggcagttgggctccgcggggccgaaaagctgcgggcgggaagcgcgaggttaagaccctgacggctgcagctctcagagcccccgcgagcgcgctccgttggtgcgcgcgcgcgcgcggctccgccccgcccgcttggcgcgcgcccccgccaggtccgctctcgtcccccacccctggcgcggacggggtggttccagctcactctcctcccccgagcggcagcggcgcggcggcggcggcggctgctgcgggcgctgaatgagagacggtgactgttcgggtcgacgagtgctactctaggcggcggcggccgtggcggtgaagcgtgaggccggcatcgtctttccgtcctctgaggcgacggccgcggctgcacaggtcggtgggctcaggccgcggggcggtgcgggggagggagggagggagggtgggtacgcggcgccccccgggcggcgcggggaatggcggcggcggcgctgcggagtgtggctctcccggccgcgggccccggggctgctcgccctgcgcgcagggagggggctgcggagctggggctgaggctgagggagaagggcgctgggcggcgcgcctccctcggccgcgggttctcagagtcggagcggccgtggggtccccgctcgggggcgccgtcctgaagccgggggcgctgcgaccccttgaacccgcctcgctctccctcttgggtggcggaagcccccagcctccgcccgctctgttctggcgcccagcggcgcctcagtcttccttcaggtgagcccgatcccggacctcggagccaggaccagcagaagccgggccacaccccctcccctggccctggcggctgcgcccagaagcctggccgcagagttggccgcccgcgaacccgcggagtcgcggtcagggtgacctgttgcagagcggcccgcagcccgagcggcccccgccagccccggccccggaggggctgcgtcctgtgctggcctcgggccgggcgcgcgggccgggtgtggggcaggggccgcagccccaggtcggcttgctctacggcctggaaccgggctctagaaaaaaaaggagattccgaacgtatctcatcaaacacttgcaaagccgggagatctgtctgcaaatatccggaattccattgcagtatcggattaggtaggctcataaacaccgtgcttttgaggtgatttggaagaaacgcgagccacgagcgaggaactagtttctggaaaatagccgtaaacctgtgcggagcgaattattaaccccccgccccagctcccccctcgaagctcttttcctgtagctgtgtgttgtgtagacgcaagccagtttcagtgtacgtgggcgtgtttgggaagaagctgcgagctgataggaggtacctagtacaaatgttaatttgtttgagttgggaggggtaagggaggaggaagaaagggcactgatgttagctgtggaggaggggcaattgaaatactaaatttctgttaaaaaaaaaaaaccccaaaagaaatatctaatgcctactgtgtatttaagaccataaagtggaatcacacaagcagcagttaattgagctttatcgtttatgctccctggattttttttccccaacactttagttgctatagagagccttttcttaccagtgttcatgagttgacttgggtatttttctgtgtccaccattagatcgattcctgttcaagtttctttgaagatgaccatcagaattttaggaaacttttcagcccgtgtttgcagagtatcgctgttagacagatcatagcttgctcattataaagcctgttccactcaagatcattatgcttgtacaagtgctatagaacaagtgctatagaatcatacacataagtgtattactcttacggctaaatatcttaatttagaattatgaggaaacttccaaaactgagcatccaaacagtattattttaacaaagataacctctaactcaagctttgtaggcatgaagtttatcatgtagcttcaaaggtcttttgaggcagatctaaatatcaaaatgtaagggcattaatgccatttgggataaacaatttcagtgtatttattttaagcgtagttcattttttctttttaaaattcagcataatttttgaacggtaagatgtgcgtttttcccattatattccacttttttttttttccttttaagataggttctccttatttggctcaggctggtctcagactcctgagctcaagcgatcctcccgtgtcaggctcccaagaagytgggactacaggcatgcgccactgtgcgttatttcacttttcattgaattaaggaatttgacttttagtaatactttggggcaggactctggaaatactgtttagtttgcctaaattttttcagattgcaacgtaagtttgaagataatgcttgcattggcagaacacaacgtgcttttctaatatttattagtaatactagaaagaatacaacaaattttcctgagagaaaacataactgaaaaactggctttgtgagtcagatacatatgtgagtaatatayttttgtgtgtgtttttaaatacctggtacgagtctttttattacgtcattagagttcagtgtagtgaatgatggatatataggtgaaattgtcctgttgcaacttaaaacacttaagctttttccagagactcagttcattctgcacatgtgtattgggtacctacttggtgccagttagttccctagaggttggggacacaacaggggagacacaacagggcttatcatttaagccctgatggggcttaaatgataagtgggcaaatatgtttgtttaaaagtttaagaagtagaaactcctctgataactttttggttaaggatattgtttttttctttctgagaattgtgggaattattgcctagcgaacaaaaacattaagacaattgtttttagaatatgcctatgtttatatactttgggtttctggttaccaagtataccaaagataaacattctacctgaagtcagatgatgcgtagtttacatgtggttagacagccttattcttttggtttatgtagttaaatgaatgtttgctgaaaatattctctcggcatttatttataagggaatctaaatttcttttttggtctaaaattttaaaatatcacctttttatttctggctgactgtgagtgaaccaattccttgataatctgctttttcagaaatttttaaataacttttaaaccataaaccaaactattaattgaaatttattgaatcaaatttgttttcttttgtgagttaaactttaaacccattttctccgaaagtatgctttttttttttttttttgctatgtaaaataggcacatagtttgggtttacttttaattttaatgatacacagtttgagaataagatattgaagtgtatccattttttgaatatgagatatttattgtgtaacgactgtatttggaataaaattgtcactttaatatgaatacttttttttaagttaattttcaatgaaagataattcaaatagcttgaaactaccccagcctgagtgaagttccttggagaggaaaatgaatgtattgcattaccctgtaaattgtttctttaaatgtgtcttaaatttcctattgaatcctttttagtgagagaataaagattgtgataaattttagtaacgtggaattaatctggaatcttttttggtttaatgtcttgagcttttgatttaggaaaacttttaactacataatagaaataaaacactggaatttaaaatgtgttacatttacctattctatggaaagaaaaaagtttgaatataaatttacatagtcactttactaagtagctagttagggatatgggaaggatctrtatatacatacagttatatggatatagcagtgttcatatgacttagcttgaggargcttggccgtttatttcattacagagaaacttttggtactggcttttgaataatacattgctttggagtgtgaaagacttgaatctctcatcttgaatttaattgatagttttctgttatttcacttacatgaccttttttttcagaacagattttctttagtttgatttccttttgttgttctkgcagaagtgttttctgaaaaccttattaaatagcatcccccatcatactctgtgcctttgccttgctttatttatttatttttacatcattggtttatctgacattaaaacgtacattagtttattatctgcctccctctctgattgtaagcttcatgaggacaagggcttattttgtacactgttctcttcctagcacctagaaaagtatctgacacgtagtgatgctcagatatttgtggggtattgttattaagtgatcaaaggacccctggttttgttccttttttaaaaaaagattaatatttgatttatacagctgtgcagttaaaaagaaaattgtactacaagggttatacaggttgagcatcccaaatctgaaaatctgaaatccaaaatgctccaaaatattaaactttttgagtgccagcatgactctcaaagaaaatgttcattggagcagtttgagttttaaatatttggatttgggatgcccaactggcaatgcaagtcttccaaaatctgacaaaatctgaaattcaacaaaatttgaaatctgaatttttctggccccaagccaggtactcagataacctgtaattaaaactccggtcctctgcctcatgtctttatgactttccctcctgtgtcctgctttcagagcaaccataggtgtttcttctatttatttacatatttaaaaattatatacttttactgtttgtttttcagttttattatttatttatttattttttgagacagagtattgctctatcgcccaggctgaagtgcagtggtgcgatcttggctcattgcagcctccacctcttgggttcaactgattctcctgcctcagcttcccaggtagctggggttacaggcatgtgccaccatgcctgactaatttttgtatttgtagtagagacgggttttcaccatgttggccaggctgtgaactcctgacctcaagtgatccacccgttctccctggcctccctaagtgctgagattacaggtgtgagccaccatgcctggccctgtttttcagttttcctgtttttcaattttagctgttgtctgttggctttcttctgtggtagatgagtctatgctttaggattcttatgccaccttgaaatttctttcccatgtcttcccaatatagtcatgcttttgattaaatcagcattcgttgtttacattattatgagtttgtaaatatgtttacagtggaaccttacagtgtactatgattatatttcttggagttgatttctttttatttcttagtttcctatttgtctctaatttttttttctacaaactgtcccaatatcatcaaacatcaggtaattgacccttcagttttaaaaaaaaaaaatgaaaattcttcttgaactatcttcttgctcaaatctgcacttttgccttccacttatgctgtgtagctataattgtgacttcccttcatcatgattctgagaattctgtttttttttttgtttttttttttgagacaagagttttgctcttgttgcccaggctggagtgcaatggcgtgatctcggctcaccacaacctctgcttcccgggtttaagcgattctcctgcctcagcctcccaagtagctgggattacaggcatgtgccaccacacccagctaattttgtatttttaggagagacggggtttctccatgttggtcaggctggtctcgacccaacctcaagtgattcgcccacctcaggctcccagagtgctgggattataggcgtgagccactgcgcctggctgattctgagaattctttttgccattttcctgtgatctctggatccatatcctccgctttcttgatttactcctttgttttggtgaaatgcatcctttggtaactttcaagaaagagtatatgaagaggtaaaatttgtgagatgtgtgtattgctgaaaatattttccttctaccttgacacctggttgataatatggcagggataggtatagaattccaaggtaaaaatcatcttcaaatttagcagatgattatacttttctagttgttttggtttttttttttttttttttttttttttttgagacagagtctcctctgtcccccaggctggagagcagtgatatgatcttggctcagtgcaccctccacctcctgggttcaagtgatcctcctgcctcagcctcctaagtagctgggattacaagcatgcgccaccacacccagctaatttttgtatttttggtagagatggtgtttcaccatgttggccagaccagtctcaaactcctgacctcaagtgatccgcctacctcggcctctcagagtgctgggattacaggtgtgagccactgtgcctggcctgattttctagtttgaagtggttgttgaaaagtcttatgccattcaaaatcttcatccttcatatgtgacctggccctacgatcttttgtcttcagtatatctgctatgtccctgatattttatgtatcttgtattgactttactttatttcttctacactgaatttagtgggcgctttcaaccagcagtgtccatgattatatggagaggagatatgatctagtttagaggtcagcagactttttctttgaaggttaggtagtattttaggcattttgggcaatacaatccattactgctactcagctttgctgttgtctagtgaaatcaagcataagcagtgtgggactgtggtttgctgacacctgatcttatacaagcagaaggattagcctttgcttcaccaggagtagggagagttactatagaaataggagagaagacaaagtatatggatagacacatgatggtggtagcttgagaacgttctcatgagtgtttcaatttacctttgtgtatagaggccaagctcatcatctgagagtaaggaagaatgggaatatgtattagaggtttgagaaggaataatacatgacatagtcacttgtcaaagagtaaaaaagtgaatagaagagggagagtatgattgccaggcagcagtaagggctcacttgagatacatggttctgaattttatgttcctgatttattttatttatttatttatttatttgagacagagtctcactctgtcgcctaggctggagtgcagtggcgcgatctcggctcactgcaacttccatctcctgggttcaggtggttctcctgcctcagcctcccaagtagctgggactacagttgcgtgccaccacatccggctaattttttgtttttttagtagagacagggtttcaccatgttagccaggatggtctcagatctcctgacctcgtgatctgcccatcttggcctcccaaagtgctgggattacaggcgtgagccaccacactcggccatgttcctgattttaataggagtacctttaatatttcatcattaattataatgccttactattggttttgataaataacttaagacttttggtagatatgattaagaaatgctttgtcatactagttttctaagtttttttttttttttaaacataaaatgttgaattcatcaagtgctttttctttgcaggtagagatcatcttttccattaatctgttaataggatgtattacattaatagattatctcctgttgaaccatctttgcattcctgagttaaaccctatttagctgtggtgcattttttcacccacacggctgaatttgacttgctggtgtcttagagttctttaagatctacatttatcagtgaggtttacatgggtatattttgaattcaaagtttcgctgacttcatgaaatcagttgtaaagctttcttttttttcccccattatcagaaataattctgtaacgtagggattctttgttccttgaaggaactatagatttaatatgaaagtttctaaaacaaaacatggaaaaatatctgtatgaccctgttggaggcaaaggctttttaaaccaggatgcaaaaagtactaaccagaaaagaaaagactgtatttcattaaataagaacatctactcattaaacaatactattaagagaaggaaaaggcaagtaacacactggaaaaggtgtttgcaatacttatatctgtcagaggacttatatatagagtatatttaaaagtatgcaaaccaatgcaaaagaatcaggcaacccagttttaaaacaaatggacaaaagactagaacaggtattcagaaaatgaattgttcagatggccaaggttaaaaagtactgatacataatttttagaaaaccgcaaattaaaactacaatgtgatgccactgcatacccaccagaatggtgttagttaaaaaatctgaaatacaaagtgttggcaagaatgtagagcatttggaacccttatacatttcaagtgggtttgaaaattggtacagccactttggaaaattctttggcagcatttgcctaaaactgtatctgtatatgctctgtgatccaccagtttcatgtctggggatagacctgatagaaatcagtatatrtgtgcatcagaggacatgtacattagaagaaaacataggggtaaatctttatgaccttggaataggtaaaggattcttacgtatgacacaaagtgacaccaaaagcaggagcaacaaaacaagcaagaggtaaattgaacttaaaaattaaattttttgtgcttcaaaggatgccatcaagaatgtgaaaagacaatacacagaattggagaaaatatttgcaagtcatatctaacaagaaacttgtagtcagaatgtataaacactcctataactcaataataaaaagacaactcaatttaaaaacaggcaaaggagctgaatagaaatttctcaaagataaacaagtggccaataagcacatgaaaacatgctcgacattattagctatcaggaaaatgaaatcaaaaccgcagtgagataccgcttcacaccactaggatgacttgaatgaaaaagttagataataagtgtaggcaaggatgttaagaaattgggatcctcatacacttgtgggaatgtaaatggatgtggcttctttggaagaccatgtggcacttcttcaaataatttaacgtagcattaccatacgacccagcagttcctctcctagaacagcagatagaggtagaaaacagataagtggcttaggccagtagcaggggtaagggggtggtagctaaagggtatggatttctttctgagatgatgaaaatgttctaaaattgaccgtgttgatggttgtacctctgtgaatatgctataaaccattgacttgtacattttaaatgggtgaattgtatggtatgtgaattatatctcagtaaagctgttaaagataggaaaaataatcagtgatgtgacagtgttgccataatatttgagaagagcaagatgcagagggatataccaagtatttgtatgaagcaaacaactccgaaacctttatgtctgtatgtgtttcgatgattctgtaaggtggaaaatgttgcacactaaatgtaaatgtttgttttcttgttggtctaaaatagggagagggagagaaaaaagggaaaaaataactaaaggtgttgatttagaaaaaggatagcatgtatagcaagatctcagttatgtgaactataaatgttaaaaatgttgagtagtttgtgtggtgggatagcagatctttttttctttattattttctggttgtttgatcttttttattttataatagaagtagttaaaatgatattaagaggcaataaaataaaaataagttatgaaaccgccaaaaccatagcaaacagggcatgtccatagcagcttcgtgatcacttccagctggaaacaacccaaatgtctgtcaacaacaacaaaaaaaggggataaataatttgtggtatagccttatagtataacactgtacagtactggaaaagaatgaactatagctatactcagcaaacatgggtgactatcacagataaaatggtgagcaaaagaaaccagacacaaaagagtacgtactccatgaagtcatactccatgacttcatttacataaagtttagggcaaggtcaaactcatgtatggtgatagaagcatgagcatggtgtttaggagttggggctggaaaggtaagaggaacaacaaagagggaccttctagagtgctagaaatgtctatattttctttttcttttcttttttttttttttttgatgctgtagcccaggctggagtgcagtggcgtgatctcagctcactgcaacctctgcctcccaggtcctgcttcaagcagttctcctgcctcagcctcccaagtagctgggattacaggcacgtgccaccatgcccagctaatttttgtattctttttttttttttttttttttagtgatgggatttcaccatatttgattggtggttacatgggtgtctacattgtaaaattcatcacacagaataccttagatatatgtacattatatttgtacatgtatctcaaaagtaaaaaatgaaaccataaaaaataaaaataagcaaaaaaattattgtacttatttaaaagtatttgtatatttctggggataattgtattgcattcaaagatagtttctactatcatttttaatggtagcattgtattgtgtgaatgtatcattatttaaactcttgagcatttaggttgtttcttttagatagtataacagtgatagagttaacatctttttttatagctcttcctgtacttacataatttccttttgatgaattcctaaaaagggagttatttggaggttaagtatgtttgcatactcgcttatggtgtacatgtttgtttctctatgcccttaatcacttggcagttagctttaaaaacgtatatatgttgatgtgttatgtaataagtgctctgtgttttaatttgtgggttgttttttttttttttttctgagacagagtctcactgtgtcgcccagcctggagtgcagtggtgatctcggctcactgcagcctccgcctcctgggttcaagattctcctgcctcagcttctcaagtagctgrgattacaggtgcctaccaccatgcctggctaattcttgtattttcagtagagtcagagcttcaccatgttggccaggctggtcttgaactcctgacctcaagtgatccagccacctcggcctcccaaaagtgctgggattaaagatgtgagccactacacccagccttaatttgcattttaaacgttttcaatgaaagtactgttttcatatgtgtgatattatactactttctccaattttctcttcacatcctacccattctttttgctcaatcttttaagtcttttaatgaaatagttatacaaaaaagtgtatagagtcaggtgcggtggctcacacctgtaatctcagcactttgggaggccaaggtgggcggattgcttgagcccaggagtttaagacccagcctgggcaatgtggtgaaaccctgtctctacaaaaaaatgcaaaaaattagccaggtatggtggtgtgtgcctgtagtcccagctactcaggaggctgaggctggagaattggagtccgggaggtcaaggctgcagtggccatgatcgagccactgcactccagcctgggcaacagaaggacacccctgtcttaaaaaacaaaaagcatatgaagactaatacagttaatccctaacttaagaaattaaccaatgcagttgaagcaccctastagttcacattaatgtgtaagaagtctttatgtattaaaaatattaactctttgtctcttgttttacttttccttgttttatcttttgttacccaacttactgtatttcattgaatctaaaatggcttcagttgcaagatgcactatttatgtacatctaaaaataagaatatggcattcgaatttaagaggcatcttaatttcagagattttaaaaggtaagaaaatgcacatctaagaattgatgaaatacatgtatttcactgtcttgcgccttttttctttttgagatgaagtcttgctctgtcgcccaggctgaagtgccggtggcatgatcttggctcactgcaacctctgcctcccaggttcaagcaattctctgcctcagcctcgcgagtagctgggattacaggcgcctgccaccacgcctggctaatttttttgtatttttagtagagacgggrtttcaccatcttggccaggctggtcttgaactcctgacctcgtgatccacctgcctcggcttcccaaagtgctgggattacaggcatgagccaccgcacctggccagcgccacctttaatcagatgatcaatctcttcttttgtttctgtttctactgtgagtcctagatagcctttcctatgtcagaatatattttaaaattcacctatgtttacttctagtatttttatggcttaaatatttttcatttttaattcatcttattttaatgtaagatctaatttttgtctttttacccaaatggttaaacaattgtcaaaaagttaaatgacattaatgattttttttccttttgagatagggtctcactctctcacccagactggattccaatggcatgatcacagctcactgcagccttgacctcccagacttaagtgatcctcctgcctcagcctcccaagtaggtgggactacgggtgcacaccaccacccctggctaatttttttgtttttttgtagagacatagtctctactttgttgcctaggcttgtttcaaactcctgggctcaagtaatcctcttgcctcagactcccaaagtgctgggattacagcatgagccaccacgcttgaccacaataatgatttttgaacaagtagtgatatgctcaaatgtgctggctaggaacacaatatggctatagattttggttaggtctagtcaaaaattatcagttttattttctaatagatggatatctttttttttttttttttttttttgagttagagtctcactctgtcgcccaggctggagtgcagtggcacgatcttagctcactgcaacatccacctcccaggttcaaggtactctcctgtctcagcctcccaaatagctgggattacaggcacatgccaccatgcctggctgattttttgtgttttagtagagacagagtttcaccatgttgcccaggctggtctcgaactcctgagcttaggcagtccacccgccttggcctcccaaagtgctaggattacaggtgtgagccactgccgtcggctaatagttgtatatcttaaatttgcattgaaaggaatgtgaatgtcaaaactaaatttcaattttatgtttccttaaatttctaataagtatctacatgtttttgggatcagccatataatttactaagctaaaattaaataaattttttaaggatagacaatggttataattctttgatgaaagtctgtatgaatctgggcaagttacttaatttgtttaacattcagcttttttatttgtaattgggtataatagtgccttctcataggatcattgtaaggatttcttttactctttctttcagaattttgaagatcaagtgtaattatagcccagattctgttgcatctgtggttattctagatctctagggttactggagtaaattattcgttatacctcttccagtcctgatttagatttccaggatttgtctagaacatttttttgccttctggaattagcttacatgacaaatctgtatgttttctgttgcttttcttaagctacacttttgtgtatgtgctgaaatctttatagatagtttaggggtttgtaggtgggtgattagtaagttttttcttttttttgcaattttgatatgctgatatatttttgtatgtttttgtagtttagatcctatctcttaaagctagagggacaggaataagtctacttaaagagcaacattttgaggatatcttatggataagaaactctgcttctgacttgcttattttggccactggcatttttaaatgttttcttgtaagcacagtacttgagagtgttatcataaaagtattgttgttcatgtcttcttggtcagagacagtcttatatgtgaaaccacagtaaataacataaaacaatatgttgttttgtgtcagattgaagagcattagcaggtcacagaagaagaggctcagtgaggacaggagtggtccttaaggaatgtgtttcatttatgtggaaagaacatactgattgttgaaacagcatgactcaagatgtggcaaccagaactaggtgttgttggcacgatttggattgaagggtttgtttgggatgtggcgggaaatacagtacctttgatgaggtgggactaaatattcagcccttagaaatgaagcaggggaaattagaattgaaatgatagtacatattgttattcactaacttagcgtgtcactctgtttcctttcttcaagagatccaaaaggtgacagatagaactcattgccaaaaggtttttaaagataaccactttgaaggtttggacttaagggaacaggcagtactaattgaagccatctgtgctgcacttgtttatctaaacagtttggacagctgaactggctgtaggaatgaagtcaacaaacctagccacctcatctgcttcattccaatatggcctaacagatatagctataaggatgaatagggtcattgatactacttctaactctgagcggtatttgaaataatagataatagtgggttttcctcctcagttgtggtactcttgaatggagtatggcaacctttgacttaataatcactggacctgtatttcatgtcttgtgtgatgctgtaaattatatgatccccttagtaacaaccaaattttgtatttataactacttaactactataactaagtagattagaaatcctggcaagacttttgagtcccagagtagtagtgatttatctgagtcagtatcctagatatgtcatttataattctggcttgcccacagttcctttggaggaaatctgctttttctacagtacattgcagaagaacagacctcaatagctatttttttaaccatataaaactgtattgcagtggattggtccagcagtgggcatttgacctaagggttgctaatccatcaaccacctgggaaaatttatatagtcagttatagaaaacatggagttaatttaccattgaaccatgggagctgaagctgcaaagatgtgttggtgtagagtcctgtaaaactaaagtttaagggaatggaaagtagatgtaagcagaagctatgaattacagaaatgataaaggagatgaggaagccatttggtaactataaaagagtagggcatgtgtgctgagagaagtgcaaaattctgagagaaaccatgtggtttgagagagaggtatggaacatgagagtgaagattctagtttctggcactgtagatactgttcttcctttagtacttctgtggctcctgcccttcttgagactgcattcattcctccccacccccaggaaagattgtaggctttggtgtcagacatttgayattagaattctggcttttttaccagcccctgcaaccttgggcaaatcgcttaaactctctgtctcatttctcatctgtaaaatgagcatcataacaatacttctcactgggttgatgtgaggattaagtgagaatgacacatggaaagcttagaacaatgctaagcgtataacagatgttcaataaatagtatcatatatgtaatgatatttgaggtaatttgatttttttgcaactaagagtctaactatagttaatctccttactgattcacttggagcasagtaaccttgtgtgggagctgtgtaaacaagataaggtatagggagttagaaaatattgtcttatacagtgtgaataataatacactgagcatttaatagatgcttggtgttctaagcattttacctgtattaactcattggatgtttctgttactttcattgtaaagatatagaaactgaggcacagagaggctaaccaacttgcccaaggttatacaatatgtaacgggcagaaatagaattcaaacccaggtggtccagttacagagttttaatttttaaatatctaattccttttcaattctttctttttaaatgaagctaaggaggaggtctcagtttgttgttactgtttcttttatgtttttctagtacttgcttctctcccattttgacaaagacatagtatacctcaggtctagaaacaagatgtgattcttggtaaagttcctgtactgtacatgaagtggtatatcacctgaaggaagaccatggtaagttaaagttaaatactataaatcctaacacaatcctgtgaaacaatgagttgtagctaagaagccaacaaaggagataaaatggaattagaaactatacttacttattcagaagaaagcataaaaagagaaaaaaaagggacaaatgtaaagcaaatagcaaaatataatagacttaaacctaaccatatcaatartcacataaaatctagaagacctaaacacatttaagaagcagaaatgggctgggcatggtggctcacgcctgtaatcccagcactttgggaggccgaggcgggaggatcatgaggtcaggagatcgagaccatcctggccaacatgttgagaccctgtctctaccaaaaatacaaaaattagccgggcatggtgacgcacgcctgtagtcccagctactcaggaggctgaggcaggagaattgcttgaacctgggaggcagaggtggcagtgagctgagatcgtgccgctgcactccagcctggcaacagagcaagattccgtcaaaaaaaaaaaaaaaaaaagaagaagaagcagaaatggtgagattggattaaaaaaacaagagttaaccatctcctgcctgcaagaaacctactttaaatattaagacacaaataggctaaaagtaaaggatggaaaaagatacaccatgctcgcaatagtcaaaagagcattatgtggctatattaatattggacaagacccaagcaaagagtatttccagggataaaggatgtcattacaaaatgataaagagggcagttaatcaagaggatgtaatagttctaaacatttatgcccctaataacagaatttcaaaatacttgaaacaaaaacggatagtattcaagggagaaattgtcatatccacaatttgtgttggatacttactcttctctcagtaaatgatagaacaagcagacagaaaatcatagggatatatagtagacttgaacaatactgtcaaccaattttacttaattaacatttacagaatctccacccaacaataacatattattctcagtttactcaaatgtctacagaacatttttcatgatggactatgttttggtccacaaaaaagtctcaataatttaaaagggttgagatccttcaaaatatgttatctgatcacagtgtaattcaatttgaaactattaacaaaatgggggaaaatctggtctttggaaactaaacaacacaattttaaataatttatggttcaaggaagagatcaaaagggaaattataaagtcttttgaactgaatcaaaatgaaaacaacaaatcagaatttgtggggctggttgtggtggcccatgcctgtaatcccaacactttgggagtctgaagtgggaggatcacttatggccaggagttcaaggccagcttgggcaacatagcaaaaccctgtctttacaaacatttttttaaaaaaaattagccagacatggtgacacatccctatagtcctagctactggaaaggagaatcacttgagcccagaaatttgaggccagtgagctatgattatgccactgtagcttggggcaacagagtgagaccctgtctcttaacagaataaataaagaaaaaagaatttgtgggatactattgaagtagaactcagaaagaatttatagccctgaatgcctacataagaaaagaagaaagatctcaaatcattcacttccatttctaccttcaggcattagaggaagagcagattaaagtaattacaggaaagggtatactaaagatcagtgtggatattatttttaactttctactcattagaatcaatgaaaatgattttgatgtaaaatgaaagcaattacagtaaaggaaatgataaagatcagtgtggaaattgtttttaaactttctactaattagacaaaaatcaatgaaaattgattttattgatgttgccatggaactaatttaagttaaaaaaattagttctgtggcaacatcgataaaattgataaagctctaactgtgctgattgagatcaggaaagacagaagtgacatcattacagagcctacagatataaaaggataacaggaatactgtgaataactttatgcctatacattttaaaacagagatgaattggacgaattttttgacagacacatactaccaaacttcactcaagaagaatatacaacctgaaataaccctgtatctgttaaagaaattgaatttgtgattacaatatttccacaccaaaaaaaaacccaaaataaacttcagacccagatgacttcacaagtaaattctgttaaacgtttaaggaagaattaagaccagttctatacaaacacttccagaaaattgtagaggaagaagtacttcctcacttattttgtgagctcagcattaccttcttactcaaactagacagacgttgtgaggtaagaagactacacagaaataactcacatgagcatacatacaaaagttctaaccatattttagtaaattgaatgtaacagtttattaaaaaatacatcataattaactggggtttatttcaggaatgcaaagttggtttaacatttaaaaagcaatcgttgtaattcactacattaagtaaaaaaaactatatgatcatctcagaaaattgggggcaggggaggcaagcatttgatgatctaaccttcattctgggtagtcmctttgagaaaactaggattagaaaggaaattcttcagcccagtgaaggatgtctctgaaaaaactgtaggtagtatcatatttaatggtgaaagactgaatgctttttctctaagaccagcaacaaaacaaagatggctactctcaccacttctgtttcacagtgtactggaggttcattgcagccaatacagtcaagaaaaagaaataagctgggtttggtggctcatgcctgtaatgccagcacttagggatgctggagagcaggggtggatcacttgaggtcaggagctcgagaccagcctggccaacatggtgaaaccccgtctctactaataatacaaaaaaaattagcgcggcatggtggcagctgcctgtaatyccagctactcaggaggctgaggcaggaggatcacttgaaactgggagggcagagggtgcagtgagccgagatcgcaccactgtactccagcctgggcgacagagcgagactccatctcaaaaaaaaaaaaaaaaaaaagaaaggaaaaggcatccagactggaaaggaggaagtaaagtatcttctttgtagttgacatgattgtctgtagaaaatctgatggaacttgcaaaatttctgggactaagtgaatttagtaaagttgtggattacagaatcagtctgtaaatatcaattgcatttatttagcaatgagcagttggaaattgaaatgtaataaaaccagtactattgataatagtatcagatatgaaatactgttaattacacagcatcatagaaagtaagtaaagaagacttagataggtggggagatagatactctttgtttatgggtgagaagactcgttgctaagaagacaattatccctaaattgatcaatgtgattccagtcaaaatgccagcaggctttcttttttggcggtggggtgggggaatagaaattggcaagctgattctaaaattcgtgtggaaatgtaaaggacgtagaatagccaaaacagctttgtaaaaagaagaacaaagttggaggtctaatgctatctgatatcacaatttattataaatctgaagtagtcaaaacaatgttgtatttgtataaggatgatgaaatagatcaatggaatagaacagagtccagaagtaagccagtacataaatggacaactgaattttgacaaggtgcaaaggcagttcagcagagaaaggatagtctattcaacaaataatgctggcacaaaatggatatccaaatgcaaacaaatgaacttcagtctgtatcttgcactgtatgggaaaatgagctcaaaatgaatcaaagacctaaatggtcaagacttaaattacaaacttttggcaaaattaggacaaaatctttatcttgagtcaagcaaaattatttttagttacaacaccaaaagcatgatccttaaaatagcacattgataaaatgattttttatcaaattgaaaatgtgctattcaaaagagaattcaattcttcttttttttttttttttttttttttgagattcattctgtcgctcaggctggaggcagtggtgtgatcttggttcactgcaactttcacctcccaggttcaagcaattctcctgcctcagcctcccaagtagctgggactacaggcatgtgccaccatacctggctaatttttgtatttttagtagagatggggtttcactatgttggccaggctggtctcgacctcctgacctcaggtgatccacccacctcagactcccaaagtgctggtattacaggtgtgagccaccacacccagccgaagagagaattcttaagagaatgaaaagaccggctgcaggatggcagaaaatacttgcaaatcaaatatgtgattaaggtcttgtatatagaatatatactaatgaactctcaacaccaacaatccaactttttgaaatctgcaaaatatttgatagatacctcaccacagaagatacgctaagtatatgaaaagatgtttagtccttatatatatttttttatttaacaaaaatatttaatgctgccaaaaagtataaaaatacagtaggaatggcagtacaatacaaagtaatctctcctaatttatttcttgtacatctttctacatttcatacatgcattataaacacttaacatccagttaaaggttctgcaaggtcttagctggtggatgctcttcattccctggatgtcaagtttactttgtaaacaaacaactgtgaggcaatctagagggttagcgagcctcacttaagtttccagagtgggcttcaggtcttgatttgcacatcaatggttccaaatttatagctgcagaatattctcaagtcatgaatattaggtatctgtcaatcttggcctttttctttttcgttcattctcatttagcctctatttcatctgctgcaccttctgagctgtggtggcctttctgtcctctcacatacgtttccgtagaacactctcattgttctcctccattgtatcttgcattttagaggaaagtcctgtacgtcagtcacctgtcagtttttcttcttctagacctattctgttcctattgtatttttcagtcattattttgtttggtgaatgatcaaaagcaggaggtagtcttccttagaaagttctttccatcgtttctgtatactagaatctccctttacacattttgctccttctrttatagccatgtatgagaatctcagttgatctggggtctgagataagacccatttggaattttcttatgttcagtaacacttgtttaatgttaatatcatctcctttttccatcaaaacaagacaagtgtstaccasagagaaggtgctggagcgtccagtgcctgcactacggtggatcaccacaggtccatggtcagggttcaaggagccagattctctcactttaaacaagaaattgagaaatgaagctggtgattgagggactccaaaatctggccaagtagtataatgaaagtgagatattgttctggtttcaccactattgatattttctaattgtggtagatgtactgtataatacgacttcacatcttctgacaagagcttcacactgaatcctgtttctttaaacagcatctcttggtcatctgttggccagtactgtgcacatttaaccaattctttctccataatgcggttcagcatgacaactgctttggtcttctgctgccaaaccataagccagaaatggcagcatgtgttaggaagtggaccctgtgttaagatgtaactcctttgtcctcttctatgtcaactaagctggcattaatataatcattctcagcattttgcagtttaacacaactgtgatcatcaagtacarcagctgccagcgatgctgagcatccaactccttgaactcccacttgatggtggtgggcatggcagcaggagcgagctggtgcgagcagagcctgtgccagcggagacgctcaggccctgcacgatccgcagagagcctatattacattaatcataatgttaatagttactaaataaatgggaattaaaatcagtgaactagcactacctatctaaaagactgaccataccaagtgttcgcaaagatgtgaaagactagaactctatactttgcttttaggactgtaaaacagtacaactactttaggagacagtttggttgtttcttaaaatgctaacatacagtctgggcacaacgtctcacttctgtaatcccagcactttgggaggccgaggcgggtggatcacttgaggtcaggagtttgagaccagcctggccaacatggtgaaaccctgtctctgctaaaaatacaaaaattagctgggcatcatggcatatgcctgtaatcccagccactcgggaggctgaggcaagatgatcccttgaacctgggaggtggaggttgtggtgagccaagattgtgccactgcactccagcctgggcaacagagtgagactccgtctcaaaaaaaaaaaaaaaagaagttaacgtacacctaccagcagctccactcctaggtatctactgaaaggacttgtgtactaatgttcacagcagctttatttatgatagtcacaaactggaaaaaatggataaacaaattgtgatgtgactatactatttagcaatataaaggaatgaactatttattgatagtcacaacaacagggatgaggtctcaaaataattatgcagagcaaaagaaggcaggcactggctgggcacggtggctcacgcctgtaatcccagcactttgggaggctgaggcaggtggatcacctgaggtcaggagttcgagaccagcctggccaacatagtgaaaccccatctctactaaaaatataaaaattagctggctgtggtggcgggcacctgtaatcccagctactcaggaggctgaggcagcagaatcgcttgaacaggaggcggaggttgcagtgagccgagattgcgccactgcattccaacctgggtgacagagtgagactctgtctcaaaaaaaaaaaaaaaagaaggcaggcactttgggggtgactaagtatgttccctatcttgatttttcataggtgtatactatatatgtactttgaacatgtgtaatttattgtgtgtaacctatatataaaggtttttttgtttgtttgttttgttttttaaacattgaggtggacggagtcttgctgtgttgcctaggctagtcttgaactcctgggctcaagctgtcctctcacttacaggtacacaccaccaacaacccatttagtctgtcacgtaattaatagaccaaaatttgtcttttgtttttggaccaaataaagctgtttttaaaatttttttttaattcatgcaggctgggtgtggtggctcacgcctataatcctagcactttgggaggccaaggtggatgaatcacctgaggtccagagtgtgagaccagcctggctaacatgatgaatccttgtctttactaaaaatacaaaaatcagctggcgtggtagtgggtgcctataatcccagctactcaggaggctgaggcaggagaatcrcttgaacccaggaggcggaggttgcagtgagcctggtttttcagcagtttactaataacacttggatctttagcattttcttctttttcgttttaaaagacaaccttgaggagagagaaggtagatatgaatggaagaataggggaaggacaatgatttggattggtttgaaacgttggcccctaatatgttgcttttgaggagtagtatttttctaaacggagtaacacttgggattttgtaaattcaatttgatgaggatcttagaagtagcttgctgctattgcagagttatctacagctgctccagaaggctgatggctacatggctggatttgatccatgcacagaggtagagagtgccttactttgcatattactcacatctgttgcactaaagcagtgctttctggctgggtgtggtggctcacgcttgtaattccagcactttggaaggctgaggcaagcagattgcctgagctcaggagttcaagaccagcctgggcagtgtggcaaaaccccatctctacaaaaacaacaacaacacacacacacacaaattagccaggcatggtggcgcacacctgttgtcccagctacttggagggctgaggtgggaggatctctggagcctgggaggttgaggttacagtgagccagtatcacgccactgttcgccagccttggtgacagagtgagactctgtctcaagaaaacaaacaaaaaaacagtactttctgaagtagaatctatccatttttgttctaggygagaggttggcaaaccttctctaaaggcccaaaaagtaaattaaaatctacactttgcaggccatgcaagtctctgttgcagctattcagttctgcttttggagtgtgaaagcagccatagacaacacataaatggatgagtggctgtgttctgttaaaattttatttacaaaaatggggctggatttagcttgtgggccagtttggcaaaccttgctctaggccaccagtgtctcctctttgggatatttgatattttgtgcttaattttccagtggtggctcattgcaaataaaacaaagtggcaccctatcacttgcagctgctgtgctgtgtttaatggcttttactgatgatggtatgtaataagtgaatgacgtgaactttaagaagtagaataaggcaaccttagcttttttctctctcacagtctgcatgtagctggttgatgaattcaggcacttttactttgaaaagtctctggaattaggttttttgatgttcgtatttataatttcttggctgcagtaggataataaccttcttattgctccttctgcatttaaggttctcaaattcgtcaaatgtccgcatatgttacctaagctacctttctaaaataaaagtattgtggtacatttctctgtctataattatacagggactcccagtcacccagaacagtggttcttaactgctttttattcctgagtccctttgaaaatcactaatagctatggatccaggaaaatgagtttatttttgggtgtgttcatgtacacagtattcatactttggggggaattggacaatgtatggccctaaagttttattcatgtctcttagttaggaaatcttgatttacattaaagtacatttatttccatgctgttgtaagtgcttcttgagctggctagagtctttgtaatttatcttccatgttcacacacacagacacacacaccctatgtccctcccccccaaacccttatgcttttttctacaaagaaccaacattcctccgttatggcaatttcttccgttcttgtggctttgcaaatagcatttcctcgtgccaggattgcccttaccataaatttcccttccatatgcccattttctacttgttaagactcatctcagataccagattctctgtgaagatattcctgacatctcttccttggcagacagaagtaaatacgaaggaattctagcaaatgaaacwaatagggacaccttttttcagagtggggaggaatatggaaggaagttttcttggaaagctttatttgctcttcttgagagagaacactattccataaccttctgaacctctttaagcctccttttctaaactggttatcaatttcttaaattgattacattattgataaataataatatttatcttagaggagtattagaataaatgaagaacagtgtttcaatctctgtaacacctcaatacttatacaggaaattcccttcttctggtcattgggtggcctccggaacttatgcaggaaggagtaagtgtatcttcagagacctagtactctcagttcttaataaaaatgttctgatgaaaaactaggtcataaatttactagaacatttcttgaaatccttctggtgaaattaaagtatgtgggtaagctacaagtcgctatgcaaatatttatgttgttataggtgttgttacttttaaaagaccagagggatctttactattagagcaaaaaacgttttttttcctagtcggttgctgatagaatagattcctggctttcacaaattaacacttataattgtgggttctcactattccatcccatgaatgacagggaggatgcatggcatatgacaatttgtaatttactgagcccagattggtcctagtctgctacctagtaggtaaatctcagtttgatttgctaatctctactatttgtgtagtaattttttttttttttttttctgagacagggtgtcactctgttgcccaggctagtgtgcagtggcacagtcttggcccactgcagccttgacctcccaagctgaagcaattctctcaccccagcctttcaagtagctgggactatgggactataggcatgaaccaccatgcccagctaatttttaatttttttttttttgtagagattggtggcgggggggagggtctcactttgttgcctaggctggtctcaaactcctgggctcaagtggccctctcacttccctctcccaaagtggtgagatacaggtgtgagccatgttgcctggccatagtagcttttgttgccagcactatcttcctgcagctactcctactgctggtgatcaaagagaagcaaaaagcaatagctgtagaaggaagaatttagagtaaattaaagagtaaaatgtaacatttcgtgatggcttaaattcatggtgcatatgagtcagctttacagtttatatagtaatgtgaataagtataaattatttcaatcttcttagaatcattaaaggtctgaaggagttaaaaaatagttatactttaatgttttatatgccatagtaatattctccaatttggaaatctttcaagttgccttggaaaaaatacttaataaactgataccaagggtctgttgtaggggaagtcattgcttaggtatccatttgttgagacttctgaattcagtatggtctttctctctctctttttctgtttatgtatgtatcctgaatggaatttgtaagatacaatttaatagttcattaatatggactctgccttttcattgtgtacagtccaggcttttctgttattgtgacaaacattgccctttatttcttcagactcagttcctgatgcttcccacctctgtttacatttgccctctgtactgtacttgaactactggtagtccactgaatacgaggcactgaatgtgccatactggttatgtggacttggcaagatcacatgaccttggcattggattgatgttgtcttatgtaaaatcaggattggaacaaagcagtgggttagcaaatttgtccttttttttcctgccttcgtattctttcattcttacacatttgaaagatacaacactttctcatcactttacaatgaattcctacagccatgattctctatggtatttgggggtgggacatgggccctgagacgagtcaaatattaaaattagagaagacctgggggtttgaaatgcaccctaagttgagatctctaaaatatcttccatctcctaaataatattcatctgtattattagcatgaggcaaaaatttatggatatatgagcttaggtccaaaaagctgttcctcggctcattttgtctcaagtccagattgatgctaaacaagtgatcactaacgccatctgttggtggtaacagttgtactttttcttttaaaatttatgttgtagcgtaatgttcaccgtaatactcaaacaaaaatgtttgagaccaagcgtctctgtcttattatggaatcgagttagagatacttatgtaccaagtgctttaagcaggaagaaaaaaccgtaaaacacttcagttataacagtacctgcattagagttgtactgtctattggatgtgtagctttgttggtttctatgaaaatttgcaggttgaaggttttttttttttgagatggagtctcactctgtcgcccaggctggagtgtgatggcgcaatcttgactcagtgcaagctccacctcctgggttcacgccattctcctgcctcagcctcccgagtagttgggactacaggcgcccrccaccacgcccggctaatttttaatagagacggggtttcactgtgttagccagtatggtcttgatatcctgacctcgtgatccgcccgcctcggcctcccaaagtgctgggattacaggtgtgagccaccgtgccccagcctgcaggttgaaggtttttaagttgaggagcttctgtataatttgggagaatttacagtgtattagggttctccagagaaacagaatgaataggatgtgtatatatattttattatatatataatccttatataattacatacactatataatttcttatatagtatatattacaaggaattggctcacatgatcctagaagctgagaagtcccaagatatgccattggtaagctggatacccaaaacagttaatatgtaattcctgactgagtgtgaaggcctgaaaagcaggagagccggtggtataagttctagtccaaaagccagcaggttctagacctgagaagagttttgttgtttcagtcttgagtccaaagggaggaaaacaccaatgttcagttaaagcactcaggcaggcagagttccctcttacagcctttttgttctattcataccctcaacagatgaggtctgccacattgggtgggcaatctgccttactcagtctactaatccaggtttttatctcatccagaaataccctcaaagacacacccagaatagtgtttgaccaaatgtctgggcatcctgtggttcagtcaagttgacatataaaattatttaaaatagagaactcctatataccttctactaaatttaccagtttttgtttgtttgtttgtttgattgttttgagacgaagtctcactctgttgcccaggctggagtgcagtggtgcaatctcagttcactgcaacttctgcctcccatattcaagtgattatcctgcctcagcctcccgagtagctggaactacaggcatatgccaccatgcctggctgatttttgtgtttttagtagagacagggtttcaccatgttggccaggctggtcttgaactcctgacctcaggtgatgtgcctgtcttggcctcctaaagtgctgagattacaggcatgagccaaagtgcccggccagttcaccagtttttaacattttgtcacatttccttttttctttttatttttttccaatgcatgtgtgattttttttcttttataatttcagtttttattttagattcatggggtacatgtgtagtagatttgttacctgggtatattgtgttatgctgaggtttggggtatgattgatcccatyaccttggtagtgagcatgttacctagtagttagtttttcaacccttccccctttccctcactactcctgctggtggtgcccagtatcattgccatctttgtgtccacaaatacccattgattagctcccacttataagtgagaacatggcagtatttggttttctgttcctgtgttaatttgcttaggataatggcctctagctgcatccatgttgctgcgaaggacatgatttcattctttttttatggctgcgtaatattccatggtgtacrtggaccacattttctttatccagtccaccattgttgggtacctaggttgattttatatgtctttgctattgtgaatagtgctgtgatgaacatatgagtgcgtgtgtcttttggtaagaacaatttattttcttttgaaagtttacccagtaatgggttgctgtgtcaaatggtagttctattttaagttatatgagagatttccaaactgctttccatagtggctgtactatttacatccccaccaacagtgtgtaagccttcccttttctccatagcctccaacatctcttatttcttgactttttaataatacccattctcactggtgtgagatgatatctgattgtggttttgatttgcatttccctaatgattagcgatgttgaacatttttatatgtttcttggccacttgtatgtcttcttttgggaagtgtctgtttgtatcttttgtcctttgtttttgcttgttcaattgtttacattccttataaattttgggtattagacctttgtcagatgcatagttggtcagtattttctcccattctataggttgtctgttgaccctgttgattgttttcttgtggaagagctctttaattaggtcccacttgtcaatttttgtttttgttacatttgcttttgaggacttagtcataagttatttcccaaggcacatgtccagaatggtgtttcctaggtttttttctagggttcttataattttaggttttacatttaaatctttaatccatcttgttaatttttgtatatggtaaaaggtaggggtataatttcattgttctgcatatggctagccagctatcccagcactatttatttaataggaagacttttcccattgctcatttttgttaactttatacaagatcagatggctgtagctgttggctttatttctgggttctccattctgttccattggtctgtatgtctgttttgtactagaaccgtgctgttttggttacttactgtagccttatggtatagtttgaactcaggtagtgtgatgcatcacactttgttctttttgcttaggattgccttggctactcaggttcttttttggttccatatgaattttagagtagtttttttctggttctgtgaaaaatgtttgtagctttataggaatagtattgaatctgcagattgctttgagcagtatggccattttaatttggccatatagtttacttaccacaggctatttggcctatagtttacttgttttgttgtgtttttgccaggttttggtatcaaggtgatgctggcttcatagaatgagtttagggaggagtccctcctccttaatttttttgattctttcaaaccagcagcatggaatgcttacccatttgtttgcatcatatgtgatttctttcagcagtgttttgtagtttttgtagagatctttcacctccttggtatttgtttgtttgtttctatgtattcctaggtattttgttgttgttgattctattgtaaatggaattgtgttcttgatttggctctcagcttgaacgttattgttgtatggaaatgctactgatttttgtacattgactttgtatcttgaaactttactgagtcatttattggttgtaggagcccgtttgcggtctttagggttttctaggtatagaatcacatagtcagtgaagagagctagttggacttatttttttcctatttggatgccttttatttctttctcttgtgcaattgttctgacaaggacttccagtactatgttaagtgagagtgggcatccttgtcttgttccagctctcaaggggaatactcttagcttttgcctgttcagtatgattggctgtgggtttgtcatagatggctcttattattttgaggtatgttcctttgatgcctagtttttttgagggtttttatcataagggatgttggattttatcaaaagcttattctgtatctattgagatgatcatagggtttttatttttaattctgtttatgtggtgaatcacatttattgatttgtgtatgttgaaccaaccttgcatcacaagagtgaagcttgcttaatcatggtgaattaactttttggtgtgctgctggattcggcttgctagtcgtgtgttgaagatttttacgtttatgttcatcagggatattggcctgcagtttacttgttttgttgtgtttttgccaggttttggtatcaaggtgatgctggcttcatagaatgagttagggaggagtcccccctccttgattttttggagtaggttcaggaagactgttaccagtttttctttgtatgtctggtagaatttgtgaatccatctggtctagggccttttttggttggtaggtattttattacttattcagttttggaatttgatattggtgtgtttagggtttcagtttctttctaattcaatcttggggggttgtgatttttcaggaatttatccattttctctagattttttagtttgtgtgtgtacaggtgttcataatagtctttgaggatgttttgtatttctgtggaattggttgtaatgtcacttttgtcaattctgattgcttatttggatctcctttcttcttagtttatctatctggtggtctgttaatctcatataacctttcaaagaaccaacttttggtttcattgattcttttaatttttaattcttgggggtatatagtaggtgtatgtatttaggtggtacgagatactttgatagaggcatacagtgcgtaataatcatctcgtggtaaatgggttattcatcccctcaagcatttatcctttgttacaagcaatccaattatactcttttagttattttaaaatgtacaattaaattattattgactatagtcaccctgtagtgctatcaaatactaggtcttattctttctaactgctttttatacccattatctgtcacttcctaccccccctgccctcatcccctccactgcccttctcagcctctggtaaccatccttctctctgtctccatgagttcaattgttttgatttttagctctcacaaataagtgagaacatacaatgtttatctttctgtgtctggcttatttcacttaacatgacctccagttccatccatgttgttgtaaatgacaggatctcagtctttttatggctgaatagtactccatgatgtatatgtataatattttctttatccatacgttcatctgttgatggacacttacagtgatgttgagaactttttcatatgcctctttaccagttatatgttttctttggagaaatgtctagtcagatcttttgcccatttaaaaaatcagagtattagattttttttttcctgtagagttgtttgagctccttatatgttctggttattaatcccttctcagatgggtaggctgcaaatattttcttccattctgtaagtcgtctctttgttgattgtttcctttgttgcgcaaaagctttttaacttgatgtgatcctatttgtccatttttgctttggttgcctgtgcttgtggggtgttattcaatagattttctcccagaccaatgctctggagggttttccaagtgttttcttgtagtagtttcattgtttcaggtcttcgatttaagtctgtaatccattttggtttgatttttgtataaggtgagagttaggggtctagttccattcttctatacatggatatctagttttcccagccctgtttattgaagagactgtccttttcccattgccaatgaatgttcttggcacctttgttgaaaatgagtttactgtaggtgtgtggatttgtttctggattctctgttctgttcaattggtctatttctatgtttttatgccagtacatgctgttttggttactgtaactctatagtataatttgaagtcaagtaataggattcctcagttttgttctttttttttttttttttgcccaagattgctttagctattctgtgtcttctgtggttccatataaattttaggattgttttttctatttccatgaagaatattattggtatgttgatagggattgcattgccttgaatctgtagattagttagtgcagacaagttaaaaatattgattctttgagtccgttaatatgcaatatccatttttttttgcatcctcctcaatttctttcatcagtgttttataatttcattgtagacatcttttacttttttggttaagttacttcctatgtatttaattttttttgtggttcttgtaaatgggattactttttaaaattgctttttcagattgttcactgttagcatacagaaatgctactgatttttgtatgttcattttataccctgcaactttactgaatgtttatcagtcctaatagttttttggtggagtctttaggtttttccaaaaataagataatattgtctgtaaacaaggatagttttccttcttcctttccaatttgaatgtcttttatttcttttgtctgattgccctagctaggactttccagtactgtgttgaataacagtggtgatagtgggcatccttgtcatgttccagatcatattgtatggttgatgggtggagtattctgtaggtgactattaggtccagttggtctgtgtcaaatttaagtccagaatttgttaggtttttgcctcaatgatctaacgttgtcatggggatgttgaagtttcccactactacttgtgtggctgagtttttccttaggtttaaaggtacttgttttataaatctgggtgctctaattttgagtgtgtatatatttaggatagttaagtcttgttgaattgaatattttatcactctgtaatgcccttgtctttttttactgttgttggtttaaagtctgttttctgtgatataagaatagcaacccctgctcttttttgtgttccctttgcatgatctttctccagctctttactttgagcctatgggtgtcattagatgtgagatgggtctcttgaagacagcagacggatgggtcttgtttttcttatccagtgtgccactctatgtcttgagaactctgctgttagactgatgtggttccctttatacatgatctgacctttttctctatttgtctttaagattatttccttagcattgaccttcaacagtctggtgatgatatgccttggtgatgttcattttgcatagtgtctcacaggtgctctggatttcttatacctggatatctatctctttagcaagattagggaaattttcttgaattattttctcaaatatattttccaggtggttttcttcttctcggtctctttcaggagtgccaataatttgtagattcggtcagtttacataatcccatatttctccaagactttattctttwtttttttttttttgagagtcttgctgtgtcacccaggctggagtgcaatggcacaatcttggctcaccacaacctttgcctcccaggttcaaggggttcttgtggctcagcctcccaggtagctgacattacaggtatgtgccaccatgcctggctaatttttgtgtttttagtagagacagggtttcggccacgtttgccaggctggtctcgatcttctggcctcaagtgatctgcccaccttggcctcccaaagtgctgggattacaaacatgagccagcacacctggcctgactttgttcattttaaaaaattctttttgctgtcccagctattcgggaggctgaggcaggagaatggcgtgaacccaggaggcagagcttgcagtgagcggagatcgagccactgcattccagcctgggcgacttgagtgacactctgtctcaaaaaaaaaaaaaattctttttgctttatttttgcgtgactgggtttgtttgagagtctcgtctctaagctctgaaattctttcttctgtttggttcagtttattgataaagctttcaattgtttttatttgtttgtttgtttgttttttaggcagagtctcactcttttgcctgggctggagtgtaatggtgtaatctcggctcactgcaacctccgccttccaggttcaagtgattctcctgcctcagcctcccaagtagctgagattacaggcacgcaccatcacacctggctaatttttgtgtttttagtagagacggggtctcaacatgttggccaggcaggtctcaaactcctgacctcaaatgatccacccgccttcacctcctgtttttaaatttaagttctttagttccagaagctctgattgatttttaaattttattttattttagggtccggggtatttgttatgtaggtcaattgtgttttgaggggtttgatgtatagatttgtttcattgcccaggtaataagcatagtacccagtaggtagtttctcaatcctcactcttcttccaccctccaccctcaagtaggccctggtgtcagttgttcccctctttgtgcccactgtactcagtgtttaactcctatttattagtgaagaacatgcaatattttgttttctgttcctgtgttcgcttaggataatggcctccagctccatccatgttgctgtaaaggacatgatgtcactcttttttatggctgtgtagtattccatgatgtatatatgccatattttctttattcagtctaccgttaatgggtatttaggttgattccatgtctttgcaattgtgagtagtgctgcagtgaacatacatgtgcatatgtctttgtgttrgaacaatttatattcttttgggtatatactaaatagtgggattgtgggttgaatggcagttctgctttgggatctctgagaaattgccaagctgctttccacagtggctgaacgaatttacattcccaccagcagcgcataaacatttccagttctctgcagccttgccagcatctgttatttcttgactttttaataatagccgttctgactggtatgagatggtatctcattatggttttgatttgcacttctctaatgatagtaatgttgagcattttttcatatgcttattgcccatatttaggtcttttgagaagtatctgttcatgtcctttgcccactttttagtggggttgttttttgcttgtaaatttgtttaagttccttatagatcctggatattagatatttttcagttgcatagtttgaaaatattttcttccattctctagggtatctgattactctgatagtttcttttgctgtgcagaagctccttagtttaattgggtctcatttgtcagtttttgttgcagttgcttttggagtctttgttatgatatctttgccagggcctatgtccagaatggtatttcctaggttatcattccagggtttttatagttttaagttttacctttaagtctttactccatcttgagttgatttttgtatttgtatatggtacaaggaaggggtccagttttagtcttctgcatatggttatccacttatcccagcaccatttattgaatagggagtcttttccccattgcttgtttttgtcagctttgtgaaagatcagattgtaggtgtatggccttatttttgtgctctctattctgttccgttggtttgtgtgcctgtttttgtagcagtgtcatgctgttttggttactgtagccttgtggtatagtttgaagttgggtaatgtggtgcttcctgctttgttatttttgcttaggcttgcattcactatttgggctcttttgaggttccacatgaattttaaaacagttttttctaatcctgtgaagaatgtcattggtagtttgataggaataccattgaatctttagattgctttgggcagcatggccattggccaaacaatattgagtcttcctagccatgaacatggaatgcttttccatttgtttgtgtcctctctgtttctttgagcagtgttttataatcttcattgtaaagatagtaaacctctctagttagctatattcctaggtttttaattctttttgcggctatggtgaatgggattacatttttgctttggctctcagtttggatgttggtgtataggagtgctactgatttttgtacctttgtactttcttctcattagtttcaaagaatttcttgatttctgccttaatttcattatttacccagaaatcattccagaacaggttgcttaattttcatgtaattatacagttttgactgagtttctttagtattgatttctatttttactacactgtggtatgagagtgtgctttgtatgattttgtttttttttttaatttaatgaggattgttttatgtccgattgtgggttgattttaaagtatgtgccttgttcagatgagaagaatgtatattctcttgtctgtgtggagtgttctgtaaatgtctgttaggtctatttgatcaagtgttgagttcaggtcctgaatgatctgcctgttgtcagtgaggtgttgaaatctcccactattattgtgtgtttgtctgtgtctcttcataggtctctaagaacttgctttatggatctggctgctcctgttttgggtgtgtgtatatatttagaatagttaggtcttgttgaactgagccctttaccattatgtaatgccctttatttatttatttattttaatctttgtttaaagtctgttttgtctgaaattagagtagcaacctctgcttttttctattttccatttgcttggtagatttttctccatccttttacttggagcttgtgggtgccattgcatttgagatgggtctcttgaagacagcatacaattgggtcttgcttctatatccagtttgccactctgtgccttttaattggagcatttagtccatttacattcaaggtaagtattgcgatgtgtggattatttccttttgtcatgttgctagctggttatcatgcagacttgtgtggtgcctttatagggttactagcctgtgtacttaagtgtatttttatagtggccagtaactgtttttcctttccatgtttagcactcccttcaggactttttgtaaggcagatctggtgtaatgaaatcccttagcatttgcttttctgaaacagatattatttcttcttcgcttatgaagcttagtttggctagatatgaagttcttggttggaaagttttttctttaagaatgctgaatataggctgatatggtttggctctgtgtccccacccaaatttcatgttgaattgtaatccccagtgttgggggtggggcctagtgggaggtgattggatcatgggggtggtttctaatggtttagcaccatcctgctagtgctgtctcatgatagagttctcatgagatctggttgttggacagtgtgtaaaacaaccagatccccactttgtgctctctctctcctgctggccatgtgaagatatgcttgcttcccctttgccttctgccatgattgtaagtgtcctgaggcctccccagaagcagaagcttgtgcagcctgtacaaccagagccgattaaaccacttttctttataaattacccagtctcaggtatgtcttttttttttttttatacagagtcttgctctgtcgcccaggctggagttcagtggtgcagtatcgggggaatttcagcccccaatatttcacgtgggtccttttctattttccctaaatgtcggccagtctgagaaataaagggaaagagtacagaagagagaaattttaaagctgggtgtccaggggagacttcacatgtcggcaggttccgtgatgcccccaaagccgcaaaaccagcaagtttttattagtgattttcaaaaggggagggagtgtacgaataaggtgtgggtcacagagatcacatgcttcacaaggtaataaaatatcacaaggcaaatggaggcagggtgagatcacaggaacggagcgaaattaaaattgttaatgaagtttcgggcacgcattgtcattgataacattttatcaggagacagggtttgagagcagataaccggtctgaccaaaatttattaggcgggaatttccttttcctaataagcctgagagcgctatgggagacaggggcttatttcgtcccttatctacaaccataaaagacagacattcccaaagcggccatttcagagatctccctttggtaatgcattctctttctcagggatgttgcttgctgagaaaaagaattcagcgatacttctcctatttgcttttgaaagaagagaaataggctctgttctgcccggcccacaggcagccagactttaaggttatctcccttgttccctgaacatcgctgttatcctgttcttttttcaaggtgcccagatttcttattgtttaaacaatttgtgcagttaacgcagtcatcacagggtcctgaggcaacattcatcctcagcttacaaagatgacgggattaagagattaaagtaaagacaggcataggaagtcacaagagtattgattggggaagtgataagtgtccatgaaatcttcacagtttatgttcagagtttgcagtaaagacaggtgtaagaatgataaaagtattaatttggggaactaataaatgtccatgaaatcttcacaatttatgttcttcggccatggcttcagccggttcttccatttggggtccctgacttcctgcaacagtgcagtctcagctcattgcacaaccacctcctgggctcaagtgattctcctacctcagcctcgcgagtagctgggattacaggtgcctgctaccacacccggctaattttttttttttttgcatttttagtagagatggggttttgctgtgttggccaggctggtcttgaactccttacatcaagtsatctgcccacctcagcctctcaaagtgctgggattacaggtgtgagccaccgcacctagtcagtgtgtctttatagcagtgtgagaactaaccaatacataggcccacaatctcttctggcttgtaggtttttggctcaaagtacagccattagcctgatggggttccctttttagatgacctacctgctctctctggctgcctttaacattttttctttcattttgaccttggagaatcggatgactgtgtgtcttggggttggtcttcttgtgtagtatttttcaggggttctctgcatttcctgaatttgaatgttggcctctttagtgaggttgaggaaatgttcatggataatatcttgaaatgttttccaagttgcctgctttttctccctttcagggatgccaatgagtcgtagagttggtctctttacataatcacatatttattgtttttttgtttttgtctgagttattttggagagcaggtctttgagctctgaaattcttttctcatcttggttgattttgctgttaagatttgtgattgttttctgaaattcttgaagtgagtttttcagttccttcagcttagtttggttctttcttaaaatgaccatttcatcttttatctcctgtattgttttattctatttcttagaattttttgattgggctttgactatttcctgaatgtcagttatcttcattcctatacatattctgaattctatttctgtcatttcagccaggttatgaataattgctggggaaccaatgtagttggagttaagacaggacagtctggccttttgagttttttgtactggttctttctcatccatgtgggctgatatttcttcagtctctgaagttgctgtcctttggctttttttttttttttttttttttggcttttatcttcttggatgcccttggaggtttgattatggtataaggkgggttcagtcgactggctttgagtctagtctgctcttgggttgtgaaggagccccctctgtttactgkctctatgcctgcatttcttttattggatgttctgatccatggggctccytcatgcaaaggccgtatccttgccaggtaagccctattctgctgttcatgtgctccccaggaatcacagggttgtgcctgcctacggaattcaggcagaagcgggactgctgggctggaagctgttgcagatatggcctgtctggctacaagaggccaggccaggagtgggtggagttgaccaccctgtcatctgagtgtttccaggaagacgggaggctgtgcttctcaacagattcaggctgaagtaggatcactggactagaagctgtagcaggtgcagcttgcctggctaccagtagcagaggtgggtggggatgcccgccctgccatctaggtgctttctaggataacgggaggccatgccatccagctgagttcccacagagcacaactataggccagaagctgtctcgaactcctgggctcatagcgattcccccacctcagtctcctaaagtgctgggattatagatgtgagctactgtatctggcctgatttctttttaagatgtttatctcttcctttgtttcctagattgccttagaagtttctttgtgttgatattcgaccttgtcttggatcttgttgagcttcctttttgtcggtgctttgaattctttttctgtcatttctgagtttccattttggttagggaccattgctggagagcttgtgtgatcctttggtggtgtcactgtattcagatttttcatggtgcagaatccttgtgttggttccttctcatctggagacattggcacttcaatttttgtaattatttttgtgcaggtagaattttttccttctttttctgtgatattattttttcctccttccctttccccactccctagggggtgtgactatagagaatgctgggtagggtcttttgactttgcttctgtaaccataagcacttctgttggcaggtttttaattgggatatgcagttctacctatcagccagtagatggcgcttacgggtaagagctagctgtggccaaagtggctgggtgtacacttgatccttgtttactgggagatgctctctgttgcctcaggcagtgggctgatttgtggagtaaacagtggtctgtgctccctcctcagtcctggggaggtgctgggaggggtggaaggtgggcagggctggaccaagcaggtccacctacgggtcccccagtggcaggcacaagaaccaaggccaaaggagaatccagtgggtggccaccagacgcccagaagtgtgtccaggtgtggaactgagaaacctccttgaccccaagttctctacacatagataggagtggcctaaactcataatccaggagagtgggtgctccagatgcttggagatatgcctgggacctgggcatggagcagagatagccacccatgcaccaggatctctgcacaggaatggtagggtggctcaggctgctgttccagatgagcaggtgctccaaatgcctggagatctgcctggatatgaagcagagatggggacccctgcacctggatctctgcacaggaaaggtggggctgttcaggctaccaatcccagcaaatgagtgctttgaatgcctggaggtcttcctggccatagagcagagaggccctgctgcaccacaatatatacccaggaagggtggggcaggtcaggctgctgaagcaggcaagtgagtgctttgaatgcctggagatctgcctgggtatgaagtggagaggacccaccatgcacaagaaggatggggtgactcaggctgctagtccatgcaagcaggtgctccaaatgcttggagatctgcctaagcgtgcagtagagagggccctactgcaccataatctatgcatagaaagggtgtaggttggtttagcctgctgatccttggaaagggatgctctgaatacctggagatctgcctgggtatgaagcagagagggccctgctgcactatgatcaatgtccatgaagggtagggtggcccaggctgctggtccaggcaagtgggtgctccaaatttctggatttatgcctgaggtggagtggagagggccctgctgcaccacgatcttaggagagcttgctggggtacccagcagtgatatacatagactggtttcaggtcatgaagctggccctggctgcacgtctcattgtccgggagaaagtgcagctgtagcagctctccccacgcatccaaggcctgcagtgggggaaagcacagttccaacaccccagttagcttcagggattaggagcaacaatgttctattccttggcctgggttgctcagatgcccagggaaaaagtgtcacagagagaggctctctgcctttcttgcatactggggcctcactcacttttatcagcctgtgttctccttcccaggctctgggtgtcgtttatgattccactgggtttctgttttccttcctgaattaaagcttacagagtcgattgcttcttttttttttttttttgagacaaggtctcactctcttgcctaggctggagtgctgtggcatgatcacggctcactgcagcctcagcctcccaggctcaggtgattctcctgcttcagtgtcctaagtagctgggactacaggtgcacaccaccatgcctggctgattttttgtttttgtttttagagataggattttaccatgtcacccaggctggtcttgaactcctaagcagaagtgaagcaatccacccacctcggcctccccaagtgctggaattacaggcttgagccaccatgcccagcccacagttgatctttatgcactatcttgatatttccaagtggctgatgcatgctaaaagcctctaatcaaccatgttggggggaaaaagatgccacattannnnnnnnnnnnnnnnnnnnnnnnnnnnnnnnnnnnnnnnnnnnnnnnnnnnnnnnnnnnnnnnnnnnnnnnnnnnnnnnnnnnnnnnnnnnnnnnnnnnnntttttttttttttttgagacggagttttgctcttgttgcccaggctggagtgcagtggcactatctcggttcactgcaacctccccgtcgcgggatcaagctattctcctgcctcagcctctctagtcgctgggattacaggcgccggccaccacgcccagctaaattttgtatttttagtggagacggggtttcaccatgttggccacgctggtctcgaactcctgatctcaggtgatccacctgcctcggcctcccaaagtgctgggattacaggcgtgagccaccgcacccagccttctttatgtattaataactacaggaaattgtcacatttaggaaattgatatggtaatctacagtctatattccaattttgtgaattaccattaatatctcttaaagcatttactaccatccagtacaggacctttagttgccatatctcttgmgtttcctttaaattgtaatagttcttcagcctttctcataacattggcattttttgaagaatatatttatcgaatgtttctcagattagacttgtccatgtccttgagattagatttcagttatgggttcccagctcaacttcttgtcagtaatgttgtgtccttcccggagtatcatcacatccagaggcacatgatgtctctcttttccccattggtgataataattttgatgtactcagttaagggattgtccagttcttcacacaatatagttacttatttttttttcttgtaactagtaagcagtctgtgaggaaaaactgtttttgtttttttacttttttctaattaatgtctttgtaggaaatttaaaaatatacaggtaagctaaagttagggaaaaattgtcataaacctagcgataaccacattttagtgtatgttggttcatctctcttctttatgttataataatgattaccaaaaaggactataccttaaatactgtttggtaaattgcttcattcatttagcagtatattataaatatttttttcatgtgtcattaagtattacagtattttaatggctgcatagttttccattgtgtagcagtcacttgcctatagattgttctgtgatgttcagtttagcctcacattccaggtacaagagatccttagtggctgtcccctaggggttagggaatctcttaaacccaggagcctccaagcatggaatcttgatgtctgtcttatcccatcagcactgccatgttgtttttctgttctgctgttccacactaatatgctatgttcctttctctgaccattcctaggtccacagtagcacacttttgtcaaatatttaaacctatttctgattcacttgggttgttttcatgctttaactgctaatattgtatccagatgttggttttcttgtttgtcttattgcaaatataggctataatgagttaagtgaacttttatggggtagtcttctgagtagagcatctggccaaaatacctcatacccaccaaaaacaaaaacacaaaatatttggagagcacagtttatctttttatttggaacttctttgctattacctgaatttctagttaacctatattcgtattttgggtcaggtatcttaggagatctcagctcttgtctattaggattacttagcaaattatcttagtgaactttctgtacaggagataaagcataacctttaaatgcattattttatagatttttctccctttaatatttaatcatttgaaagtctctcttctacaagttgtttagtttcaagctgttcaggtatatggaaatataacctttctgtatagatgtgggacagtttacaaatgaatcagcccatactttcatagtttagttcaaatgtgacaaaattatatttggaagacttaggtgtagaatctctttttattgactgaaggcaaaacaattttaacttaagtgaatgaagtaactttgttatttttaaacatttttttgaggcggagtctcgctgtctcccaaggtggagtacagtggtgcaatctcggctcactgcaacctctgcctcccaggttcaagcgattctcctacctcagcctcccaagaagctgggattacaggcacgtgccaccacacccaggtaattttttgtgtttttaatggagacrgggtttcaccatgttggccggctggtctcgaactcctgacctcaggtaatccacctgtctcagctttccaaagtgctaggattacaggcgtgagcccctgtacctggcctatttttaaacttttctttacactttgagaaataacgtctgctattttatagatgatgatgtaatagtgataccctgtctctaaaaaaatgtaaacagttagctgggcatggtggtgcacacctcagctactcagaaagctgaggtggtgggaggattgcttgaccccaggaattggaggctgcagtgagctaagattgtgccacrtgctccagcctgcatgacagagcaagaccctgtctcttaaaaaaaaggctactgtgatgttgagtcatgttgaaagatcttgtcatttataacacaaagaaaagtaaataaaatattaaagcatatatttggcatatttaatgtgaacttttctgtgtgcaaagtatagaaaggtctttgaaggacgtactaaaagaataaactcgtatctctgtcttttagaacttgtagtacttttataatatcgtataagcctctctgttatacttcaacattattaaatactattgactcctggctaacacggtgaaaccccatctctactaaaaatacaaaaaattagccgggcgtggtggcgggcgcctgtagtcccagctactcaggaggctgaggcaggagaatggtgtgaacccgggagatggagcttgcagtgagccaagatcccgccactgcactccagcctgggcgacagagcaagactccgtctcaaaaaaaaaaaaaatactattgacatgtacatttgtaaatagttacgaaaagtttatattctttaaggtatgctttgctatattttaaaatatgtaatggattttaatgtgaccttaattttcatgaaatacatgggtgacaatttattttaaaagcagagaaggccaggtgcagtggctgacgcctgtaatcccagcactttgggaggccaaggcctgcagatcacctgaggttaagagttcgagaccagcctggccaacatggtgaaaccctgtctctacagcctgaccaacatggtgaaaccctgtctctactaaaaatacccaaaattagctgggtgtggtggcttgtgcctataatcccagctactcaggaggctgaggctggagaattgcttgaacctgggaggcggaggttgcagtgagctgagatcatgccattgcatgccagcctgggcaacaagcaaaactctgtctcaaaaaaaaaaataaaaggagagaaaatgtgattcttcatgcttatagtttacaaatattttaatattgttcctggtctgtattacatttttttaagtaaaagtaataaattgtatattttgatatgtaaagtaagttaaagatataactcctttacctattaaattaaaatctttttcttagcactagggggcacccctgatttataaattcatgttatacttaatgttgcctagaaagtggaatgaaatgtaattatttgaaaaatattttgcaaactgagtgctatgttcaaagagaatctggattatcagctggttttgttgcatagcagtataaatataagttgattcttaatactataaggataatgaagcttatagaataagatagtttagatgggaggaaattgttttgtagtttattcattttcacgttgattttctaagtaggtgcgttaaatggttttaaaacttcatgattttgaatatatttctgttttaaaaatcctagcacgatgttctgctcttagcaggtacctaggctgtatctgaataaattaagataaattcaagatgtgactgaaggctgctatcattagtaataatttttaagcatttcaaaaccaagagcatgttttactacttctaggaaacagatcttagccattctcattcattgtgtttgcaattaggatttttagtaatgcccagcaacaattgcttcccaaaggtgtatttctaaggttttgtcttttcttttttatttaagagactctgttgaatttaagctttatgggaattaagcagatagtaacatctgcatcatcattacatcatagtaatagcatatttaccatgtgccaacactgttttaggtgctttgtgtatattatctyatttcgcttcaccacaactctatgaagtaggtacttattatccctattttatagatgagaaaactgagtacagaaaagttaaaatttcctgggtttacacagaggtaatgtggttccaaaatttgtgcttttaaatcactatatcctatattgcttctccagagaaaggaaacttagcattgaagtaattattattaacatttaaaactcagcttttaaagtgaatgtagcatagagtacctaatttatagacacttaccatttctcttatgaaaaacgtcatagatctttaaagttgaaaagggatcttaaagttcatttaccactgtcattttacaaagaggaagaaattctgtcctagaggtaaagttacctactcagtttatatgacaggttatttatggaaaggtattagaacttcaagtaagtactctgacttccagtaaagtggaaaatctgtgttgtgaaaagaatatttgactagaattttgatggcttgaaacttgttcttggctccttatttaccatcctgtgtcctcagaagctctgtgtttgtttgttatgtgggtatatcttccctaattagtgttattggtagttgtgcaaatcaacataatgtattaaagatatttaataaactttaaagtcctatacaaataaacatagtgtatattatggtacagtaaagccaccatatccatgggttctacatctggattcaaacaaatctgagttgaaaatacttggggcaaaaaaaaaaaaaaaaggatggttgcatctgtactgaacatgtacagacttttccttgctataattccctaaaaaatacaatataacaacaatttacrtagcattggcactgtattaagtattatgagtaatccggagatgatttaaagtatacaagaggatgtgtataggtgatatgcaaatactgcaccattatataagggccttaagcatcggtggattttggtatctatagtagatcctggaacaaatcccccatggatactgagagatgattgtatttttatgacatgtagttcataatattttaagtatttgtgatatgttggtaatctagatcactagctgtgataagcttattcagtattgttgatttacaggtgtcatttggatcgctaaaaatttattgtgttgtggtatgtgttactttgccacctgtgtttttacacattttatttactttaagaaagttgtacatttgatttttttccctcgcaatacccacttagcgaaaagttatgcttttgctttgcttatgaagaacataacaataacatctattgaatactgtttatttggtgttctgattgtttgaaaagagcatacaagattgtcctcagtttggatttagcgactgagctaagataataaatagagtttagtgaagttgaaatttttgtttcttggcatggtggtaggcatagagttgttttcttgaacttcgaggaagacatttgcttaactttttttttttttacaggaataatgtatttgtggccttggacatgaggcagtcagtcctctgttgctgttaacataaggtcagggactgatgaggaaagcatggacctaatgaacgggcaggcaagcagtgtcaatattgcagctactgcttctgaggtaagatatttaagaagcttgggtgtaaagtttcttacctggctttctaatttttcaagcattatgtttgttcacatacttaaatcagaagtgcatttagtgcagaaatacacatttcctttttttttaaattttatttttttttatactttaagttttagggtacatgtgcacattgtgcgggttagttacatatgtatacgtgtgccatgctggtgcgctgcacccactaactcgtcatctagcattaggtatatctcccaatgctatccctcccccctgcccccaccccaccacaatccccagagtgtggtattccccttcctgtgtccatgtgaaatctccttaagctgataagcaacttcagcaaagtctcaggatacaaaatcaatgtacaaaaatcacaagcattcttatacaccaataacagacaaacagacagccaaatcatgagtgaactcccattcacaattgcttcaaagagaataaaatacacaggaatccaacttacaagggatgtgaaggacctcttcaaggagaactacaaaccactgctcaaggaaataaaagaggatacaaacaaatggaagaacattccatgctcatgggtaggaagaatcaatatggtgaaaatggccatactgcccaaggtaatttacagattcaatgccatccccatcaagctaccaatgactttcttcacagaattggaaaaaactactttaaagttcatatggaaccaaaaaagagcctgcatcgccaaggcaatcctaagccaaaagaacaaagctggaggcatcacactacctgacttcaaactatactacaaggctacagtaaccaaaacagcatggtactggtaccaaaacagagatatagatcaatggaacagaacagagccctcggaaataacaccgcatatctacaactatctgatctttgacaaacctgagaaaaacaagcaacggggaaaggattccctatttaataaatggtgctgggaaaactggctagccatatgtagaaagctgaaactggatcccttccttacaccttatacaaaaatcaattcaagatggattaaagacttaaacgttagacctaaaaccataaaaaccctagaagaaaacctaggcattaccattcaggacataggcatgggcaaggacttcatgtctaaaacaccaaaaacaatggcaacaaaagacaaaattgacaaatgggatctaattaaactaaagagcttctgcacagcaaaagaaacyaccatcagagtgaacaggcaacctacaaaatgggagaaaattttcacaacctactcatctgacaaagtgctaatatccagaatctacaatgaactcmaacaaatttacaagaaaaaaacaaacaaccccatcaaaaagtgggcgaaggacatgaacagacacttctcaaaagaagacatttatgcagccaaaaaacacatgaaaaaatgctcatcatcactggccatcagagaaatgcaaatcaaaaccacaatgagataccatctcacaccagttagaatggcaatcattaaaaagtcaggaaacaacaggtgctggagaggatgtggagaaataggaacacttttacactgttggtgggactgtaaactagttcaaccmttgtggaagtcagtgtggcrattcctcagggatctagaactagaaataccatttgacccagccatcccattactgggtatatacccaaaggactataaatcatgctgctataaagacacatgcacacgtatgtttattgcggcattattcacaatagcaaagacttggaaccaacccaaatgtccaacaatgatagactggattaagaaaatgtggcacatatacaccatggaatactatgcagccataaaaaatgatgagttcatgtcctttgtagggacatggatgaaattggaaatcatcattctcagtaaactatcgcaagaacaaaaaaccaaacaccgcatattctcactcataggtgggaattgaacaatgagaaatacacatattttaacttttattttagtgattcgtatgttccctgtgcatcataggtatacttaatccttatctacttaagatacttgaaaaataatgacaaataatggtaactcataaaactctttatttttaaaagaaacatagaatttctttttagagtatttttacattacatcatccttgagggcaataatgcaagtaaggcaaagaaagattcttttacttggaatcactaaattttggacccatctagatcccttgattccacatatattagaggaaacaaaagaaccgttaggctggaatgttgtaagggcttactctgctgatgtagtttagcatttaagatggagatgtgaagactgaactagatgctcacccctctagttaatatattatgattgtatttttgccccaacttttttatttttttctttgtgtataaatctagggaacttgcctgctttccttaataactttagcatctggcttctatatttcttatttttctcttagtatattggatgagaataatgtttatgaccctttaacaccttgacctcaaagttccttaatagccccaactccattttgccccagctagttacttaggccttgatatcactgaaaatagtctaagtctatggtttcaattgtttttgttatgtagatgatttatttttatctctagccctggcttccctcatgaattttattaagcatttttgatggaccagacattttaatgtccacaaaatcaagtttcttattactgttctgctccacaaccataaagaaaatagtccaagccttttctctaacttaggttaatagcatcacatttccatagccatctaagtttaaatctttagatgtgttgtttatttgtggtggggtttgagacagagttttgttcttgttgcccaggctggagtgcagtggcacgatctgggcccattgcaacctctgcctcccaggttcaagcaattctcctgcctcagcctccccagtagctgggattacaggtgcttgccaccacgcctggctaatttttgtatttttagtagagatggggtttcaccttgttggccaggctggtcttgaattcctgacatcaggtgatccacctgccttggcctcccaaactgctgggattatagatgtgagccactgcatccggccaatgtgttgttaatttttgcccaccacaaccattgtctcatcatagcagagagaatctgctagcaagacagaagttacaatcttatataacgtaatcatggaagtgacatctcatctccttttccatattctgctggttagaaacaagtcacaggttctgcccacactcaaggggagaggatcacacagggttgagaataccaagagatagagatctttagcagctatcttagagcctgtccactgtgctttatctctgggatccagtacttttctccttatttctattactgtactaccatgttagtttggtcgtttattatttcttgtctagattagtgccatgaccttttagttgggtgttgcacttatattttctgttgtttctgatccttcaactgaaatttaagtttaatattcttaaaatacagctcttaaactttatcttttctcaaaactgtctgtggttcctcattgcctactaattaaatttaaatgcccactgagccttttattcaagactttcttcaaaatggccccaaatttttggatttaacccctactaatcctctacttgaaacttaacagtctaatgagagaatactacatttgctgttgtctgtataaactattacattttccttcttctgtcataactttgcctataccaatgtttctagctggaatttttcttcccattctggtgtgtcccctccccatcactgcacacacaaaaagttttgtctttcaaacatatttcaaatgctatgcttttaataaagcctctcctaatcccttaaacagatgggagctttcctatttttaaaactgtcacttagaaaaatctctttctgtaattttctccgtaaatgtatgcatagcttttttatatttacaaccataagattatgtttatatatatgtttgtaatatatgtttgttttctttgtatatttataaccatatttcttgaatatgttatatatatatatatgtatgtgtatatttttaactatatatccagaaatacctgttctagtatcataggaagcagaatacaaatatttgttaaataaaatagatcatttcacttgtacaaacaattctgttgactttaccaaaagtgaattaattacatcaggcttcagagtagtataattagcagttataaagtaagagtgaaaaaagtctgccctttaaattgtccatttattgtggcaagaaaataaaattaaaaatctgtattttccaccttctctcaaattataggtctagtaacatcaaagtacaaatttcttatagaagtgataagcttacagaatggataaaatactttatccttttatatttaactcgtgtttgaagtttccgtcagtaggagaattacagtgaacttgttttcagacatttagaagacatttagaagtttttgagtcatgccttgaatgaattattgctattctcctggtgaacattattgcttagtgtcttatcattaccaatttattactggtattagggaagcatgtcaaaatgcacactagtaatttttaagcctctaatggccattaagaaggaaaaaagagaagtgtttattctttttgataagcaataaaattgtcatgatggtttactaacttggatgagttaaaaacttggagaaaattactgatttatgtttatgattcatgtgttcacctgacagaatgcatctggttatttggacagctattggattagtgtatactgtttaactgatgtctatttgaatacttaacattatgaaaaaaatgttttattagttttgggatgtaaaataatattgttgacatactataaactagtcatagttacagagattaaacacaagaaataaaactccattttgtttatgagacttgaggtttctgcttggattcattcactggaattcaggtttctgctcagatttgtaaagagcttagaattcatcactcctgtcctcacaataggaaaaaagctaaacaaactgaaaatcaataactcctcttagctttatcagagaattgctataacagagcacrtttaacagtgatgccctgaaacctggagagagaggcaaatagagaatcacagcttacgggagcagaagtcagtggagccacgtaaaccctaattgatgaactgctggagacagtgtgtggactagcttgaaagttaaaaactccttgggtgtccagtcttagattcttctcaccctctgcttttgtgatttttattacctctaggatgcccaccagtttttcacagtaaagacagagaaaaattcacttctgcttctagcaggaggaggaaagaagcagccattttgaaatacacccagatagaaagtaaccatattgaaatatgcccagagcattctgttctccacctgccctcaagggaaactacttcaccagagcctaacctacttgggagaggaaaaatcctcaacttgaagcccctctagacttcctgtctcacctaagcagagccagggggacagagaagcatttgtgaaggtcatagcctggggacacactcagtgaaagactgaaacctaatcttaggactatagggcactcccccccagcaacccctcaaatacacacacacaccctgccttcccccaccacatcagcagggctcctgtataatactaagatttcagctgaaagaactgcaaggctcagactgtaagaagagatttctagggaaaaccaaagacaacagaggataaaaaaatgatactagaggaaattgaagactcagacacctataacaacaccaaattataagcacagcataatgcctagcatgataaaaataaacccttacagtaaaggcctattcaacctgagttcctattacccaatataccatttctagctttcaacaaaaaattacaagccatgctaaaaggcaaggaaaaaacacaatttgaagagrtacatcaagcaacagaaccacactcatgaggcagagatttcacaattatcagactgggagttaaaattaactgtcattaatatgccaaagtctctaatgaaaaaaagcgtacagcatgcgagaacaaatggataatataggcagggatattaaaactattaagaattgaaaagaaatgctaggattcaaaagcactgtgacaaaaacgaagaatgcctttggtgagctaaccagtaccagtagactggtgaccaatagacagccaaggaaagaatcagtgaactggaagacttgtcagtaaaacttcccaaactgaaatgcaaagagaaaatagaatgaaaaaaaaaatccagaatagcccaggactgtaggacagtgacaaaaggtgtagcatatgcataatgggaacaccagaaagacaagagaaagaagcagaagaaatatttgaagtaataatagttgagaattttttaaagttaaggacagatccctttctttgtaatgatcgtggctcgatacttcgtatttagctgctactaaaagggaggaaaagcaaaaatgaggcataatgacaagtgcttaaaactaatacataatagctggtgggttgatctgtgtgtactgtgytaattgaaactttgattaatttttttgctgttatctgtagcctcatatcctaccaccatttaatagagcctgatctaaatattctcatattgatgttcctctgaatttagccagctgatacagaatatattattatgtcatggcacagacgaagtggaaaatttttaacagtaataagattttcaggrccaaaatccacctttcattctatgtatagccacarcatattcaaacttgaaacagtaatttttaagcagggaaaacttaaatttgtaatataataggaagaatagtattaattgtactatcacaaacagatcacataactaagaatggattatatgtaactctttaattaacagcattctgaatattttctgataacttgttataaagctartttgtctttttcttaataaaaattagtttaaaaaattgtaagtaagtgtatagccttctcccctgacttccctttaccttatttgagaatcattgaactagttaaaatcatttatktctataggaaatgataggttgtcaggatgaggaaactgacacacaagaaaatgactcattcaagaacctaaaaatttaaagtcacagttttagatttcaagttgtctgaccctttatctggtactctaacaactaagcagcatgttgtgctcagcttttctgcagcatttgttaacctactgttttgttttctcagtttttaaggccaatctagtttctatcacttgattgtgagacagtatgtaaaaggctgcattttctttcactttaacagaaaagtagcagctctgaatccttaagtgacaaaggctctgaattgaagaaaagctttgatgctgtggtattcgatgttcttaaggttacaccagaagaatatgcggtaagcctcctacctctgtcttctccggttttgcacataatttacatattggtgctattgagttagaatttgtaggtccagcaaaagagacagcttttagaaacctggatatgggaattattggggaaaatagtacagctgtggagcaaacagagggatgaagtgggaaaagtaagaaaagctgtacatttttttttagggcaactttataagttacacttcaatttggtaagtagcaatatgtatttaccattatggtaattgctgtcatccctctataccatttctctaagccaactgtattttgttgacatatctaagaaacattttcactggtttttttaattaaaaaattgaaaaatgaaatatgaaggtgttattagatgaaaggtatctagaaaaacatttatttcttaatataaatttatttgttttctcattctcctttaatttgttaacagaatatattgatttcctaatgttaaaccattcctgcattccagagataaactgtgcttggtcatagcatattattccttgatagtgttgacttttgtcttatatctatagccataagtgggataggtccatagcatataaagctcttagatataatgttggctttagtgtagtttcattatttttttataagttaggaagaaaacctttttagtaatatctgattttataccactgtttgaggagctgtaatcatcataacaagaacactgctatgtgaactaataaatctggtttttattttttgattataatttaatgtgactgtccaaatttttaaaattatttttattttttaactttacacaatttatcttccaagaaaatataaatagacatgagatcattagaaataattctatttaatggtacaggggctaaattttgttttccataagcccttataaaattgagtatttggtaatattttagtatagaatataattttaatttaggttacatgttatggtatagaattccaaagaagaaattgtcatttttactttatatttcagggtcagataacattaatggatgttccagtatttaaagctattcaaccagatgtaagtagttttgagaatgttccttttaaatatagaaaacgatcaatctcaaattaagtgttttagaaatgtcaaattatacttcatattaattttaaaatgtttgaagcttgtgttgtaacttatctacatactgtttgggcctcagaaacccacgtggcattcatagcaatacattattgagtcatagataggactatacttgacatctgaacaaagcggaggttaggagcattgacacttgctcagtgaaaactctttctataacttttgattccctgcaaacttaacttcaaatagcctgatgttgaccaaaagccttactggtaacataaacaatcaactaacacatattttgtatgttatatgtattttgtactcggttcttacaataaactagagaaaaaatgttactaagaaaatcataaggaagagaaacaatatttactattcattcaggggaagcggatcatcataaaggtctttatcctcattagcctcacatcgagtagactgaggaagaagggagatttgttctgctatctcaagggtggtagaggtggaagaaaatccgtgtataagtagacccatgtgttgtttacaggtcagctgtatttgaatcattttgattgatttggctgcattacttactggaggaaatagacttagggaagttgaatgatttacctattgctttgaagctttttaatgggaagatggaaatttgaaactgggtttcaccactaactctagtaatcttttcccttatatctttattttatgacttaataatatgactgcgttgacattttggagaggagagaaaggatcaagaaacacatcatttgtttctaatgaaaacaaagggactggcgttatgcatctatccactataagcatgggggtgtgtgtgtgtatagtgttcctatcattttaacatcctgagtatgatagtatctctgttttactgatgaggaaacagtgacaattgtctttggtacacaactaagtggtggaactgggtttcagactctaaaatctgattttttttaacctctcatctagtatatcaatgtgattttgtattccaaaacaaagtcattgataatcctgaaattcaatactacaaaatagatacaattttagttctttcgggaacaaaatatagtgtattcattgtgctatatacaagtctgtagtggccctgaacactgtaatgactatgagtttccatttatgtcctacatgatgtaggtagtattagtcctgtgattttcaagtaagttacttcctgtcttagtatctcaaattcgatacctataaatgaaggggtgggccgaaatgatcgtcagttcccatcatttccacaattctgtgttttcctaacttttcccccatacctcagagggctctctaagtagaaccattggattagcaatagaagaagaacaatgtattctataaataaagcacaagaagaaaatggcttttgtatttaaatggcaaaaagaaaaaaccagaaatacttatttcttctcctccctgaaaaaaaaaatcaaaaaaatgaaattctttatgcaaattacgtttttgacctaaaattcacctgtcttcttcttaggtgtattttttccttttgaatgaactgcaacagttgtattgctgctttatatgagatcagtgctgtctagcagaaatatagtataagccatttatataactttgttttctggtagccacattataaggtaaaaagaaagatgaaattgattttaatgattttatgtaacctgctacatacaaaatattatcrtttcaacttgtaatcagtgtaaaaaattattgagatatcttacattcttttttctccgctaagccttcaaatccaacatatacaacaattgcagtacatctttatttggagtagctatatttcaagtgcttagtagccattggtggctaggagcttggatattgaagatccagataatactacttgaagacatagacttcacatctatgggaawtttttattcccttggggcatctgatagtactttgtgaaacttagaaataaaccttaaaattcccttgacctttactccatttatctaatccctttgatttttttaacctcctaagtaccttatctatccagtctatctctactcccaacaccccaatgtaaaatactgtcttctctcaagtgaattattgcagtgacctcttacttcatctacctgcatttactttgacccctctaaatgcttttttacccagtagccatggtaatcttttcaacatctgttggatctgttcatgtgatcgctctgcttaaaacacttcattggcttcctgttgctctgaggataaagaaccatcttaatatggtctacagatctcttcacagttttacctttttctaccttctgcaaccccatcttacatctttcctgtctttctggtctaagatatactagccttcctttagcccctctcaccactgagcctgtgcacatcctaattaacttctactcatctttcagttctcagctctagtttgactttctcaggtaagctttttttgtctttctacagggtcacctagcactctatactttttcactggactcgtcaattgcaattttacatttgtgttgtgattcaacaaatatttactggatgcctattgtatgcctattttatgcaatttaaaacatctagtttagttgctgaaggtatagcagtaagccaacactaaaattcctgccctcatggatctgatatttgggtgaggttagctatagagtgtcatgaaaaacataaagcagagagaagagaataggaagtgtgagggtagtgggagttgcaactttagataggatgatcaggaagaccttactgagaagatgacatctgcattaaggcctaaaggaggtgagtgagagagcaagccatatgagtgtttggggaaatagtattccaggcaaagggaaagtcggggcaaaggccagtgagctacagtgagtgagcaagggagggaatgtactagaagatgagaggtagggtgagggctagatggtgtggggccattgtgaaaaagatgggaagccattagagggttgtgagcagagaagtgacattttccgcgttaggttttaagtcgctcttttnnnnnnnnnnnnnnnnnnnnnnnnnnnnnnnnnnnnnnnnnnnnnnnnnnnnnnnnnnnnnnnnnnnnnnnnnnnnnntcgctcttttttttctcttctcttcttttctttctttcttttcttttcttttcttttggttactttctttctttctttacttttcttttcttttcttttctttctttctttcctttctttcttcttcttttttctttttttttgacaatcttgctctgtcacccaggctggaatgcaatgcagtggtgtgatctcaacttactgcaacctccgcctcccgggttcaagtgattatcctacctcagcctccctagtagctaggcctccaggtgcatgccaccacgcctcgctaatttttgtatttttagtagagacagggtttcactatgttggccaggcttgtctcaaactcctggcctcaagtgatccacccgccttggcctccccaaatgctgggtttacaggcgtgagccactgtgcccggccttaagcagctctttgatactgctgactaggatatgtggcaaagagcataggggaagaagaggtggtaccaaggactgaatcaaggagaccacgtgagagatgaaggtggcttagatcagggtgggaatggaagagataaatgagaagttgccagacattgtatgtgaaacaagagtagaggatgacaccaaggtttttggcctgaagccagatgcatgtagttgatattctctgggatgaaaaattattattgttgtcgtatacaactcctggggctgctattcatataaaatataatgcacaatgcacccttgtggagaaaggctagaggaacagattttgcaggagtttggctttggacatacttattttgacatgcctgttagacagccaaggagaatgttgagtttgggaatgtatactggcatatatttccagtccagtctagaaataataagtttaggagatgtcagtgtagaggtggtatttaaaagtgtgggtgagattatcaagagagtgaatacaggtacttgatttgcttgcctctccaccagattttaagctacatgagggcagagactgacaatttttgcttaccattttatctgactggcacatagtggaagctcaatatttagaatgagaggttgaacatagtatttagtaaatgtctgcccaatgagagagtgtttttaaaaattgacaacagtaactattggaagaaatgatgtagcaccaaaatacttttagcttttttttggagacagggtctggctctgttccccaggttgtagtgcagcggcgcaatgacggctcactgcagccaggacctcccaggcccaaatgatcctcccacctcagcctcccaagtagctgggaccatacacatgtgccaccatgcctggctaattttttattttatttttttagagacagggtctcgttgtgctgtccaggctggtctcaaactccaaggctcgagtgatccttctgccttggcctgccaaagtgctgggttacaggtgtgagccactgcgcccagccaatatattcttaatgtattagtctcgtgtgaacactaagagtgtattaaatctggccagtataaaaaggcctttgttatctggcagaaaaatgtttttaaaatttagtatgatatattaaagacatataacaaagcatagtaaataataagataaattcctgtgtatctaaccagtactgagaaaggctttctgcattctgccaccaaggtaatcaccatccagtattggtctgtatcattcctgtctatttagttatattttttctttatgtataggtatcccttaacgcatgctattgcagtttcaaatattttatgtagatggtgttctgttgtttcggtctttttagcatgcttttgatgttcttgtcttcgtagcatgcttttgatgttcaacattgttgactagcatctgtgttgatatatacactttaatgcattgatcactggattatagagcatctttaaatttttaatcaactattgctaatttgttttccaaaatgattgtacagatattgtttattatgtcaaaactcttgctactgataagttaaaaatagattgtttaacctatgatggcagccagtttagtgtattaatctttattaacataaaatgatgtctctttatatagtatacattagaatattaccttcactggaggataaaggaattcttattgttaaatcaaaattaaacctcagatattatgaaaagatattggttataactgagtctataactagtaaattaattttatgtttgtgtccattatatcaatattcaggtctctacttcatatataattgtatattaaaagtatacatatactttataaaactgtttaaaagatcttcagtgtattttgtttttgtttgttttttgagacagagtctcactgtattgcccaggctggattgcagtggcatgatcacggcccactgcatccttgatctcctgggcttaagtggttttcccacctcagcctgccaagtatctaagactaaaggcatacaccaccacacctgcctaattttttttttttttttttttggatagagacaaggtcttactacgttgcccaggctggtcttgaatgcctgggctcaagcgatcccccggcctcggcttcccaaagtgctgggatcagtgtgagccagcacaccaggctgaaaactatttaaatcaatgctcatttttgtgtttccacatgtaacattattttaggtgatggtttatttatattaaaatatgaactaaatttcaattttgaagaatatagattctgaatccaactgtgtggtatagtgattttagttgcagattggtgattgaaccacgcaagtctcagctttcaataatgtagacagtttctgagttacgtataatatatatctcccactcctgatttaatttcctaagtaggacctggtaattcttactagtttatggaattctgcattttcaactctcgtatgtcaaacagaatttagctaaacgtgttctacctaaactcgttcttgacttggaggaagaaactatagggcaattataagaggtacagttgtttgctcagaaataaagctgcttacctacaatgtctgttgtactatatatctcagaattgctcgggggaaaaaaagaaaaattccaagtcttttatttcactgtagaaactgtcttatctctgaagtgttaaaaattatttttctttgtacaaagattgtccttggtcattgataaaatactggataagtaaaatcacatctttaaaagcagatctgaagcaaacataatgctaagcctggtttttctccaattctgtaacacacttgaaattacttcagattgaagaacaagaaaacaggttttggtactttattttctagttttttgtgtaatgatagagaagacaggcaaatatgtttaccaaagaaaagaattcaccattaaacttcaccagtcattttaaaaactacttagtaggaatctaattacatagaaaaaaagttcactcatattttgttaagttttttaaggttctctgagtgctctgaaccatccatttttaatacaattgagaaaccaaaaattcagcctttccacttctttctctgtccttcttctgttctccagtatctcccattgacgttacctcctaaattttctccccttcttttctcctgtcaactctgaagcatatttattgaaagaataaaatgctattacacggctgcagctcattggctctagaaataggagtattctttagtgtctgtctgtggttgttgggactgagattggtcacagctcagtcagttatatatatcctgacagctccctctccacccctggcctcagtactgtgccctggtgtttccatactggtgctgcagaaatcctaagatgttccatttgtccattggcccaagctgcgtgaccaaatttggatacttctatggatagtgatccctttcacacaaaaccttggtttttactgttcccccttcctcttgatatgtagtctcttagtggtggggagaaaatacaataacatggttgtaactgtaaactgtaattacagtgattataaagaagggggaaagttccatcatctatattcaaccactattaatatacccttgcaactcttactttcacacagttgctctctcactttccgtcttttcttttttagtttaaagcagttttgaagacaaattgccatatattttgctgctgcccctccccctttgtaaaatcagggtccaacacacagcagtctgaatgggtgctcaataaatccttaattacttaatttcacttactttaaaatttatttaaaagccctttgaattacagaagataattttttagcggccaaaccataagagcaaggagccagaagacttgtatttttgtttcagctttgctatttataaattgtgctgctaatacaatctgtttcttgtctttggccttgaaattttttttaaatctaaataaagggtatttagactggttgatctttaaaatactttatagatttctgagaaattcctggaagtgggtaatttcagagttgagctgcagttagtagttataaggctttaataaataagaatttcgatcaaaaccacaggggtcttttttttttttttttttttaagaaatggggtctcgcagtgttgcccagactggtcttgaactcctgggctcaagtgatcctcccacctcagcctcccaaagtgctgggattacagacatcagccaccatgcccagcccgggagtcttaataggtgataaagtctggggggctgtcacaagtcaagcacgtacagattggggtctgtcatcccatttcgagaatataaattccatgtgggcaggaatctttgttccattcactggtatctctagcaccttagaataataccttctcacctgtttactattagagattgataaatgaccatttcaaaacttcatactgtatagcctgtatgcatatgatctcccattgtttatcattttggagtcrtttttgcagaagtgttatccacccaatgtgacttttgtaaaatagcatcctttctacagaaacaggagttttttccttcccataatttaggctatattttcaggtttcttccctagtatgaattttccaatgctgagaagggcagaagttttgccaaaggattctgtagtttcattaatttctagtaatgatttttggtattcagtcaaagctcagcacttattaaagttttcccatatttcttatatacatagttctcctcaatatgatttctcttttgatcatgaaggtttgttttcttttcccttccctttcccttctttcccttttctttttttgagacatgatctcacactgttgcccaggctggggagcagtgatgtgatctcggttcactgcaacctctgcttcctgggttcaagtgattctcatgcttcagcctccagagtagctgggactacaggcgcatgccaccacacccagctaatttttgtattttttggtagagacagggtttcaccatgttggccaggctgggctcaaactcctgacctaaagtgagctgccttggcctcccaaagtgctgggattacaggtgtgagccaccacacctggcttagattgttttcttttagaaggctcttacacatttatttatagggcttctctccagtgtgagttctttcatgttgcagaagcttgactgtattctgaaggtttttccatgttattacatttagaggatttttgttttagatttttgtctattataaattatcggatgttctataaagcttgtatttcttcagaaggcattgctacattgattacactaatagggtttctcttcagaatgaactttctgttactaagcacaaggtgagttatgacaaaaaggtggtttgcagtgcggttttctttccagtagcaattctctggtgcttttaataagccttaagtaggggatcaactgtgcttgaaatttgtgctgtagttattacattggatactgtttgcctcttttatgagggtctcaagtattcataaagtgacaggatatatctgaaagtctgacatatagagcattcaaagaatgttttaggctgggcgtggtggctaacgcctgtaatctcagcacattggaaggctgagccaggtggatcacttgaggctaggagttcaagaccagcctggccaacatggaaaaaccccatctctactaaaaatacaaaaattagccaagcatggtggtgcatgcctgtaattccagctactcgggaggctgatacacaagaatcgcttgaaccagggaggcagaggttgcagtgagccgagattgcgccactgcactccagcctgggtgatggagtgagactctgtctcaaaaaaaaaaaagcaaagaagaaagttttatactctatttatcctcgtagatcaatacattaagtcagacatttagattatatcaacaaacagatattaaattcaaaaaataataagcccctctatataactgggatcactaggatttactagggatcaaggaagaatgttggttaaatgagggaaagtatgtaatagataattctgaatcttattaattaaaatatttcttgtttgtttgtttgttttttgagacaaagtcttactctgttgcccaggctagagtgcagtggtgcgatcttgtctcactgcaacctctgcctcccgggttcaagtggttcttctgcctcagcctcctgagtagctgggataacaggtgtgctaccaccacacctggctaatttttgtatttttagtagagatggggtttcaccatgttggccaggcttgtctcgaacacctgacctaaggtgatccacccacctcagcctcccaaagtgctggattacaggtgtagccaccacacctggactgtatcttattaaaatatttctgaaaaatttaacaattgagatatttccgacagtatatagaaaaagcttctctgtgcaaaccttctagtgtatgtcaagataatataatcttggaaacatccaaagttccagcatcaggaatatcataattctatccttgttttaatgaaaattaatcatttgccttaaaattaaaatataaacaattaataaatataatgagagatttgaagaaagcaaagaagacttgtagacttgaaattgttctgctatacagaccagaataaaccaattgctgtgttagaagcgagttgccgctgttttgtcagtttgtattactgctgttcatcactgtgaacttctttaatatataataagataaggcttagattaggattaaggaaggtagagaagaaaagtgttgtttggtagtgtaggtgtatatgacatcagagataggaaaagaaagctcctgcctgtatctgtgatctcattatacggacagctttaacatattgggaggaaggaagagaaaagaggatgtgagtacattagaaaatagaagggtttatatatatatatcttaatacctaggagttagttttaaagtttatattgtgggttaagatataggaatagtagtgagcacttcatgtgtgactgagacttctttgtagataaccatattaggctgaatgctaatggatatgccgtattcctctaaagctgtcctcttttgagcacagagatgtctcagcaataattatcttctctttgttaggatctcccagccccattgccctctccctgcttccagtcatttacagattccatcgctttttcttttcttccctcagtctcttatctacatactagtctatattggctttttctctcttctatctgtaggtatccctacagcatcacccttagaacattccttttaagagtattggaacctacaagatgaaatttagatcaagaatttctttgcagaacaaacctacaagatataaggaagctctgacttctgtgaattcagtaattctttcatagggtaggtggtcatcagttgtgggattttgccctccctgtgcttccaaaataaatgcaagtgaaaattgggcttagtagtttcatagtttaaaattaatcaatgaatattctttcaaatacacttataatgactgttaagaaattgcctttatatatgatttactatttgaagatttctctttactacgtgattttaaaattgcaagttaaatccattgtaacaaattttaaggggtatcaaggctgctaaatttcatttagcctttgctaaaatggaggcttatttacatagtatactcaaaacagttttattcctaagtcatacccttgaaaaaagcatcctttgagttgttgagtttacttcaaccttttgatgttcatatgagatattttagtatagactaattcttgaccaggctgaactgtcaatatgcaagatggcatctgtggcataatttatttcctggattgtattctagtgtgacttggaggaagatcttagaatctgaaacagaaagagatagagacaaagggaaaagcaatttttttttttttaatcacagagaaatttagcagctcttgagaggtagaggtggggcagggcaaaattcctttaatgccaggtaaccataaatgcatgtcaaagtttaagaagaaatagtgggttagttcttgggagtcccggtgcaattttagcttcataattcattatgtagttttgtttttattgctgttttttaactttttattttgacataatagattcacaggaagttgcaacaaaatagtacagagataattagaggcccataggcagttataaaagtagtccagaaaagtcccatttacttactcttcattcagttttcctcagcagttacatcttacataactatagtacaatatcaaaaccaagaaattgatatttttataatacgtgtctgtataaatctgtgatttttgtcatatatgtagatttatctaaccactrcctcagtcaagattcagaactattgcatcaccacaaagatctctccctgtgctacctctttatagtcacacccatcgcattactcctctcctactcctcaccagccttaaccctggcagccacaaatctgttcttcatcttgttgaactgtgagaatccactcatacacatatttttttcaataaatattttggaaattttgtcttgaagatttccaacaatttgtaaaaaaaaaaaaaaaaaaaaccacatagcttagaaatataaaaaaaaattaagaaaaagggatggcgtgaatgtataaaatatatgtagatactagtctattttgtcttttactaccatgagatatatccaaatgtattaagaaaagttaatatttatcaagacttatgcacacaaagaccttgtgttctgccatatgcggtcaagagaactattaagaaacataaagatgcagtattaagtcataactgcataaaattaactgtagtgcataccattctattgtagtaattttgtaaccacctcgcgttgctattacagtgagctcaagtgttgagagtatctgctgaaaatgatgatgctaatcagttatctccacatgagcagttcctgtctccagtaaattgtgttatgacgttaaaatgtgatctctcactgtgtttagtgcaatatcctaaccttgaataataccatgagacccataagaaataccattagtggtggtggaagtgcttctaagaagcagagaaaagttacgacattacaggaacaggttgaattgcttgaaatgtaccacagattaaggtctgcagctgcagttgtctgccatttcaagataaatgaatccagtgtaaggagcattgtgtttcgttttttttttaaaaaggaaatttgtgaagtcatcacttttcatacaccagcaggtatggaaaccccacacgttttgtgaaatattgtgtcttttatcttgtattgaaaatgcagctttttaaatgggtccaggatttctataagaaagtatacccatagcctcaaatattattcaagaaaaagcaaactcattatatgacaacttaaaaggaaggtgaagtatctaaagctggagaatttaatgccagcaaaggatggtttgataattttagaaagaagttttgcttaaaaattgtcaggataacaggagaagcagcttctgcctaccaagcagcagcagacaggctcccagacaccattgagaaaatcattgaggagaatgggtatctgcttgaacaagttgctgttgttgttgttgttttgagacggagtcttgctctgtcacccaagctagagtgcagtggcgcgatctccgctcaccacaacctccacctcctgggttcaagtgattctcctgcctcagactcctgagtagcttggattacaggcacatgccaccatgcctggctaattttttgtatttttagtagagatggggtttcaccgtgttggccaggctggtcttgaactcctgacctcatgatccgtctgcctcggcttcccaaagtgctgggattacaggccactgcacccagtctgaacaagtttttaatacagatgaaagtgtcctactctggraaaaaaaaatgccacaaaggacatatattagcaaggaagagaggcaagcaccacaatttaaggcagatggggataggctaactctactgttttgtgcaattgcggttgggtttatgatcaggactgcccttacctataaagctgctaaaccctgagtcttgaagggaaaaggtaaacaccagctgcccgtctttggatgtaaaataataaagcctggaaaatgagaaccccttttctggattggttccattgatgctttgtctctgaagccaggaagaaccctgctaataagggactgcctcgtaaagttcttttgattctgagcaatgcgcctggccacccagagccccgtgtgttcaacaccaaaggctcattacactcagtactttatgaaaaggattgtcggtgatatataagaacccttatatagaacatcatcaaagtctaaaagaattgcactattgaagatgccatcattgttaaagaaaaagccatgaaagccatcaagcccaaaacaataaatttcagctggagaaaactgtgtccagatgttacacgtgaattcacaggttttatgacagagccaaccaaggaaatcatgaaaaagattgtggatatggcaaaaaaagttagggagctaagagtttcaagatacggatcttggagaaattcaagagctaataaacaccacaccagaggaattaacaaaagatgacttgatggagatgaacgcttctgagccagtgccagatgatgaggaagaagatgtagaaaaagcagcaccagaaaacaaattgacattagacagtccagcagaagagttctagtgattcaagactgcatttgacttcttttacaacatggaccgttctatgatacaggcattgaaactaaaggaaactacggaagaaagattggtaccatatggaaacatctttagagaaatggaaaaagcaaaaaaagtcagacctaaattacatatgtttttgtaaagttacaccaagtgtgcctgcctttctggccttcttttcacctctgccaccactgagacaacaagaccaaccccttcagcctatacaccatgaagatgcaaggatgaagaccttaatgatgatccacttccacttaacgaatagtaaattctcttccttatgattttcttaatgacattttattttctctagcttactttactgtaagaatatagtgtattatacatatcacatacaaaatacatgttaatcacctgttgatgttatgagtaaggctggtcagcagtaggctattagtggttttgggggagtcaaaggttatatgtgcataattttaaaagttagatgtgggttttcaactgttcggagggtcagtgcccctaacccctgagttgtttaagggtcaactgtatttactactctttctatatatggttgacttaatttccccaactttgagacgaaagatgtttgatgtgaagtagagagaaaataagggtggagagagggctgtgaatcacctataaaccccaaagaaaacctatgtaaacatattcccaatctttttttttttttttgagacagaagtctcgctctgttgcccaggctggagcgcagtggcgtgatctcagctcactgcaaactccacctcctgggttcaagttattctcctgcctcagcctcccaagtagctgggattacaggcatatgccaccacgcctggctaatttttgtatttttagtagagagggatttcaccatattggtcaggctggtcttgaactcctgacctcaggtgatccacctgcctcggcctcccaaagtgttaggattacaggtgtgagccactatgcccagccttcccaatcttctttatgtgcatatgtgggtctcttttttgttcatttgtttaaggtagccaatagctatactttgctgtgtaatttaatctactgtgttttaaaagtctttcccatcctgaaaacagatgtcttaatagtagcaataataataataatactaacactaatacagagattattatgtgccagtctaaaggctttatacatatcaacccatttgatcctgtttcatcattataatttatcgtgataaataaggaagccagacaaaagtatggtggattgtggcttcatttttacattaaaaaaattttttaatacttttctgactcctcaaataaatgccaagaggttttggaaagtccgtccaattcttagaacatttctgcatcattaatttaatggaaaaaatgctttgtcacttgaggaaaactgttggaaggtgactgaaaggaaatcatgaaagagattgtggatatggcaaaaaaggtagggagctaagagtttcgagatatggatcttggagaaattcaagagctaataaacaccacaccagaggaattaacaaaaggtgacttgatgggtagaagggagggagggagggagggagaggtgtgtagtcacattctttggaagcagctgggttaaaattccgtttgaagccctccattctaaagaagcttataattagaaaacaagagaaaatgtttttgaacctcataagatggtagtttctgtatcagaaaacatttcccccatgaaacagtgttacatcactagcctatctcatacaacaataatcagaactacactttacccttgaatgtctctggagttagaaacaccaggctcccagaagtcgaaaatttgcaggtaaaactcaactactcatagcctaccattgactggaagccttattgataacataaacagtcgattaacacatagtttgtatgttatatatattatataatatattcttaaagtaagctagaaaaaagaaaatgttattaggaaaaatacatttacagtactgtattgtacatcataagtttacatagtctgtttataagatatattgactgaaatggcagcaggacctcagtctatggtacatatcaagcaatgcaacttgttcttgaaatgtcatgacttttctttgcttcttaggagcacttccagcatctctagtggtgcttcttatgggtcccatggtgttattcaaggtttaggatattgcactaaacacgatgaaaaataacgtgagaaccgtgagaaatcacattttactgtgataatacaatttactggagataggaactgctcatgtggagataagtagtgtcatcacagggtgttttaagggaatactctctacacttaaactcactgtaagagcaacacgaggtgggtacaaaattattatagtagaacagtatgtactatggttaattttatgcagttatgatttaatattgcacctttatgtttgttacatttctctggactgcatatggcagcatgtaaggtctgttggtgtgcataaattttgataaatgttaacttttttaaatacatttgtgtgtattttatggtagtaaatgataaaatagactagtattttatacattcacgccatccctagctttttcttaatttttcgatactccaagccatgtggtttgtctgcaagttttttcaaattgttgcaaatcttcaagacaaaatttccaaaatattttttgaaaaaaatctgtgtatgagtggacccacacagttcaaacccatgttgttcaagggtcaactatgtacctcattttgataagagtgttgtgaaacttacattcatttctcgtgggagtgtaaatgattcagtatttcaggagggcagtttgacaggtagcagagccttgaaaaggttcatactctttgacctcgtgatttcttgtaggactatatttttaagaaataatcagaaatgtcagaagaggtgcaaggatattcattatttgtaattatagcattacttaacaataggaaaatgaaatcagccttttgtgtaaaggtctataatggagtttgacttctttgtcaaatggctactttgagtggtttgataagtttaatttgatagacactttgattatagcattaatataagttttgtaattatagtaattggctaaaaacgaattcagttacttagggatttaatcttaggaattttatcctaaaatatgacatctttatgtagttgtgtatgtatgctgtgattttggaaagaacaaaaatgtttctagcagtttgatgttttcagtatcattgtcataatatttttgtgtgaatataatttttactactaaatgttttctttttttacagggagataatataaaatgatcatatagctaggctaattgaatatccagaaatttttatttttgctatagaattgctttttatcatttcattatttctttcagaaatttcaagcttgaaagatatgatctaattttagatttaaaaaggcagtttttatctccacagcattcactccttatctactgtgtagaaataattgtcatctctcccctcagtattccctatctcagttgctcaaagcagaaacctggaatcttagtacttctgcagacttcgtttttagcttacatcacatgagtccaattcttgatgaagtcctgtctgcctccagagtatcttgagtctatcgtatccatatccactgacagtgccctggttgagggaacattacttttttcttgaaggactatagtatcatcttaactgtttcctcaatcttcccctgactcaatctattcctttttttttttttggtttctaatttaatttaagattttattgaagttttgcatgtatcatgtttaagaagtcaaatatttgcataagagaacaaaatatagcaaaatcctaactcagttattcgcatctttccaacctcgatcctggagctccactcccacccagatctcttagctggttcttcttttttttttttttttaattaattgatttatttattattatactttaagttttagggtacatgtgcacattgtgcaggttagttacatatgtatacatgtgccatgctggtgtgctgcacccactaactcgtcatctagcattaggtatannnnnnnnnnnnnnnnnnnnnnnnnnnnnnnnnnnnnnnnnnnnnnnnnnnnnnnnnnnnnnnnnnnnnnnnnnnnnnnnnnnnnnnnnnnnnnnnnnnatagtttactgagaatgatgatttccaatttcatccatgtccctacagaggacatgaactcatcattttttatggctgcatagtattccatggtgtatatgtgccacattttcttaatccagtctatcattgttggacatttgggttggttccaagtctttgctattgtgaataatgccgcaataaacatacgtgtgcatgtgtctttatagcagcatgatttatagtcctttgggtatatacccagtaatgggatggctgggtcaaatggtatttctagttctagatccctgaggaatcgccacactgacttccacaatggttgaactagtttacagtcccaccaacagtgtaaaagtgttcctatttctccacatcctctccagcacctgttgtttcctgactttttaatgattgccattctaactggtgtgagatggtatctcattgtggttttgatttgcatttctctgatggccagtggtgatgagcattttttcatgtgttttttggctgcataaatgtcttcttttgagaagtgtctgttcatgtccttcacccattttttgatggggttgtttgtttttttcttgtaaatttgtttgagttcattgtagattctggatattagccctttgtcagatgagtaggttgcaaaaattttctcccattttgtaggttgcctgttcactctgatggtagtttcttttggtgtgcagaagctctttggtttaattagatcccatttgtcaattttggcttttgttgccattgcttttggtgttttagacatgaagtccttgcccatgcctatgtcctgaatggtaatgcctgggttttcttctagggtttttatggttttaggtctaacgtttaagtctttaatccatcttgaattgatttttgtataaggtgtaaggaagggatccagtttcagctttctacatatggctagccagttttcccagcaccatttattaaatagggaatcctttccccattgcttgtttttctcaggtttgtcaaagatcagatagttggctagctgtttcttctttgaggaatttatgtctgtttttcacataatatatctaaatccttacttttccttgatttttctattttaagtatgatatgttaactctttactatagaagatgatttcactgtcttatattctctccccccatttatataattcatttctccttcttttgcacatacagttatatcacaattttgactaagtaactatattttttacaatcgaactgtacttaagttttgttttctttgagctaaaatgtactttagttttctttgtatccatcactaaatttctgccagaagtgaatgtactgaatgtctcttcttaatatttccaaacacataaggaattttttttttcactttcagaaacagatgtctgttggaatttctgtcctcttgctcctttcttgactcttgttcttaaaggtctgctcatagctttgccccaggatctcccattgctgttaatcagaggattcccaatatatatatattttttttctatattggcttttcagtttcctgggtctcatatcttcctttttctttgtttgctagtttgttttgataaagcacatactctactagttctcagagagtaggtacatagaagacaaattctctgagatgttcatgtctgaaaatgtctgtagtctactttcagacttcattgatatttgtgttggatatagaattctagaaaattgaattcttcaaaattgaaggcattgcttcagttgttttttaacttccagtgctgctattaagatatctgataccttctgatgcctgttttccatatgtgctgttttttgttgttgttttgtttttgaatctctgatcagttttctctgttccctcttaaaattactgttattcagatgttgactcttatggtcttcaaattagcataacaacattttactcctatcattaactttttgtttaaaagatttagtcacctttatttcacaactcttctactgactttcaaatttctcttatattttttatttctaaaagctctattttgttctctgaatatttctttttatatatcctcctgtttttgcttagtgggtacaatgtctttttctcatgtattaaaaaataataattatatggttttggcttctttttttctcagttttcttcgctccctgccctaactcgttctctgccctaactctatttcctcagttctttttctttttttgttgtggttctctctctccctggctattgttgtattacagaagtttgttaacctgtttcggaccttggactcgtccggcaggctgaagcctatggaatgctaacccttctttaaaaggaaatcagttctattaaaatatacttaacaaaatattttgtaaagctgttacacagcaatacatgtgcttctttgcccttaatgtattaaaatctagaggtcagtcttaaatactaccgtatctgggtgtgataattcatgcctgtaatcccagcactttgagaggctgaggcagtaggattgcttcagcaaaggacttcaagtccagtctggccaacatagcgagaccctgtctctacaaaaaatacaaacaaaattagccgaatgtggtggtacacacctgtagccccagctacttggaaggctgaggtggaagaattgcctgagacagggagataaagctgcagcgaactatgaccctaccagtatactccagcctgggcaacagaggaagaccctgtctcaaaaaaataaaataactaccataagtttgaagcagtgatgagtgtaaatgatatttttaaggtatctgcatcaactgtaatgtgatatgaaaatatcagtgattttgattggtaactacatcacatgtgttgccaatgccactgtaatctgtagcctacatttataactaaaaggactgtcttatttcagttagaggttagtgtaaaatgaaaattaattttttaatatacaagtttgtgggcattttgtattctgtcgacaggcactttttggggatcatgatcccttttattaaaggtttcttcaagtgtttggggtaattgactgttagctcaaagagtgagatactagaaagctgattgggagctctgggtgactgaatagtcttcactgtatgttgtgggatgctcatctttatctgtggatcttttcctcttgggattcaaatcttttcagaaaagaatccaccagtattctgcctgtggaatgtaaatttgcctatgttttcatagtcattgtgctctcttatgtcctgctaatcaaatttgcttttgtgatccaactgaatggatataatattatgtatgttcccattaaataaagtgattctagaaaagaacacaaactgtctttaatgttttgaaagccttaatctggcagaaaaaaactaggctattacttaaatttaattttcaccttaattttccaggagctttcaagttgtggatggaataaaaaagaaaaatatagttctgcaccaaatgcagttgccttcacaagaagattcaatcatgtgagtttataaattttgatactgtgtctgaaattcagttcctcaatatatactttttccttaagaaataatttaactttttacatcagttctggaatattttcagccagtatctctcaagtattgtctctgtgcatgatctctttttttctctgtaactcctattgaaaatttattggaacttgacattctttcctgcttgtctcttaaccttacatattttctctctgtttttgtcctccattctgagtgatttcctcagatctacatttcagttcactgattctcttcagatgtgttttatctgtttcaaatctctatgcttttacaccagtcatgctcttttcttatttttattttatttttmaaatttattaattttcaacatagtttctgtgttattattggaacttcttggggtactactactctatttctgctcattcttaaagtggttttttcaaagatatatagtgaattttgtatctttggcttgaaagctcgtgtctgtttaagctttattcatgagaattttgctgctgcctcaattgagggaatacattattctaagaggctttttgtttgcttttgctcatacgtagggttgtcgcagacctgggactgttttttatgtttattgttttgcttggggcatctttgtacttctctgtagtaaaaatttaaataccaaatccagttaaaggcagcctgtagttaacaaattcttcttttaaaattaaattaattttttctttttttagagacagggtctctgtcacccaagctggagtacagtgctgcagtcatagctcactgcaaccagtcctcctgactcagcctctcaggtagccaggactacaggcatgcaccaccacgccagactaatttaaaaagaatgttttgtggagatgaggtctcactatgttgcccaagctggtctcgaactcctggcctcaagcgatcctcctgcctcagcctcccaaggcactgtgattgtaagcatgagtcactcttctcagtctacaaattcttatgaaagagtttttcttttttctccttgaccacccagagcttacattattatagatgcacttgtatgttgtctccctttttcaagggagttgaaaaataagtgaattgttttagtctgccttttcactgagattgtagacctttgagtagcattagatagaaatggaggagcggagaggtgtgaggccttgtattatgtctttgaaggagcattaagtcccaagcccctaatgtcaccgagataggaaatcctccaagggcagttacagtacccactcttgtaaccactgctttgcttttatttccttatttgtttttgatctctagaggaaatcctttatttttcttccaattcagaaatacattaaaaaaaaacagtttgttatatgtaacccagcaattctaggggttgatagcaaaaatactttttcttgtgagtccagtaattttatgaaaccatgtcttggtgttggttattctgggtcagtgttcttaaatgtagttggctttaatggactgtcatttggggagcacgtacacttacccttccagtattggggtctcggggtggctggatttattacatagtagcttagggctctccaagagaatgttccagcaatcgaggcaggggctgcatggtcttttatgacctcgtcctggaagtcagtgtcactttcactaacactttcttcatcaaagcagtcacaagcctgcccagattcagtaagaagtgatatacgtcctaacttttgatagagagtgacaaagaatgtatgcttaaaatcaccacagcatttgtctaagccaggtgcagtggcaagtgcctgtagttccagctgctgggcggctgagacaggaggatcacttgagcccaagagttcaagaccagcttgggcaacatactaagaccttgtcttaaaaaaaaaaaaagtcacgttggccaggtgtagtggctcatgcctgtaatcccagcactttgggaggcagaggctggtggatcacctgagctcgggagtttgagaccagcttgggcaacgtggtgaaaccctgtctcaatttaaaaaaatacaaaaattagctgggcatggcagcttacacctgtggtctcagctacttaggaggctgagtcaggagaatcacttgagcctgggaggcagaggttgcagttagccgagatcaccccactacactccagcctgggcaacagaacaagactctgtctccaaaacaaaacaaatcaccataatatttgtattaaaatttgcctgatgttaaatttaattaagttggtgaacatgcactttagatttgaattcgtagttgatatttgctaaggttattgttaagatttccatagcataacttgattttttttttttttttaggagtaaaccttgttagaactggggaggattattacttttagtagcccaagtatagtaacaagtattaakgtgactttgtaaaatatgtatactttatatttacatatatatttgtaaaatatatgtaaaatacatacataatgacatttctttacagatgaaaattgcaagtaaaatctgaaatatttctsattaaaaatgtgaagaaatatgaggcagtggcattatttgttgcacaataattttgaactatattctgtatttagatttgtataagtgaaccaacttacagtgctttgactttttttcatagtacawgaattaaagtgtattacatggacatattgtatcatataataagcaaactattcagagtagagcattatcatattatatatctaatctgccttctaataaattagttttaattattttttaaatcaagatggttttatttgaaagcattacaaaatttttgaaatgcagttttaatcttagaatgttaacttagatatatatttttttcttttgatattttatttacaccaagaaaaccctacttgggaatcttcacttatgattctactcaatctaaataaacagtyatgtagaattacacagccacagaaaaacctgctataagtagcacctttaacaatgtttaattttagagcttacctaattctgccaaaattttttaaaatacagcaaaaaaacttacaaattaaaaatcatagtgatatttatttaaaatttttatttacaggtaagcttttgggttgttagagagattcttcatgctcaaacattaaaaattagagcagaagttttgagccactatattaaaactgctaaggtaagaaaaacttgtgtttttatttttgagttcaaccattcataaatgtttgtaagtgaataaatattcgtgatgctttattcactgtttattgatactggaaaaataagrctcattgatataagtcaatttttaaaattggatgcctactttctctgccttttcctttattcttcctgttttcctaccttttcttttatattcttcctcccactctctgagtagctgaattatgtgatctgttttactgaataagtagacaaaggttggattatggtaaagtatgatatttataaaatattggactattctgcaggtgatgaagaaagccataaagaattaagtaggagaatactacttcacttctgaagtgaaccatgtgaagaataagactttatttttaagagaatggtatatgtgatattaccacattgttaactgaacagttattgtgtgacatagataataaatacagcaagagaaatggagaatggatttcaaaggtagttggaaattagaagggtgagacaggatgttctacaaaggataccaagattttattaaaacttgtaacaactctgaatttggttggaggggcagaaagggggagtgagcccttccctctccatcatgaagggtcaaggccggcagcgatgtaacaaaagacaagttaatgagagaaaagcatagcagatttattacatgtgcataggagtcatacaaagtataaactcaaagcagggccaaatggttgatgcttaaatatcttcttcactggggagaggggagttttgggggagggggtacataagagtaagtgattttcaggtaaaatgaatgagcccagagaacgaagtcctgagaccaagtttctctgagctctaggggaggtggcattacaggttatgggagagcgaagggagaagaacatgttaagcaaagacagatatctcaaggaagtatctcagataatctcagagctaccctcagaaagaatagttggggtcgcctatggttgagttaatctttcctagatctggacaagggagaggatgctcagaggaagcctagctgttcatttcaccattgtagattttctttacagatgtgaatctcctccacaaagggcagcttttcagggctatatctgtccgtaggccctctgaatagctatctcaaaatatgtcaaagaagtatattttagggtaatatatttttggtttcctttaatgttaagttcactaagaagtatggtaattgtagccacgttcattcattactcttgtaataaatacgtaactttcctcacatgtgaatgaaagaaggcagaataaaatgaggatatcatgtttacagttattaaaagtcataactctttcctattttccttaagaacatgggagcaattgtattctaacattctatggcactaggtggcagagctagccttctacaaatttgatattttgcaaaagtgtcaaaatatttttagaaattctttgtgatgatatgttaggtaaatactttttttttttttttttttttggaggtggtgttgcgctctgtggcccaggctggagtgcagtggtgcgatctcggctcactgcaaactctgcctcccgagttcaagtgattctcacatctcagcttcccaagtatctgggactacaggtgcatgccaccacacccggctaatttttgtatttttagtagagatggggtttcaccatgttgggccaggctggtcttgaacacctgacctcaagtgatctcccacctcggcctcccaaagtgctgggattataggcgtgagccactgcacccggccaatactggtttttaactaataaaaattaatgattcttcatggattctgcattattattttctgatatttttgttagtttttaaatttacttgtatgttccactcaaaaccaccaaattttgctcaaacctaccactgtcttcatcaaacaatcatttaacttcagttcagactttgaattatttttgacagcacttgccttcatcccaagctctaaactcataattgtttttttctcattgtcccttaaacccttctrttctgactctctgccttctatactgtttgttataaaactggcaggtctcttacttgagtattgttatcagtcagcattctccagagagatagaaccgtagcattctgtataaacatgtataaagagatctaaatataaaatgtataaatagattttaggaattggcttatacaattgaagggactggcaagtatgaaatctgtagggtaggccaacaggctggaaactcaggagtttaggcactagtcttgaagcagaatttcttttccaggaaacaccaattttcaatgttaaagcctttcaactgatcaaatgaggcccacacacattatcaagtggaatctcttgatttgtagatgttaaccgcatctacaaaatatcttcatgacaacacctagattagggttcgattaaataactgatactaatagtctagacaagttgacacatcaaacttaccatcacatagatacaaaagaatataagaatatttaaagtatcaaaagaatgataatgtggatacccatgcacccactgaccactgggaattttcatatgcctcttcatatgccacctccttcccttctactgcaatgggaactrctgccttgaattttttcttttacagtgtgtatgtttctgaatcatatgttgctgcaaatatatgcttttggattttgtttaaattgaattattccatatttacttttgtactttcataactcagcagtgttacttaatggttttgggagtagctctgttgtagagtatcctatttgtatatatcacaaattattcaatgtactttggattatttccaaattcttggctattatgagccctgctgccataagcattcttgtatgagtctcttggtgcttatgtgacggttgaagccctagaaatacagagttcgtactagcagtgaaattactgagtctctctctctctctctttttttagacaggatcttgttgttctgtcacccaggctgaaggccagtggtgtgatcccaactcactgcatccttgaccttctgggcccaggcaatcttcctacctcagcctcccgaatagttaggattacaggcatatgccaccacctgtggctaatttctgtttttttgttttgttttgttttgtaaagacaaggtctcattatgttgcccaggctggtcttgaactcctgtgctcaagtgatcctcccatgttggcctcccaaagtgctgggattacaagtgtgagctactgtacctgtcccctcrtctctttagctttgttatagataacctccaaactgatttatatttatatatgctcactagcaatgtatgaagatgcctgttgctccacatccatgtcaccatctgatattgtcaaaatttttcattgttgccaattctggtggatgtgaaatttatctcattttagttttaattgcttttcattgaatctgataggagtgaacatcttttctatgttggccatttaggttttctctcttgaaaggtctgtttaagatctttcagcagttttctgttttggtattggtcttttattgtgtgtgttttggtttttttgtttgtttgtttttatttatttatttattttgatggattctcactctgttgcccaggctgtagtgcagtggtgcaatcttggttcactgcaccctccacctcctgggttcatgtgattctcctgcctcagcctcccaagtagctgggattacaggctcacaccaccatgcccagttaatttttgtattttttttttagtaggacagggttttgccatgttggtcaggctggtcttgaactcctgacctcaggtgatcctcccatctcggcctcccaaagttctgggattacaggtgtgagccaccgcgcctggcagtcttctattgatttttgtaggagttctttatataactctagatgctagttctcataagctttgcatgtatcttgctatttgtagcttgtcttaccacttttttcgtattttctgatttacatgttcttaattttagtagtcagatttactgatccttaatttctgtcttggtctgttctggctgctataacaaaaataccgttaactaggtggcttgtaaaaacaaacatttataaacagtgaacattctagagaactgtgaggattaagtccaatatcaaggtgtcagcagattcagtgtctggtaagggcccatttctcataaagcccttcatgttgcaacaaagttccttcaagcattttcccaaacaacatttcctccatattgccctgccaacacaccccactgctacaatatagatgaaggctgttctgggaatttatgtaagtgggatcctacagaaagctattrcttgtggttgactactcttgctcaccatgttgttgagattcatccacattgcatgttattgataattcttttattgctaagtagatttccagtgtatggatattccacaatttcttcatcatttgcttattaatgcacatattgtttttactttggcttttatgaataaaactgttatgaacatttttgtggagtatgcattgagttttcttggattatacctaggaatggtggactttctgggttatagattaggaatatgttttaactttattagaaactgccaaatattgttattttccaacataacccggttggttttaccactttaaattgcagtcagcaataagtcttccagttactccacacatcttgccagtacttggtgtttaatttttttttttaatctggcctttctttttgggtgtgtaatagtatcttactgtggttttaatttgtatttttctgatgatagtgatggttgagtatcttttcatatgtatgtggaccatttggatattttgttttgtgatactatcctttcaaatcttttacccatatttttaataggattgtttgtcttatcaagttgtagggatttttttaatgtattctgaatacaaacccttttcagaaataagtattttttcctagtctatgccttgcgtttttattttaatgctgtcttttggttagtgagcagaactgttcaattttaatgaagtcccatttgttatttttatctttgtggttactgtgttttgtgtcttgtttaataaatcttttcttaatccagggtcataaagacattttcctttgatcactcctagaagtattatagtttgaagtgattttttttttttttttggagatggagttttgctcatgtcacccaggctggtgcacaatggcgcaatctcagctcattgcaacctctgcctcctaggttcaagcgattctcctgcctcagcctcccaagtagctgagattacaggcatgcaccaccacgcccagctaatttttgtatttttagtagagatggggtttcaccatgttggccaagctggtctcgaactcctgactcaggtgatccacccacctcggcatcccaaagtcctgggattacaggtgtgagccaccgcacccagccaaattaatttttgtgtctggtggaaggtgtaggagttaaggttcattttttttcctcataataatatctaggccaggcacagtggctcacacctataatcctagcactttgggaggctgaggcgggcagatcacttgaggtcaggagtttgagaccagcctggccaaactctactaaaaaatacaaaaataactaggtgtgttggcgcactcctgtaatcccagctactcagaaggctgaggcaggagaatcacttgaacctggaaggcagagtttgtggtgagctaagatcacgccactgcactccagcctgggcgacagagactctgtctcaatttaaaaaaaaaaaaaaaaaaaaaaagaatatctaattgtgctaactccattcttttctctgtttaactgctttgacattttggttgaaaatcacttgatcaaatacgtgtaggtatatttctgttcctttgatttatttgtctattcttattccaatatctctttgtcttaattactgtagctttgtagtaagccttgcaatctgatagtgttctaatttttttttcttcttcaagattgtcttggctatgctatctccattttatatctgtggaaattttagaagtagcttgtcaatttctacaacatggcctgcttccatttttgattgaggttttattgaatttatagatcactttgggaagaattgataacaacattaagactttcaatccacaaacatggtttatttctgtttaagttttctttaatttctctcagcagtgctttattttcagtgaagcactgttgtatatcattatttctaatagacagccaatgttctgatattattgtaaatgtttttccggctcattttctaattgtttggtgctacatatgcagtcgtgttacctgaaaataaaggcagatttgacttcttcctttctgacttttctacctttaaacattatatttaaaagaatggtagagactggagtaaatactctcttctcccagggtggttaagcccaatcctctgtgagggaacaagaatgagaagctgatttttctggctgggcatggtggctcacgcctgtaatcctagcactctggaaggccaaggcgggcagatcacctgaggtcaggagtttgagaccagctggtcaacatagtgaaaccctgtctctactaaaaatacaaaaattagccatgcatggtggggctctcctgtagtcccagctactcgggaggctgaagcaggagaatcacttgaacctgggaggcagaggttgcagtgagccgagatcatgccagtgcactccagcctgggtaacagagcgagaccacgtctcaaaaaagaaaaaagagagagaagctgatttttctgatccaattaggaattgaggtggatagggttgagttttagctttagttagtttcatataacctctggtcacaaatgactcagggcaaaatctgtactttgtatggtacaggccccttgctgtagtagggaccctgggatctaagtcccagagatctctctctgctttctaacccagctgtcagcctccagcactgacacacagtaaagtaagttccattaggagtgaatcagtggacacagagccaactctaggtttgagactcctacagattctagtctattataccagcccacagattttactttagcaaaatctgcctgtcggagccttcatctttgcctagccttgtagagattcagcgtatgccctcagggaggaaaaactgtttaaaggctgttggttttttttactttggaatttagttatttgtgttctttgtgtccacaactctccagtgtctttaataaaatggttttctaagttttatctgttttgttttcttgccattatggctttaacaatggtttctcatgttgttctacatcttaggcagaagctactagttcagcatgagtttttgttgtttttctttttcttttttttttttttttgagacagggtcttgctgggttgcccaggctagagtgcagtggctcaagcatggctcatcacaacctgtgcctcctgggctcaagcagtcctcccatctcagcctccccagtagctgggactacaggcacatgccaccacgcacctggttaatttctgtgttttttttatagagacaaggttttgccatgttgcccaggctgktcatgaactcctgggctcaagcagttcacctgcctcagccgccggaagtgctgggattacaagtgtgagtcaccatggctggcctctgtttattcttactatgaagtagttatttgggctgcaaacctccataagacccctcccctcttcccttagcactaaggttcacagcaggcattgttgtctggcagtctcttgatggtgggtaaggattacttctatcctgcccttacgctcaggcaatgagtccttcagtgtctctgctttatgcaatgagagtctcttattggaacccccaccatagattaggccctgggcaatgtgtcccatgaagcttggaaagctaaccagattttcaaatgtcctccaagggattgccagcwttggtgttcagcttacatctctggattctccttagttttagggccctaagtattccttactttattgctagctttacagtgaattttcataagatgtgtttcatatcttacccaatatttttaattattttcactggaagagtaggtcaaggtgtctaatttaccagacttctggtatgtagtccttactaaattttgaatccattccccctcttcaactccactgacactaatgtatcagatccttctcatcatctctcactgtagtctctgaactgattcccttcctgtatgccaccttctgctccctgatctttccaaaatgtagtacacatccataatatcttacccaaagcatttggggccagatatatttaggaatacacttttttccccagattttagaaaggtggtatagttcatataccatctgtggtatgctcatcacaatcacctccacctcctgcttatgtaataccttgaaatcaaacacacttaatatttttggagcaaaacatgtaattattcaccttaagtgagatcaatgaagtctgtcattagcctcacatcaggttagattttcccacctagtgaacctgagaccacactaccaaataaacaaaactttgacttttcaggtttgagatctcagaattgcagataaagggttgtraaccgatgcctggcattcagttatatcattctcaaatttaaaaattctccaaatcctccactggagttcttactgcttatgagagcaaatctagcctttaaagaggcttcacatgtaaaaatggccctttctggtttcatcttctggtactctgatacttctcatattcagcttccagacaccttcatgcctttgtgctttttgtaaattgtattccctctttctcatagcccctcactctcaagtgtcatttctggaaatctgaatctctcagacaaagttaggggctgattattctgtagaaccctatatatacttttatttatataaccctatatatacttttattctagaaatatgcaaattggatttgtatttgttttcatgtctcactagactgaagcttcttgataggtctttttcatttttgtatatgcagtctaatatggtgcctagtataataaatgcttaaaatacattcattgaatggttttccagttagattatataaccttggatgagggtttatattatgttttgtgttattaatttattttgtttttatttgttttcttcgggctttcaattaaatgctgtatccacagcattttctagacctggggcttacctggctgtaggattaggacagttgtaaaatgactgatttttagacaggacttgcaggatataagcatcaggcagtatttaaaaatctgggaaattagcaataaatgttatgcagatctcatgggaaagtgctggaaactagtgttaggtaggagttttatgcatacagactgtaaaatcaatgtctcagcacgaatgagggaaaaaggatctggggatttgggtaggaggaagcagaaaattgagagggactgtactgtgaaaggcaggtttctcccttgccctggaataatgggagtactggatgggaaaccaaatcagaatcctggatgttgaccctttattgaaacttgaaacataaagcagaggcttagtaatagttcagtataagggagactgtttactagaaaccagctttcatgatcataccatgtaaacttgataatgagacataaccttggttttcttaatatattactcaactagaggtagatttattcccagagtttggggacaatgccagggtagaacatgtaagttctgttgtgcaccaaaayaacttagtgtaaacacagggtactctaaagacagttctcagtaatgaaggtaatatatgctggaacactaccagttgccaagattgtacttgttagtctaaattttcttgtattcatgttgttctttttcatccctctcccccattttttttcaaatcttcagaaactgtatgagctgaataaccttcatgcacttatggcagtggtttctggcctacagagtgccccaattttcaggttgactaaaacatgggcggtgagtaatattctttagttaatgaaaggttagacttcctgtggaaaggaaagatatattcatttcctttgtaattcttattaaagttaatataatgataatcaataaggatttttaaattgctttgtactctattctttgatacctacattttttctccttaagcagtgcactgggtataaggtaatttttgggtacagcttggtgcttagtttttgctccttagagaatcatttttgttgaaacactttcaatatctttgacaacgtaatgtttaatattcaactgatggaaggtatgaatacaaaaaaattgcatttaatcgtaaagattatgcttttggaaagtttgaggcatatctgaatcataggtttcaaaaaaattttactgatttcaatttccattattttttagtgagtaaatcttaagttttttccttaggaataatggaaaactagatgattaacatggaattatttgctgttgctgcacatgctgatattatgttaatcatatttggttctattacttatatgagatcagagtatgaattttgacctctgcaaatttgtgtattttcatatttgagtaacatgatattgtactcaatcttttcaggtagttttcatttatagtttatataagtaaaattttatattcaattaaatttatttatattcaatactattctttaatgttaaagagcaactattttgtttagaatcgattacattttgtacaaaggatcaatgtgtttttaaggttctgggctaaaatcatgactgactttttaaaactttattactaaaatataactttttaattaacaaagtgctgcttttgctttttatagtatctgaagagacagatgtttcccatgaaaaccagtgtagatttctatattggaaaaacattagtatggaaaagcttgtgatcctttttatgtttctcttttctattttatagaaaaaccttggtgtgaagggttttctttaaaaattctttttaataattatggccttattgtcttttcttaaaatttgaatttcatggaggaatggaaatgattataaatatacagttatgaattatatctttaaagttttagggaaaagaattatacgctgtgaaaaaaaaattctatttttattttttgcatccaggctggagtgtagcacgatcatagcttactgcagcccccaactcctgggctcagaggatcctccagcctcagcctyccaagtaactggactacaggcacatgccaccatgcccaactaattttttaaaaagtttttatagtgatggggtctcactgtgttgtccaggctgttttcgaacgcctgatctcaagtgatcctcccgccttagcctctcaaagtgctgggattacaggcatgagccattacgcccagtcctatacttttatttatgatttggtttagtaatgaggtagattttgctgaagttaatttttattttccttgaagatattttcattgcctcccttatgtatttttgtggaaaataataatttttatttggtaacagcttcattatttatctgaataaaacttttgatggtttgtattttaaaatatttcatactgtgctatgcactctgtaattgcttgacatttaatagtgaatgatctagacaaagttccattttcatacagctaacattctgctggggaagaataaattacaaataaataaatgacataaatagcaataaatgctctgaagaaaagtagaaaggaaggcaggacagtactgtgttatgtaacatggtaagagaattgttgataaatgacagttcagtagagacctggaggaattgagggaaccatttatttggatatctgggagaagagaattccaagtagaggtaataacaagtaaaaaggcccagatacattcaaatggcagagtggttagtgttgacagtagaataagctaggaaggtacccggtggtaggagatgatttcaaagaggtggcatgaatcagataatggaggtgctgtttacttatattcagagaggtatagagaaggaccattgtgggctggggttctattttacacatactgtgtttgagttggctagtaaacatccatgtgaaatgtaaggtcagacttagatgtacaagtttaagggagtggttggggctagagagagattgttataatcatcaatgtaaactatttgaagctagatgggattacctaaggagggagcatagatgaaaagccctgggaacctccaggattcccaagtagagattggaaaaatgaggagaaatcaacaaaggaaattacgggtaggacacatttttcacagtcaggtaaagaaaatgtttcaataaaaattgatcacctttgtcaaatgctactaataatttgaataaggtgcaaagtttgagatgacctgacaattggaaaggattggtgacctcgggaagagtgatttcagtagagaatggggtgaaaaactgactggagttgagagaatggtgatgaagaagtgggacagcaagtatagagaatgcttttgaggaattttactgtaaagggctgcagtgtggtttgcagagaaatatggtacctggaagggaatgtgggaccaaagatttgttgtattttgttttgtttttggaaatggcatcaatggcaatatgttttatgttggtggcaataatctagtagaactaaaaaaatgacaagagaatgaggaattataccagtgatatgcttgatgagatgaaagagaattagatttagtaccctagtgtatcagtaagagtttatccattttacgccgggtgcagtggtggctcatgcctgtaactccagcactttgggaggccaagtcgggcggatcacaaggtcaggagatccagaccatcctggctaaaacggtgaaaccccgtctctactaaaaatacaaaaaaattagtcagacgtggtgatgggcgcctgtagtcccagctactctggaggctgaggcaggagaatggcgtgaacccaggaggcggagcttgcagtgagccgagatcgcgctactgcactccagcctgtgcgacagagcaagactctgtctcaaaaaaaaagaaaaaaaaagaaaagatagtttatccattttaacagcagggaagggaacacatttagttacagatgcaggtaagttggtagatttcgtggtgggattcttagaagttctgattgttttgtttcctcagacataaaaaagcaaggtctttagttaaggtggtatgggagaggtgttggagatttgaagaaagaagagaggatataaaagtcatctggagagtgtgagagtgtgttaactaagaaaacgtaataggtttgatagaccttatgtaggatccatctacttaagacttttttttaatcatgaatttaaagtaaaaccagtcagcagagttatgtattctccagccaggttcagatattcagcataagctttcaatagtgccaagagttgtatttaaccagagatgggatttttcgaggcttttgtaccagaagggttaagggtagcacaagaggtgaaagacggaaaatatgagagttgttttattgacagatgaggaaactaagccaagtaaaaggaggaagatgatgaacagtgaaaaggtaggctggtcagtggtttggaagccacagtggagtcaaataatcactggattcagaatgagaaagggagtgcaagctgaggrtggtagaagataagatcattggagcagaagtccagaaactaagaaaccagagtattgggagtattctctccatgaaatggcaatcaccaagatttatgataataattttggttcatggattttttttctccaactacaaaaatcttcaagatatagggggaaaatgacttgtagatctataaatgacagtaacataagtgttgtaatctagggttctcttgtttaatatggtagccattagctacatgtggctattacatttaaatcattaaaataaaataaaataaaaaatttagctccttgatcatactagccacattgcaagtgctcagtagtcacatgtggctagtggctatcatattggacagcacaggcatagattttcaccatcacataaaattctgttggacagcacttatcctagtgccttcaatttaatagaagctggaggattttagggagcagggtgagagataatgagctggaagaaattgtgaagagtaaggagcaaagattacacctaacctacctccaggcatatgttacaaggtttataagaaaagaaagggaatgcttagagaaaatgttaaggatagggattttgcagaggatggaccatgaattcaggaggatacagttggaaaggtttgggatggttttgttttgttttgttttaaccgataaagggaatgtaccaaaaagacaacaacattctatgtagggaaaatattaagagcatcaaggaaaaggatgcacaatttcactgttgtattcaacatataattgctattgtatatgttttaatgttcataacaacattattcacatagtcaaaaggtagaaacaacccaaacatctaacagtggatgaatgaatagacaaaatatagtttatacatacagtggaatattcatctctctttaaaagcaatgaaatcttgatacatgctgcaccatgaataaaccttcagacattatgctaagtgaaataaaccagatacaaaagaacaaatactgtataattcctataattccacttatatgaggtacctagagtaatcaaattcatacagacagaatctagattgatggttgccagggatggggagaaatgggatttgggagttattatttaatggatatggagtttcattttgagaagatgaaaaacttttggatatggatgttggtgatatccttgaaatgtccccctgaaaatggttaattgtatgttacgtatatattttaccacagtttttaaaaaataggtttacttaaagtggttgaatatatgagcaatacaaaattggttatatttgaaacaagtattatttaaaaggacatcgtttacaatatcaacaaaagaaacaaaatatcaaacaataagtggaataaaatgtgtaagacctatatgcagaaagttataaaactttacaggaagtcattaacaaagaactaaatagagggagcaatagcccatgttcatggatagaactattagagttctaacaggtttttgaaactgtaaaataaactgaatgttactaaataaatgaatttagtaacattccaagatacaaaattatcttacaaaaatcagttgcatttctgtacattaataacgaactatctgaaaaattaagtttaaccaaggaggtgaaaaatctatacacagaaaactataaaacattaatgaaagaaattgaataagatacaaatgaatggaaggatatcctgtgtttgtgcattggaagaattcatattgttaaaatatccatacagcccaaagcaatctacagattcagtgcagtcactatcaaaatttcaatgacatttatcacagaaatagaaaaaacaattctaaaattcacatggaatcacaaacatctcagaatagccaaagcaatcttgagcaacaacaaagctagagacatcatactctctgattttttttttttttttttttgagacggagtctcgctctgtcgcccaggctggagtgcagtggcgggatctcggctcactgcaagctccgcctcccgggttcacgccattctcctgcctcagcctcccaagtagctgggactacaggcgcccgccactacgcccggctaattttttgtattttttagtagagacggggtttcaccattttagccgggatggtctcgatctcctgacctcgtgatccgcccgcctcggcctcccaaagtgctgggattacaggcgtgagccaccgcgcccggcccatactctctgattttaaaatacactgtgaagctatagtaatcaaaatattgtggttagcataaaatagacatgtagaccaatggaccaaaataaagggcccagaaataaatacacacatttacagtcaattgatcctcaacaaagatamcaagaacacacaatggggaaatggtagtttcttcaataaattgtgtcagaaaaactggatgtccgcatgcaaaagaatgaaactggacccttatctcataccatctgcaaaaatgaactcaaaatatacttagtacttaaacatgagacctgaaactgtaaaactactagaagaaaacacacgggaaaagcttcttgacagtggatctggacaataattttttggctatgaccccaaaagtacaagcaacgaaagcaaaaatatacaaaatgggattgcatcaaactaaaaagcttttgtacagcaaaggagacagtctatggaatgggagaagatatttgcaaataatacatctgataaggggttaatatccaaaatacagtcatgcatggcttaacaatgaggatactttcggagaaatgtgttgttyggtgattttgttgttcagacatcatagagtgtaatcacacaaacctagatggcatagcctacaatacacmtaggctatatggtacagcctattgcttctagactacaaacctatacaccatgttactgtactgagtaggcagttataacacggtggtatttgtatatttaaacatggaaacagcacagtaaaaaatacagtattataatcttatgggaccactgttgtatatgcagtttgttcttgactgacatgtcgttttgcagcacatgactgtataaggaactcagacaatgtgataacaagaaaacaacccaattaaaaaatgggcaaaggatctgaatagacatttctcaaaagaaaacatacacaagtcccacaggtatatcaaaaggtgctcaacatcgctaatcatcagggcagtgcaaatcaaaaccacataatatatcatctcacacctgttagaatagctgttatcaaaaagccaaaagataactaacgagttttggtaaagatgtggagaaaagggaactgttgtacagtgttggtgggaatgtaaattggtacagtcatggaaaacagtatggagattcccccaaaaataataatagaacaattatgtgatccagcaatcccatttctgagtatgtgtccagagaaattgaaattgatatgtcaaagagatatctgcactcctatgttcgttgcagcattattcacaatagccaggatatggaaccaacctaaatgtccatcagcagatgaatggataaagaaaatgtggtttatatacacaatggaatactattcagccttacatttacaacagcatggatgaatttggagatcattatcctcagtgaaataagctagatacagaaagacaaatgctactgcacaatttcacttatctgtgaaatcttaccaggctgaactcatagaagcaaaaagtagaaggatggttgctgaggggcaggggaaatgttgggtcagtaggtacaaagtttcagttatgtagaacaggggtccccaaaccccgggctgctgaccagtgctggtccatggcctgttaggaaccaggccacagcaggaggtgggcagcaggcaagtgagcattacggcatgaggtccatctcctgtcaaatcagtggcagcattagattctcataggtacatgaaccctattgtgaactccgcatgtgaaggatctaggttgtgtgctccttatgagaatctaatgcctgatgatctgaggtggaacagtttcatcccaaaacctttccccattcatgttcatggaaaaattgtcgctggtgccaaaaaggttagggaccactaatggagagagaataagttctggagatctaatgtacagcatgaggactatagttgactatagttaataagactatgttgtatacttgaacttttctgagagagtggatctttttaaattttatttattatttatttatttttattttttttgagatggagtctcgctctatcacccaggctgtagcgcagtggcacaatcttggctcactgcaatctccacttcccaggctcaagtgattctcctgcctcagcctcctgagtagctgggattacaggcgcccaccattttgcccagctaatttttatatttttagtagagatggcgttttgccttgttggccaggctggtctcgaactcctgacctcaagtgatctgcctgccttggcctcccaaagtgctaggattacaagcttgagccaccgtgtccagcctaaaagagtgaatcttaaatgttcttaccatacaaatacataagaagtaactaactttgtgagatgatggatatgttaattagcttgatagcttgataataatttcattatatatgtgtattaaaacatgtacacctcaagtatatgcaatttaaatttgtcagttataccccagtactgctggtggaagattgattgtaaaatttatatggaaatttaaaggttcaggaatagctaaagaagacaatgggaattggggagataagcacttggcctaacagatgtcaggatatactagattcttggacagtgtatgattcctgcagttttagacatatctaccaatgaaacagaatgaagaacccagaaatacctccttgtttttacaggattctgatacgtgtatgacagaggtggcattgtaagttggtaaagaaatgaggggctgtttattaattggagctgcaaaattggtcaccagtttgggggaaaaaatgaaatcaggccccttgcgccattcacaaaaatccttgtgagatgactcaagggcttaaatgtgaaatgaaaaacttcagttttttagaaggaaaaatatatgtgaatatctctctggtttggcatgaatagatttctggctttggataagtaaggattttttagataagatacagaaagctccaacaatgaaaaaaataataataaattttgtcatgttagagtaagaatttctgttcatcaaaagataccttaaaatggaaaagaggatgcagtgggcggaagatatgtgcaacagttagttgtccaactagaatgtgtccaacacaagaatttgcatccagaactcttaacaacgaaaaaagaaaaaaaatagaaaaattaacattataaatgtattttgtagaggagaggatacacatagaagcagtgaaaatgaatgaactatagcttcccacaacttcatggatgaagctttaatatcacaatgttatatgaacaaagtaattgccaaagactaaaaatgaaataaaagttaaaatggaataaaatttgccaaaaatgaaataaaatttgaggggaatgataaacagaacattcagagtagtggttactggttacctcttaaaggcagtcaaggcaattggatggaagatgagtcatgtgtgttcgttataaagtttaaatccatttaacaaagccataccaggctctaatgataattgagtgtcacaaacaaaagattataattaatctgcaccccgggtctaagataaagtattcatttatgcagttgcacacattcayacatattgtgtgaagatacaaaccaaggtgatgaggaataatctgggagtttgtgtttcctggggtgactgacatgagcgggcattcatctaggttttcccccaaaacagattgtggtggtaaggtggtgttagatatctggtcaggaacatctagaattctgtgggtctcctctttcattaatatcaatgaaagtgtgaagaggcttgcccccatttgtcatgctcttggtgccaaggacatgtagaagtagaacactgtgaagtattttgtccgccccgccccccccacccccagcggtttttggaggggaaaatacagtaaagagactttttaaatataacattataaatatcaaaagaagatttgaaaagaagaaagaaaaggcttctcagttaatagagcttctgagctatcattcaggaaatacctatattaacatctaattagttctttatattcatattcttcctctagtcttctggaaacaagtctctcctaccacaactcagattgaattctatttatctgattattgatttattatgaaaattacaaaatcatgttatagtttgttataacagttctgtgtttcagctgtggcaagattagttacragttctaagtaatttgtttctcctggtattgtaccaaagtttttgaatgattgacttaggggaaaataaagagcaggtttatcattatccctatgtcacataactatattttgcatatccagatacttccttaagtggtaaagagttagatatacaggcagcaagcaaacatttgcacctaatcttgagattactaatcaagtatcttgaaagtggagtaagagaaaattgtaaaaccgctgttttagaccatggaatatycatctaaaacattaaagcaaaggaccccttgacgttgtattttaaagagggagcgatactgttgagacatttttctaatagagattttctgaagatagtctgcatctttgagcctctgaacaatagatcccaactgtactacttataatactagaaagagtagtggattaggtgtcagaatattcttatctccagaaccagactataagatcctgaaaaacaaggacatacatctttgtgagtgagtgggtaacagagagtattatattctgctgcttgctaaccttgtgatctcagtctcttcatctctaaattaatactcatacttttttgttaatctcataggaaaattaggtgagacttacataggtggaaatgttttgcatgctgtaaaacaacaccaatattttaataygaaataaagtgaaatctaatgtagtaatgaaatagaaacttcatgtctaaataaaaaaaaaaattttccagtctttggaatgatttgaaaaactatttcctgaaccttttagtgaacaccattgtgggtgactgactttgcttttttttttttcaactccccttgattatttacattgatctcaaaggcacttactgcaaatctgcctctcaagtgtcttacaacagtatcttttagttatgttgtatgtgatatagcactgatcaaagagaagaaaatatcagaaatccaaaaatgtaaggaattaaaggattttacagttattaggactagccatgactagatttatcaagaaaaagtgttaatcgcaaaatttggtgtttatttcttaacattatgcaagaatgatgtttatctttgaggtggcaagggacagttcattaaaatacttggacatttgagctaaatatgawtgcataattttctaaaattaggaaggtgattaataaaaattgattaatttaaaatagtaaacacgaaaatgttataatttattacttagttaattttatgaacatacaaaggatatcttataaataatgaatttggattattaatagacaaatctgattttgtcttatttatatactaccaagatataattaaagaagatataactttgaaattaaaatccatattcacagtaaatacaacttcagttcaggtctttgctacaataaaatgagatttgtaaataacttaggtttttctgtttgttttttagttattaagtcgaaaagacaaaactacctttgaaaaattagaatatgtaatgagtaaagaagataactacaaaagactcagagactatataagtagcttaaagatgacaccttgcattccctatttaggtgagttatgtcactgtgtgttttttgtttctagttgttactcttccttactcagtaatttatgtgaaattcaaggtattttttaaatgtttgtatcttttaaataaattacttcaagattggtaagctgaaaaaaatgactaaagatagttgttaccctgttacctggaatgtattttcatattagattagccttttgccctcaaggtttttcttagactattatgttttcttagagtaggaccatatagtaaaacaatatttttagctgttttagtaatgcttttaaagaatataatagttygtaatgatgtttaatacattaaggaaattgatcaaagtccttatatagtgaggagatattttagtgtgaattctgaagtagtctcagtgcatattggtattgttgtttacctgaatgaaatgagttgattcactgtggcaatttagcttcgtgctgagacagttctgtatttcgcatctcatctaattaagaatttatctctttattatatatcttgtagtgcttataaattcaagaagtatttaaccagtaatattataagattatttttaacaaaatatgaataatgctttgttaggtgtttgaatgaaaagaagacccaaataagttgttcttttaaataggtatgtaaatcaaacataaggaaaatacatgatmcatacctagcatacattaaaatgaattgatttgatcctatgtagagagtaatcaaatgatgaagatttggtgctttctggtcctccccaccccccagattttgtgtttgatgaaattactcacactaaatttcaagatagctatttctgagagtgattacagtgtcaccttgaagtgtttacagtcccagtgactagaagacaaagaagggacaaaggcagttgatacatgcccatttagctactatagaacatcaaccttagtttcccagagaagagtttaactctttagaatattgtgggacaccctaggattgcagagaatggggacctattgtgtaccttgtgttgaaggcagaatacccctaagcacagtagagttagtggccactgcatcccagaatattttgtcctgtttctttgataaacagcttaggatcatagtaagcatgactcttatcagagaggctctaagctggatattaggagaaagacattctgtatgtgctttacatttttaggttgttgctgtcattgtttgttttgttttgttttgtttgttttttgagacagcctcgctctgtttcctaggctggagctcagargtgcgatcgctgcttgctgcagcctctgccttccaagttcaagtgattctcctgcttcagcctcccaagtagctgggattacaggcaagcaccaccacgcccagctaatttttgtatttttagtagagacagggtttcgccatgttggccaggctggtcttgaactcctggcctcaagtgatccgcccatctcagtctcccaaagtgctgggattgtaggcatgagccatcacacccagcgtggtgctctgtgttttaccatagccttggctgtgcccatacttgcaaatataatttgaggagagaaggaatagggaatttttcaaaaataataccttcacaattcagaagaatgtgtactttttatagtatgaagaacattagactgagaattggcaatcctcaattccacaatgactctacagtccttatttttcaagtcattgaattttcttctttgagccttgttctctttacctagaaatagcatgcataggactagaatcatgttctccttaaggctggatgggagcattgtgatatcttctttcttttcttttttttttttttttttgcgacagagtctcgctctgttgtccaggctagagtgcagtggcacagtctcagctcactgcaacctccgcctcctgggttcaagtgattctcctgcctcagcctcccaggtagctgggattacaggcatgcaccaccatgcccagctaatttttgtatttttagtcgagatggggtttcaccatattggccaggctagtcttgaattcctgacctcaagttgtccgcccacctcagcctcccaaattgctgggattataggcatgagtgatggcacccagctgtagtgatgtcttctaattaacttattttactatcgagaaaaccaagatccagaaaggtagaagacctggctcatagtcctaagacctagttactgacaggtctgcattctgaagtcttaacctagagagctccaattatacctgctgaactctcattttaaaatttaccaattttacgattgctttctttttctcattgaaatatgtttttctcaaactaaatttcataatttgtatcttctagaaaagaaaattaagattattttccattcaaaatgagaaaataagataataggaatccttatgctgtgatttctagttggggaccttcttgtactcttggaccttcttgacatttttccacagtggagacatcagtacaggattgaagctgtgtacgtctgtatatgtgctcaggtacattcatgcactctcatgcacacacagagagaaagktggggaagaaagcactagccaagttggagtttagtagaatcaggaaaggttttctagtggagaatatacctcttctgtctcagcccccgacctgaaacaaagagtaatcatacctacgggttaaagcaaatgcggaaaatgttgaggtacagatgttaattttgagaaaatattacaagcattgtttttctcgtatcttccatttttcccatcatctccaatgactccttctttttttcagttccctttcattttatatgttctcatgatgtaggatcttacgtttcactctcaccgtgtagttctgcttcactttatacttaagccaatttaaaagtatctcattcttgttgtcacctttttctccatcttcactctctagaaattttcctaataaggtcaccagtgacttcctggttgaaacatttwatagatgtttctcaagccccatcttaattgtgtgagggttggtgtcaattatttctcctccttgaaattctccacaagtagcaccagtctttcttggtttcccttctacatttctggcttttattagctgctcttactctacctttgtctcttaaatgtattcttgagaggtctcagtccacttcttttctttctttcttttttttatttttatttttcagagacagggtctcactctgtcatccaggctggtgtgcagtggcatgatcagctcactgcagcttcaaacttctggactcaagcratcctcccaccttagcctctgcagtagctgagactacaggtgtgcaccaccaagcacagctaattttaaaattttttttgtagagacaggatctcgccatgttgcccaggctgatctcaaactcctggcctcaagcagtcttcctgcttcagcctcccaaagtgctgggattacaggtgtgagccactgggctcagccagtccacttcttttcttactctatataatcggagtggtctcattcaggttttttctgtatattgcctgatcttccaaatctagactgaatctgtctaactttgtatatcactgtatattttatatctatctgtatatcttagctatctacttaatccctggggccgtctaacatttttaggtactaaaatactgattcattaagtgagaaaaatctacaggtatctcccattcaacatgtgcagaagtgaattcatcatgtcttcttcttcctccaaacttgatccccatctgatctcctagctttctctaccagtgaccagtcagtgtagtagtattgacactgcggtaccacactacagcctggtgttttaatgcatttctgtttcctcctcctctgcttctcatattctctagtaaaatgtatgtgtctgagggttacccaagaattagaaaacaaaaggcagcggggagggttccaagatggccgaacaggaacaactccagtctacagctcccagcatgagcaacacagaagacaggtgattgatgcatttccaactgaggtaccgggttcatctcactggggcttgtcggacagtgggtgcaggacagtgggtgcagcccaccgagcatgagccaaagcagggcgaggcatcacctcacccgggaagtgcaaggggtcagggcattccctttcctaaccaagggaaggtgtgacagaaggcacctggaaaatcgggtcactcccaccctaatactgcactttttccagaggtcttagcaaatggcacaccaggagattagatcccgtgcctggctcagagggtgccacgcccacagagccttgttcattgctagcacagccatctgagatcgaattgcaaggcggcagcgaggctggggaaggggcatccgccattgctgaggcttgagtaggtaaacaaagcggcctggaagctcaaactgggtggagcccaccgcagctcaaggaggcctacctgcctctgtagaatccacctctgcagggcatagctgaacaaaaggcagcagaaacctctgcagacttaaatgtccctgtctgacagctttgaagagagtaatggttctcgcagcacagagtttgagatctgagaacagacaggctgcctcctcaagtgggtccctgacccccaagtagcctaactgggagacaccccccagtaggggcagactgacacctcacacatctgggtagccctctgagacgaagcttctagaggaacaatcaggcagcaacatttgctgttcagcaatattcactgttctgcagcctccgctgctgatatccccacaaacagggtctggagtggacctccagcaaactccaacagacctgcagctgcgggtcctgactgttagaagcaaaactaacagaaaggacakccacaccaaaaccccatctatatgtcaccatcatcaaagaccaaaggtagataaaaccacaaagatggggaaaaaacagaacagaaaagctgaaaattctaaaaatcagagcacctctccccctccaaaggaatgcttgccagcaacagaacaaagctggatggataatgactttgacgagttgagagaagaaggcttcagattatcagacttctccgagctaaaggaggaagttcgaatccgtcgcaaagaagctaaaaaccttgagaaaagatcagacgaatggctaactagaataaccagtgtagagaagtccttaaatgacctgatggagctgaaaaccatggcacaagaactacgtgacacatgcacaagcttcagtagcctattcgatcaactggaagaaagggtatcagtgattgaagatcaaatgaatgaaatgaagcgagaagagaagtttagagaaaaaagtaaaaagaaacgaacaaagcctccaagaaaaatgggactatgtgaaaagaccaaacctgcgtctgattggtatacccgaaagtgacagggagaatggaaccaagttggaaaacactctgcaggatattatccaggagaacttcaccaacctagcaaggcaggccaacattcaaattcaggaaatacagagaatgccacaaagatactcctcgagaagagcaactccaagacacataattgccagattcaccaaagttgaaatgaaggaaaaaatgttaaggacagccagagagaaaggtcrggttaccctcaaagggaagcccatcaaactaacagcagatctctctgcagaaactctacaaggcagaagagagtgagggccaatattcagcattcttaaagaaaagaattttcaacccagaatttcatatccagccaaactaagcttcataagtgaaggagaaataaaatcctttacagacaagcaaatgctgagatattttgtcaccaccaggcctgccttacaagagctcctgaaggaagcactaaacatggaaaggaacaactggtaccagccactgcaaaaacatgccaaattgtagagaccattgatgctaggaagaaactgcatcaacyaatgagcaaaataaccagsgaacatcataatgacaggatcaaattcacacataacaatattaactaaatgtaaatgggctaaatgctccaattaaaagacacagactggcaaattggataaagagtgaagacccatcagtgtgctgtattcaggagacccatctcatgtgcagggacacacataggctcaaaataaagggatggaggaagatctgccaagcaaatggaaaacaaaaaaaggggttgcgatcctagtctctgataaaacactttaaaccaacaaagatcaaaagagacaaagccattacataatggtaaagggatcaattcaacaagaagagctaactrtcctaaatatatatgcacccaatacaggagcacccagattcataaagcaagtccttagagacctacaaagagacttagactcccacacaataataatgggagactttaacaccccactgtcaacattagacagatcaacaagacagaaggttaacaaggatatccaggaattgaactcagctctgcaccaagcagacctaatagacatctacagaactctccaccccaaatcaacagaatatacattcttctcagcaccatgttgcacttattccaaaattgaccacatagttggaagtaaagcactcctcagcaaatgtaaaagaacataaattacaacaaactgcctctcagaccacagtgcaatcaaactagaactcaggattaagaaactcactcaaaatcgctcaactacatggaaactgaacaacctgctcctgaatgactactgggtacataacaaaatgaaggcagaaataaagctgttctttgaaaccaatgagaacaaagacacaacataccagaatctctgggacacatttaaagcagtgtgtagagggaaatttatagcactaaatgcccacaagagaaagcaggaaagatctaaaattgacaccctaacatcacaattgaactagagaagcaagagcaaacaccttcaaaagctagcagaaggcaagaaataactaagatcagagcagaactgaaggagatagagacacaaaaaacccttcaagaaaatccatgaatccaggagctggtgtttttttaaaagatcaacaaaatagaccactagcaagactatatatataataaagaaaagggaggaatcaaacagacacaataaaaaatgataaaggggatatcactaccgatcccacagaaatacaaactaccatcagagaatactgtaaacacctctctgcacataaactagaaaatctagaagaaatggataaattcctggacacatacaccctcccaagactaaaccaggaagaagttgaatccctgaatagaccaataacaggctctgaaattgaggcaataattaatagcctaccaaccaaagaaagtccaggaccagatggattcacagccaaattctaccagaggtacaaggagttgctggtaccattccttctgaaactattccaatcaatagaaaaagagggaatcctccctaactcattttatgaggccagcatcatcctgataccaaagcctggcagagacacaacaaaaaaagagaattttagaccaatatccttgatgaacattgatgcaaaaatcctcaataaaatactggcaaaccgaatccagcagcacatcaaaaagcttatccaccatgatcaagtgggcttcatcgctgggatgcaaggctggttcaatatatgcaaatcaataaatgtaatccagcatataaacagagccaaagacaaaaaccacatgattatctcaatagatgcagaaaaagcctttgacaaaattcaacaacccttcatgctaaaaactcccaataaattaggtattgatgggacgtatttcaaaataataagagctatctatgacaaacccacagccaatatcatactgaatgggcaaaaactggaagcattccctttgaaaactggcacaagacagggatgccctctctcaccactcctattcaacatagtgttggaagttctggccagggcaattagacaggagaaggaaataaagggtattcaattaggaaaagaggaagtcaaattgtccctgtttgcagacgacatgattgtatatctagaaaaccccattgtctcagcccaaaatctccttaagctgataagcaacttcagcaaagtctcaggatacaaaatcaatgtacaaaaatcacaagcattcttatacaccaacaacagacaaacagagagccaaatcatgagtgaactcccattcacaattgcttcaaagagaataaaatacctaggaatccaacttacaagggatgtgaagcacctcttcaaggagaactacaaaccactgctcaaggaaataaaagaggatacaaacaaatggaagaacattccatgnnnnnnnnnnnnnnnnnnnnccatgctcatgggtaggaagaatcaatatcgtgaaaatggccatactgcccaaggtaatttacagattcaatgccatccccatcaagctaccaatgactttcttcacagaattggaaaaaactactttaaagttcatatggaaccaaaaaagagcccgcattgccaagtcaatcctaagccaaaagaacaaagctggaggaatcacactacctgacttcaaactatactacaaggctacagtaaccaaaacagcatggtactggtaccaaaacagagatatagatcaatggaacagaacagagccctcagaaataacgccgcatacctacagctatctgatctttgacaaacctgagaaaaacaagcaatggggaaaggattccctatttaataaatggtgctgggaaaactggctagccatatgtaggaagctgaaactggatcccttccttacaccttatacaaaaatcaattcaagatggattaaagatttaaacgttagacctaaaaccataaaaaccctagaagaaaacctaggcatcaccattcaggacataggcatgggcaaggacttcatgtccaaaacaccaaaagcaatggcaacaaaagacaaaattgacaaatgggatctaattaaactaaagagcttctgcacagcaaaagaaactaccatcagagtgaacaggcaacctacaaaatgggagaaaatttttgcaacctactcatctgacaaagggctaatatccagaatctacagtgaactcaaacaaatttacaagaaaaaaacaaacaaccccatcaaaaagtgggcgaaggacatgaacagacacttctcaaaagaagacatttatgcagccaaaaaacacatgaaaaaatgctcaccatcactggccatcagagaaatgcaaatcaaaaccactatgagataccatctcacaccagttagaatggcaatcattaaaaagtcaggaaacgacaggtgctggagaggatgtggagaaataggaacagttttacactgttggtgggactgtaaactagttcaaccattgtggaagtcagtgtggcgattcctcagggatctagaactagaattaccatttgacccagccatcccattactgggtatatacccaaatgactataaatcatgctgctataaagacacatgcacacgtatgtttattgcggcattattcacaatagcaaagacttggaaccaacccaaatgtccaacaatgatagactggattaagaaaatgtggcacatatacaccatggaatactatgcagccataaaaaatgatgagttcatgtcctttgtagggacatggatgaaattggaaatcatcattctcagtaaactatcgcaagatcaaaaaaccaaacaccacatattctcactcataggtgggaactgaacaatgagatcacatggacacaggaaggggaatatcacactctggggactgtggtggggtggggggaggggggagggatagcattgggagatatacctaatgctagatgacgagttagtgggtgcagygcaccaacatggcgcatgtatacatatgtaacaaacctgcacattgtgtacatgtaccctaraacttaaagtataattaaaaaaaaaaaaagaaagaaagaaaccaaaaagggaaaaaaaaacagaaggaaattaagaacatacactatagcatctgcataattttagatactggtattcttcatatagttcatccctatctgggtatgtgaagaagcatcttgattgtgagattattgtggactcctgggcataaatatttggtagacatgggaaaggaaaatgaaacatttgtcagatgagtttttatgactcagtttagttcgtttccagtatgaaaatcatccttttaatgtaatgactgctttgccttatagcaaaccgttagattaaatgtatttaatctattaaaacatacatggttttgattcagaatccttttctattcatgtgaagggaggcttagtacagttgacaaaaacttcagcatttataaatgctgtacatttgatagaagttgccctaagaacaattaaaaggtaaaactcattatgcaaattggtagcttcatttaactattcctcttcaagtatacagagtttgcataatgctatgctttattcattatgtctgcagaggttattatggaaagaatatatcmatgaaatatctatagtgcatagaaaaaaggtaaccgctaatgatttcttaacatgaggtatatggtccaaactaatagttttttctcccctaaaaatgagaaccaaaacctaccaatttttgtgaagcttgtaaaagggagtagagtcctatatgctgrtaaaactcttattttgataccaccaaatttatctgtagttcaatgtggattaaattataagaagtagaaatgttttctcggctctcaactcatcatcccttgaaaaattgtctcttctgttggtttgcattcaaggtaaaaattagtcagcttggacaatatcgtgaaaaattcttagaataaggatataatttgtctagagaggaatagttggcaaatctgaaggaaaaaattgctttataagagaattattgcttttaaatctgaaagtcattaacaacacttatttgttcttgtcattggagaacagtcttaaggggcttgttgaagaatttggcatggtaagttttattttgctgacgagagcaaactagaatattgtgaaaaaaataatttagttatatgaaacatcataaatattctttaatgtgctttttctaagcctcatttctactttatgtactacaaagatgcagtagctcgaccaagaaagcatattttggctaggtgcggtggttcatgcctgtcatcctagcactttgggaggctgaggcaggtggatcacctgaggtcaggagttcgagaccagcctggccaacatggcaaaaccacgtctctactaaaaaatacaaaaaattagctgggtgtggtggcacacgcctgtattcccactccagcttgggtgacagagcaagactccatctcaaaaaaaaaaaaaaaaccatattttttgaactgtggaaatcagtaaattgttgcagtactctgtactgcttcctattaagtagaagcagaatgtaacagaaaagtttttgtaaaatctctagccctctgtagaatgtgagtatactcttttggtggatctagatatgactcctttttcctrttggagagagacttcttccccttccccatttaatttttaatttaatatgtcaggttttcatgatagtacttttttgttagaagagaaatacttttcttataaccctctgtaatatagtgttccttgcctactgctctctgaaaagcaccctgtttatgatattttcattaatctgtctcctcctcaacagaatgtaagcccctatttgtcttggtttaagggtttatccttacagcatctagaacaaaagtagtcatataataaatgtttcttggttcaactaattatccctttctagctcttcccattgtttcagtgattttgatttaatttctgtttaaacaataaatgtatttgtgtggcatatttgcatgggtcaactccttacccacccctgattttttttgttgttgttattttgttttgtttttggtgcctcagctggcacctagtatttacttagcactgtgcttggtgctaaatatatagcaagagattacaatgggctttgtccctgcctttatagaacttaatatctctggaattacaaaggtccaggatatcattaacctcatgaataatctctcctcttttctatatcctggaagagatgcatatcattgccttgtgccttacattgttagtggtgtccttatcatagttaatgacatttttaaagcatacctaaaatgataagaatcttaccgatttggttttcagtcgtttttgcrtatattgaattgttaaatattcagtagaatatagttatttagttttagaaatttctaactcatgtaaaaatgttttcaagaataatagttttgtattcatatttctattcagataatttcaacaaagtccaagtctttttgctgatctgtaggaattaaaaggagatttttcctctcgtttgatagaatttttcttcaatatgtaaggctctgacactgatctcagaaatgcctgttggtcaataaatgtcattggcttttaatatttcaagttttattccattttcctttctttagtttgatttgtcaataatatacattatggattaccttaccctattcttttaattatatgttgttatatattgtatactaaaacagcagtaaagcatcttcactgattttcttttggatttgagaataagctctgaccaaatggcagctagccccttttctttagccagaattacatccccattttccattacctcatttatatatttttttaccctcactcttttatatatttaaaattcctctaaattctttgttgatatgttttctgaagtttactttagaccaaagacttctgaaataaaagagctgggggtggggttgtgttaatttcatccccatgttcatagtgttttctttaagtgccttgtctttctaaaaaaataagaacagcagctatacagatctgcatgctaattgtaaacagaatcagattcccctaacaacagttttaccagtggtgtttccaactgtgaatatttcagtgatttgttttgtaatttttttaagcaggctttagcaggaaagtaataatttcagtaacatttattcaacacttaggcctatatagctgacactgtactttatatagattatctaatacataacagcagttttataaggtaaatgatacttgtattttacaggtgaagaaactgagacaaaggagtttaaattgacttgctgtaaagatacgtatttcattcacagctcaaagaaagcattatggattacattaaaatttggggtatctgtgttcaggttaaaattttgagttcattcatcagtctttcctgtaattatgtgtacaattataacttgataacagttaactccactgataaaactaaaaagtggccgggcatggtggctcatgcctgtaatcccagcactttgggaggccaaagcaggcggatcacctgaggtcaggagttcgagactagcctggccaatttggtgaaaccccatctctactgaaaatacaaaaattagctgggtgtggtggtgggcgcctgtaatcccagctactggggaggctgaggcaggagaatcacttgaacccgggaggcagaggttgcagtgagccgagattgtgccattgcacttcagcatgggcaacaagagcaaaactctgtctcaaaaagaaaaaaaaaaactgaaaagtgagctagtttaagataagatggccattttttcagggcgaggtcatagccttgtaagtggaatcattgttttcttacttggttatttttcacagacactagaataaaaagactaaaaacttgttagggtataataatctttaacttactacaaagattaatttaaatatatgtaaaccatattactttagtacagatttataagttatttaaaatgtttttatgattgtggaaggtttattctgctgcttatattaccagcaggagtcctaagaaatataatgctaagagaatagcactctcctgtcatgactcagagttaagtaaacagtagaatgaaaattgatctttattctacgaggcatgaagcccagagatagtgtatttgtaggtgtctactaaatttcaagttgctgtctaattttggcattttccaaaatctcaaatttttaaaatctgcttcaggaggtcaggtgttctaggcaatgatggcctcccatttagtccagaatagagtctatatctgttgtaggataaaattcattaacttattcttgactggacacagtggctcacacctgtaatcccagtgcttagggaggccaaggtgggaggatcacttgaggccaggagtttgagaccaacctgggcaacacagtgagaccccatctctacaaagaaaatacgaaaattagctgggcatggtggcatgcacctgtagtcccagctactcaggaggctaaggtgggaggattgtttgagcccaggagttcaagattacagtgagctaagatcatgccactgcactccagcctgggtgacatagtgggaccctgtctaaaaaaaaacaaaaagaaaaattaagtaaaagaatccttctataaaccagctctaagagaaggttgtagttcagtcttactgaagataaggcaaacccatctttattcctagatgacctgcaaagtaggtagctcttggaccttacctaccacacaaatgagctaacctggtctttcacaagactctctttaggctgaaattcatactatgtctcttcttgccttaagttttctttttatttttggtccagccacttaactgcctactataacagctgtcatggctttgttagatttgcaagtgaagataatggatcaatgtaatttcatacccgaaaacttggatattgttttgttttttgagaaagagtctaactctgtcccccaggctcgagtgcagtggcataatctcggcccactgcaagcaattcttctgcctcagcctcccgagtagctgggtttacaggcatgtgccacatctggctaatttttgtgttttcagtagagatggggtttcaccatgtcggccaggctggtctcaaactcctgagctcaagtgatccacctgcttcggcctcccaaagtcttgggattacagatgtgagccaccacgcctggcccggatattgtttttaaaacacgtttgttgatcacctactctatgcaaggtgctatgatttgtattgcagaaagtacgtagatgagtagtaataatatgatagtttaaatctgagtacttacgaatgtcaagcattattcttaatgttttacctgtattaactcatttatttgatcgtcacaaaaaccacgagctagatattcttattataccccattttatagattcaggctgagataggagtttataaattgctcaaggtaacacagctagcaagtggtagagctgggccacagacccaagcagttctgacttcagaacctacactaactatcatataataccgcttcttattctctcctctcaagaaacttagttgcccaagttattatgctgtctaggaacttcagagtaaaataaatcagctctctgaaggagagcagaatgggcccattggctaaggcagtttagcattcagcctagttttccaaggttgtatgttgactttcaaattctagttttaatgatattcttctgtgaaaattctgtaaggcttgtctttgataaagttttgggtgtttaaatgaaatgatatactgctttcaataactgagaagccttggtaaagttttattcacttaagatttggtgtaacagttagatgcccagttccttccaggaatcttataacagattctttggttctgaaggaagtggagagggactgaaaaaccagtttaagatgaccacaggtaaaacaaagaataataccactatgaggtttggatattttgtttaatttgtttcaccagaagttttattttgagatgtggcagatgaaaaacattggtcatgttgatggatttgagttgtccaaatgattatcttcacattaagctattcccatgcatagtttgcctcacacatttcaattcgaggttttctttttgcttaagcaaaagtttcatgagctatctttaaaattttaacttcacaaatatattaaggcaaggtcacctctaagcagtgaatatgtattcctgaaaggaaattgttccagaaagtcactagtaaagttgttgattgcaaagatgagttaaagacactgtgagactaagcgttacatacactgtaaaatgaaattagcagtttggactaagctatgyccctgtggcttctgctctggagctgttgaattctcagtatcgggaaaacagccaacagttccttgagtttgttttagtcccacctgttctgagcatgcactaatacttgtaaagctgtccaaactttctgatttgaattgcagattggttgggtttttttttctttgtagtagtaagatcagtaaattagaaaaaaagtaataataaattagaactataattcagatctgtagcacactaaatattctgcatttttgtaataccaatattttgctgattttagaactacataaaatgcatttctggagattttggtgttcagcatatcatatgaagataacactgaaaaattcattcatagatttgtctttataaattgaccatttaaattatgcatgcattatttttgggtttttttttatttttaaaaatgatatgtatttaatactatgggtcatgttttgggaaaatcagcataggatatattattaagaattcagatttaatcattacgtgtgaaaggcacaaattcaatttgaaataacttttattcaatggaagaagcattttctattggcaaaactagaggtttctccctaattttctgtctgtatttttataaataaaatgcattatttggctgaaattttaaaaatatttttttcactagacgttagagcaatcttagattttaaataaattgttaagtatcttgaacatgttatttatgatttaaaatatagctaagatttgctttacattgtggcaaatatttacattttagaaaacaaactttgtatttagtcaacataatttttaaaataactaggttgtggatacacataattttctgcagtaattgacgacagatgaaactacatttataggttcccttttatagttacggtaaaattcattttaaaaactttmtgtgtagaaataaattgtgccaagtaatatacatgtaacatttacatttttaagagctgaaaagtacaaagttctgtgtcatttaaattggcgagtgtctctcttcagtcaataggcttgatcatcatctgaactgctcttaaggagtatgacccgcctctgtattcrgcccagaaaattccatcttggtgcttgcttctgtaatggcctcctctgtaccatactccatttaggttagaatgtgcacaggcattgtaccaccagcctcctttatgaaagtgggcgcagtttcctttgaggaaaaaatacagatataaatgtaaaagtttcttctaggtgtggtactctgcaatcataaaaaacttattctacctttaatttgaacttcccttactaatcccagttacctttatctcagcagttttaaatgccttcacttacttgatggctgttgcatcaactgcttgaaaaatcacttgaattgcctttttttaactctttgcttgcttacaatgtacttttttaaaaagggggatttaattttctagttagcagagtagatgcaagcagtgtttatatgtgaaagagttacagagggagaaattgggaaggaaagatacagaagaagataaaagtctgaggaaaattgaattgtcaaaataaaatagcaaaaaataatacaaagtaaaataaaaccagcagtcaaatgggtttctgtaaataagacatatgttatggtctatctctcctcttttctcgtttaccagtgtaaaattggttaaaatagagacctgtgtgctgtttgccaaaatacagctggagagaaaaaccagtttgggacagggatgggggagaattgttgggtggaggggaggaggggatctctgtatcaggacgagaagaaacctgggttaaaaagtcaaaagcatatgaaaactaaatttgaaattatgtggatggtctagttgtttctttctaatgaaaatattaatttcccctttgaatcaagcttttttgttattcctatgccacatgtcacagtcatcttggttttccccctcaaagaaatgctcttacaccatgtatccaaatggcttgcatccttcatttcttgcgactctttattcaaatgttgctttctcacagcagattttcctggcgaacccatataaaatagctgccatcccaggccttgctgcccaccactttctattttcttactcagttttatttttgagagtacttattcccacctaacaaattgttttgtctctcctccagtgagtaagctccaaagggcgggaactttgttcactgttatatccctagcacctacaacagtgcctggcacgtggtaggtgttcagttagtatttgttatgaattgtaggcacttgcattttatttccagattaatgtgtttctgttttgctttgtgtttttttcccagaactttgtttttcacatagatcacactttgggattgccttatagaagaaatcctaaaagctatttctttcagtaggttggttgtatttcctgccacagtgaccaaaactgacctttttgaaaagactttagtagcatatatattagtagattctatttaatgcatagaaggtgatgattctacaaagaatgaaagtttttcatacttacctgcatacatatctttatctctrtccagtgtggtgaattgtttaccattatgccacatcatagaatcccctgcatttccctggtaagttcccaggcgcagtctrtagaattcactttcaggttccagacgaaagctgctgtattctgcatagacttttttatcactccagtcttctaattcaatcaataacttgtaattatcttgattgctaagcatatagatattttccagtccaagccagtattctccgtcaatgtttccaaaccctttctgttaataagtgaagaaacatgagtgcataaataagtatagagatagtaaacatttttacagagcagtgttaaacattcgatagcataaagatactggccatttaagtggtaatgtgagcttccattttagttggtcacttgcgttttataagccacacattgtcattctctttttgtttgtttgttttttgcttctgatatgtcagtattcatttgcatagctagcttcaaatcctacaaataagacaatgcaaatgagaataaaatttatccatagctactaaaaatattagctagtatactacccagatccttaaaaagggttcctggtctctctcatattcatctaaagagcccaacatttttttcctaatagtaatctttgtaaagtagtaagtataagtcatccagactgaaagggatcatttaaaagtatatcttctgtttcctttttgcaatttaattttgactttaaaaccagagatgagaatcatttttttgacagatgtagataatgaaaaaacatatggatagttatttttaactgtgtgtcttatttattgcatagcatcttgtttcttgcattattgcaagaatggatttgttttacttcccttaggtctgcatcactgatttaccttataattttcccaatttctgaagaagttgacagagccgtctgttcttttctgaataacagtccaacccccagggtccaaactgttttcacaccataactgcattggtccattgctgttttcaggtttaatcatataaatcccactgaccgaatgcccagcttcttttgcttgctgacagtctttgaatggtcctataatttaaatatcatttattatcagcaaacttaatatgagaagagacatgttaaaagtttttaatcaagatttttacctttgtgtctttgtttacagttaccattgtttatcatatatacaatattataaaatataactaaataaaagggtgactccagttctatctggaacattaatttgtttcgttttcatctgttcttttcttttccatatatgtattttttatattgttataatcctaatacatgtagaaaattggattctgtcttaacattttcatgcagctatagtctccattctagctgcataataatccttgacattgatatatttttatccttctatcattggacattgaggttttatggatttttgctattataaaaacactgcacaaagtgtcttcattcttattgaattcattttttaatattataaaaatgctgagggatcgatctactggatcagaggatatcagtttattcatagtcctacataatacccaagttacagttttggaaatttgatttcagtggaacatactagtaccttgagatactcattgcaaatggggtcagtcaaataagttttagaaatgcaaaatattatgtttcccttttggaaattctcaatgtacattcacatattaaagactgaaaagccctgaaataaaccagatgcccaaactcatagaatcttaaatttcccccaacaacacttactaacagcccatgagaatacatttcaggaatgttagcataaatgagtatctaaagagttgtatcaatctgtatgactaatagtaattttctcatttaacctacagttacctggtgatagttgatagatgttctagagatagaacgattaactaaggtcatgtatcacagaagatggtaaaccctagatagacataaatccttgtctaatcccagagtccctgctctgaactgctgtgttgcatgcatttgccctcatgttatttcataattttaggtattctccatttttaatccactaataatttcttcaaattttacaagtgacaacacattttgtgaaattacttttagggtgtctgactcttgaacttgagatttccacatttttggatcaggtgaatatcatccttctccagtgtttcgagccttttttataaacatgcaaaatatattaatggatttagaaaaaagaattaccctaaagatctcttagaacaaaaaatgtataaaaattctgattgtcaaattttatattttactagaaatatgtgagagtttagtcaagtaaagttcttaacaagaatttctgtactataaggataataggattgttgaaattttgagaaatgtgttatctatactttgccagatatgtacagtattccttttgggtcttactgggatagaattaatctcattaggtagttacacaactataacaatagaagggattcttagagactatgatctcttccttgtagattgttccgtgaggacagagactttttttttttttttttacttcatatcatcagtgtttaaacccttaggaaactgtctataattttttgttgattaaatttctcattttaaatacaaggaaattgaaaagtacacgcaaaaatcaagaggacatcagtttctctagtccaaatgtttattatagttcattgatatttttctcttaaatttttaaaaattataatgcaatatccataagtagtacagactagtaaaaatttgagaaactggaaagccttatttatggtgtctttcctgcgttatatttattttaggtattgtattttttagttctagagttgcaatttgattttttatagtttttatttctcttttgagatgccctatctttgcattcgttataaacatattttcctttaagacattgaaaatagctacaaccactactttaaaattattgtcctttcagttccaagtttgctgagagtttttatcatgaatggattttggattttttcaaaggcttttaaaatcttttcttttttaatttcttttctaactagacacatcacaggaatcaaaggctttttatctgcctattgagatgatgatagggtttttctttttgttgtttgttaatacacgaattacattgaatatatatacattttatatataatatctaatataagaacaaaaaagtaatatatataagaacaaaatatatatattagaacaaagaatgtataaaaattctgattgtcaaattttatattttactagaaatatgtgagagtttagtcaagtaaaagttctgtacgataaggataatagttttatccttataagaatttctgtactataaggagaataggattgttgaaattttgagaactgtgttacctgtacttttccagagagagagagatatatatatatatatatatatatatatatatggttttgggttttgttttttttggagcctgtttcccaggctggagtgcagtggtgtagtcatagctcaccacagcctcgaacttctgggctcaagtgatcctcccacctcagcctcccaagtagctaggactacaggcaagtgccaccctgcctggctaattttttttttttttttttttttttttttttttgagagatgaggtcttggtacattgcccagggtggtcttgaactccaggtctcaagtgaactccaggtctcaagtcggacttcagactcccaaagtgttgggattgcaggcatgagccactccacccagcctttacattgattgtattttgaatgttaaaccaactttgtgcttctgggatagactcaacttagtgaacgtattcagagcccttaacactatacccaacaaagtagtcatcatcggtaattgttagttatttcgtttctcctttattcctcatcttaacacataattgtagcttatttaataaagtagcttatttaatgtctgcttatttaataaatttaatatagctcatcaaagatgaatgtacagtcatttctactgcagataaatattactgaaaaacctcatgttctgcaaattcatgcgttaaaaatagtagccaattttagctcttaacataatttgtattcagctgcagttacctgtggcacaaaacattaatgtgcttggaaaaaatcccatgtaaaccagtataacctctctgttttgctaccactattctccttttcactagtcacatatgggctacttcacattatagaaacatgcattgtagtcaagtaggaaggaagggtaaagagcctatatttcagaaaagatgaaatttacagaattttaatttcttatgtgggagtgagatggaaggaaaagtraattatgactcccaggttcatacttagattattgcgtgtaatgcaggtagtatatttgtatacttacagtattcataggcaaggactttatctttcagtatgtatccacagtttgagcccacttaggaattcagatatgtagatatgaaactatgtgattcctagtaggcatggttcccagaattcccttagttctgcattattctttcaagaaatgtcttttctgcatctactacaggctaaggactgttttaggctcaagggataaagaaacaaccttagagtcaagtggggggtgggagaagtcacaagaaagagagaattccactataatatgacaagtactttgatggagttatgtagcgcacatggtagcaaagtctaagaactagctgagatatctgaggagcattgctcttactttaaaacctattagtattatagttaatgcacacatgaaagtagttttgttacaacatatatatatttatctcattttataaatttgcatattctgtaaatgttatgcttattgcttattctatgaatatcattttcgtaaatgtttactctgcattcatttgagtatagttttgacagtttacatttaagtatatattcaaaggttggacttttattaggttatttgctttgctgcagaatatttagaaacatcagtgttctgaatgttgacagaatatttgtcaagtatcatttgttccatagagctatactcattttttgctatttaatagacactcagatgtttaaagcaaaatrgagagttctggttttctgaatccagctttgatttcataagacttcaattatgcaaatttaagattatcttcagctttaattttcaacccatgttttgcagcgggctttgtgtttacagttggatatctgttagacttagggaaatgtagttgaagttcttttccagaacatatggataaaatttagcagtgcctaaagctatttttttctcctcagtaaagatattagatatcagaattcaatatttatttgtatttatttttataaacataccattaacctgtcttagtccagtgtatattgttgatcctagcagaaatattttctcattattacttgaaaatcktatttactttctgccctaaaattagattctctattgtccctatcttaaatgttttcactgctttttctgtaccataaagaacattgcttgaaagaaattaatgacaaatagaaaattttaagctttattcttgagaagccagatttaattcacaggtttgcatattttcagaaataaattgattgatctgtgaatcaggaatttgttcatgatgattcaaaaggtataaactggaattacctttcttttaaactaagcatagtatcaactattttttgcaagagtcttctcaaagcaggcaactggaattctgtacattgaatttgaagaaccagtctctctgttcctcaatttatgtgaggattaaagtttacatagggctaatgaaaccatattaatacctctgatttatagaaagaaaaatgttgaccagtcatgccacattatttcccaagrtgtatttattaagaacccatattttgaatagaacagtgagttaaaaaagaaaaaaggatttcacactttgaatagcagctttactgggagccatctgtaacatatgtgttctttttctgtaaaaagagcttttacaaagagaattacagattacaaagagaatcctttttatgacaggagaaacagtaaaccaattcagagctttcaaattattggttaccamgtaggatcttttgagaggtaaacttttcagttgggttgtgcattaactttcagttaaatatattcaacatttctggagtgggaagtttgagacaaatactttctgaagtgacagtagggtctttctgtaataatatgaattacttagtttattaatctgtatgtttaaactgtatttagcaacccaaactttttaattattaaagaatttatcaattacgttctcataactggctaatacagtcattttccaacagcaccttggcttaactagtttttttgttttgtattaaatgttagtataagtattccattgaaaccaattatacctaaaaagtatattaagaagcattataaataatttgaaaaatgtaaatatttggtgatttaaaataagcctaccactaaaaagcatatttttagtttctaatgactactttccaagtttaactttttttttttttttttttttgagacggagtctcgctctgtcgccaggctggagtgcagtgtcacgatctcggctcactgcaacctccgcctcccgagttcaagcaattttcctgcctcagcctcccaagtagctgggattacaggcgcccgccactacgaagttttaactttttaagcttaccatttatgtcctcatatacctaatatgacaaggaaagacacataaagggaagtgtacaaaatatgcaatgattaatggtggtcaaaccatgccacatcatacacgaagcactttttttttttttttttttttgagacggagtctcgctctgtcgccaggctggagtgcagtgtcgcgatctcggctcactgcaagctctgcctcccgggttcatgccattctcctgcctctgcccgcccccccccccccaaccgcccaagtagctgggactacaggcgcccgccaccacgcctggctaatttttttgtatttttggtagagacggggtttcgccatgttagccaggatggtctcgatctcctgacctcgtgatccacccgtctcggctacacaaagcacttctacctgtaccccctcatttaatcatcacaacaatttattttacaaaagaggcaactggaccccagaaagctttgccagaatccaagtttactgatactcagatctatgcttttacacatggtgaaggaactttctccactcagctctcctacaaggaataaacttgtttttataaatacgctatttgtaaaagagtaattttttttaataaaagactaacccaaaatgcaggcaccaaataacattaatagttaagaatttcattgattgcagcttgtcaggtgtattattacattctcaaacattttgtttttaaggtagagaagaaggtaatgtgtttgaaaaatgttttttatctaaatactattttttataacttcatgggttttttgaggtagatttttcttataaccatttttaaagaaaataaaagattgtcataacatcttttataaaatgtgatatgcataattactgtcttcaccatttttaaatgtacagtttattggcattaagaacatttatattgtacagccatcaccaccatccttctccagaactcttcatcttgcaaaactgtaactattaaataaccattaaacaactccccattcaccctccgcctaacatctggcagccacaattctactttctgtctatgaatttgaccactctaaatacttcatataagtagagtctcatacagtgtttatcttttgtaactggctaaacacctcttaaaatatacattgttgtatattttcaccttatgcatgtggagactttagaatgaccatgtacctccatgtaaagtacagtaataggaatttcttggtgccagagcatacataagtacaccagtagccatccatctttaccctttttgtgcaagcacctaaacagcctgagacatttttttccagacagatgtaaaaataacataagtgaataattgagcacattgtgtaaggaaaatagccagcctatttgttgttgcttgtagtaatttaatttagtaagcatcacagaatattagaatttgaaaaggatattagaataatccagtccagcactctcattatacaaatgagaaaacamaaactggcagtgacttacccaaggtcacataacaaaggtagtggtagaaccaggtgttcttaattccatgctctttcccttatatgttcattaatgtactaattagtatagtaattcttatggtctagcagattatccctttgaatttaagagatccacatttatagaataaaataagtaaaaagttaatgtttacataaaacaaataatgaataacagaaaaagttatctgcccttaatttttgtgttaaagaaagtttcactggggataggtacaccatgttttcattaaaacaaaatgtgtttaagaggacttttgacatactaaatccctaatatgaggtttaattctgtagcattcgtgggtttttttttttgtactaatgctaagtgtataataaaacatagaattggtatgtttcattttgtataaacattttcttagaaaagtttgtcagtgtttaaaaatgtgaatagtgatttctgctagaattggttataccatccactcaagcttcagggatcacatagaatactccatggcagttgtcttcatacttacataattgtatacctcatcagttaaaaaaattcacacagctcaattatgtttatttataacttacgtatacaaactactgataaattatataaaagcttacataaaacaaaatttttaaaggatatcaaaagcaattttttttctgttttttatttctatacccagtgggtcactttatacactgcattttcctttggaaatcaaagggattgaggtttgtttgttgttgttgtagttgttgttgttgtttgagtctcactctgttgcccaggctggagtgcagtggtgcgatctcggctcactgcaacctccgccccccaggttcaagtgattctcctgcctcagcctcctgaatagctaggattacaggcacgcaccaccatgcccaatacttttttgtatttttagtagagacggggtttcaccatgttggccaggctggtctcaaactcctgacctcaagtgatccgtctgcctcggcctccgaaagtgttgagattacaggcatgagccaccatgcccggcgaggatattaataatgataatcatttacttaatttaatgatactctggcctattgctactgtaacttagaacagtataaaatgaacaaatccaatatgatataacgtattaaattactttcatgagggtctttggaatgacaattttaagaagctctataaaaatgtcaccaaatcaactaacacatatttagcaactgcaggtaagacactgtaaccatctaccaggaaggagcttataatatagttggaaagcctcttagttagatgtattctgagtgtatgtaaagataattgataatttaagagggactatacaaaatgtcttatgtatgttacagagagtagaggtattcatggagaggaacgatcacttcaaacctgtaggcgtcaacaagggcctcaaggaggagttgcattttttttatttatttatttatttatttatttatttatttatttggttggttggttggttggtttggcttgagccttattctttgagtaggcagaaagcatgaaaatatttaggggaaaatgagtgaatttgttttattggaacagatggtttttgtgaaggaaactagtggaaggtccgctaggaaagtaggcttcattctttaggaggacattattcttagccagactaagcaaattggactttttctgtttgcagaagcagatatgtgagtagtttaagaagatgaatctgctggcaatgtaaatatattttgatggagagagaaaacagagttacaccagttggcaagctattacacagttcatagtaagaactaacatttgagtgccaggcactgttctaagcactcttcaattgttaaatcttatgcagtaaatactgttattcccatttcacaggtaaggaaactgaggcacagataattttctttcccctaagatcacacagctggtagcctatggagtctctgtcttctagctgctgctgtggatcatttgaatctaaacaagagttctggctctgaatagaaatgagggacatgcacacaagagaccaaaaaggggacatgagtagaattcagtggactgtgtatggggcagctggggaagtatcaaagatgagccaagcttatttggaaatggatgacaacattaatcaaaacagagatgttgagatcaaatggtgaaaagacagttaactgtcttccagaagcattcagaccagcaaggagacagacatataaataaataacttcagtgtaatatcatatagaaaacatgtttaagaaatagtcagtgatttggggaaaaagccacctaggtgtgtttgtttgaatctaggaagtcataacatcagaggtattatttgagttaagccttgagatctgctaaattgacgacagataagctgaaagaaggtgtttcagtaaagaaagcagtagcatgtgaggtaatggtgaaatatccaaatgcaaacgtctagctttggttaaatcaggagggagagctacattcaggaatcatctgagcagtggtgatacttgaagccaaaatactctaaagtagaatatcttgaagaaagactttaaggcatagaaggaagaagatgccagtgaaggacctaaagaaataggaagtgaaggaagaatattaaaatgtagaaggccaggaaagcagggctgtgaatagcgaagtggtattcactgacagagagatgaaaccacttcatgatatatttctttctagtctttagtctgtgtttttattgttattgtttaaaattatttcatagtatatgttttatgtcctgccttttcaataagtgaatgagctgcaatttatttactcgttgctttggggcatttgggttttcccttccactctaaggaagcaaatcagcttgtaaaggattctggggaatgagttgtgagaaaatggatgcaagtgtaaaataaacataaaatactgaattcagaaagttagcagtgggtttagtaaactgaaacaaagatgaattattcatctttgctttctggacacctagatcagtgactgacattgaatgcatgaagagagaaagaaatgaaatttaaaagtagagtttggaatcatgcatgatcaatgcaatagtttttttttataataatgaacatttatatttcttaggatacacagtactaattgtttagccttggaaaataggagggataccttttcttgaggctgasggcaagaaggcatggcttttgtacagatgctttcaagataagaaagaacaaaacccaggacctgattagacttactcagtatagtagtagttgagtcatctgctgagagtggagataatgaggtgtaattacagcttgaagagagtgaaagcaaaattttacatgtttcttttgaagaagatgatgtacaagcagcaggaagtaaataaaagaattgtcgggtagcagcgacgacctagctagaagctgataggatggttatggtgcacaggagtggttcggagtggagcatgtacttattcctgtctcaagaatagtagcccctcgatcataagaatttggatggaagactggtttttttcacagaatacattaagtttttataaactcctggaacttcagagctggaagaggagatgtatttaagttcaattcttgatattaataaaaaacaatagaaattttaatgtacatatataacatcgcaaaatgaataagcatttattatgagcattgtttcataaggcataaaaatataaacctcatactcccactttttacagtaagaggtaactcaccttcattgatgaaagttaccggtggtatcttgaaagggcttttggtgggagaagttgccagatcaggtggtggcattaaatctctgggataacctggatccctctgaatctcgttacctcccagcagaccaggagtatactgytggctgttaggaatatgttgtggcaccacctggacaagtgggggagacacatgggtgtcttgtcgggaaaatatcctcaagcactgttcttccaacaaagtgatcatcacagattggttattgacaagatcagtcaaggaagcgtatttcacctctagttccctgtatcttgttgccatcttcaacatttctgtggtgacattgaggattttgttttccagttgggaaagttcaagtgaattatccctcttacggataatctcatgtaataattgcatatagagttgagtaacacgagagttcatgttacggctttcctttctcagcagctttacctcattcacaatgtttccatctacatccaccaccagytgcagaacatctatctcccgcttctgcctggagagcacatccttcaggttttcaaggtccatcctggtgatcatgtctttaatggtacttgcatcttgccccttggtgttgacacagattggccctgttattctttgttcaggtaccaggaatgtgtatgcacatttctttgcttcctctttaccatctgtggcacgagggtatcttctctggtttatttttttaattttgaattgtccacctctgcaatgtccagtgtccactagtaggaagaatagcacacctagggtccaggtaaaagtcttcattttgaaatgaggttgtaaaatgatgtcttttgaaaaacaaatcagtgaaggagaaaaagcaaaaagaattcatattaatctatgttaaagtcagtaatyttaaaaactatctgagggaaaaactgaatatttattggtgttaatagattaggctagaattaactttattaatttyttaaatttaatattaagttgtaatactttggcatttgtttaaagattaggtttcagagaataactcttccagctaccaccttattgtaatcctttttgttccccagtttattgagcagattttggtcagtgtctactctgtgcaaagatacgctgctagtgctgttgaggcttttgagaccctgataagatagctttcttacctttaaaaagctcactgccttaagactatgaaaatggtacacagtgtttgtaaggcattaattaaaacattcttgcctaactagtattaaaattaccaggtgactttactagccaatgttttagattcataccatgcaattccaattaaattgatcctctgtaataaattatgtcatcttcattaaaatgttcaataaagttaaagattttagggaaatctaaacccagatagttttagcatcacatgctttttatttttatagcatctccttttgggattagtgacaggttttagaatgatagaatgctcacagtcattgtgggtaattatatttcctgaactgtaattatatgtactctgagcttatagataattcagcaggtttgttcttctaacagaagtcctactgaactgtattttagtaaaatgttagtaattttctacaaccattaccaaggaaagaaacttgtctgtaattgaatatgaatgtcagagttggaaatgccttagagaccctgtcattcaagaacctctttgtactctgtgcatgttgaaggctaaggccacacaaggattagaaccaggtctagatcggattctctgacccatagtcagtatttatagaagcagcacctatactaaaatatgtgcttagaatgtttcgtttttgctgtagcagatgagaaatacttctttatagtacaaattcttctgaggaaacagtttcaagagccaagactttttcctttctctctagttacctcccacaagagtagcagaagtagaatgggtaaggtatgttcactctgtcagatctactaacgagctggtctattacaggccaccttttcactcttgcgaacttcatacctatctgccatttttgaaggatggcagtggataccctaagacagagcttttctgtccaaatttccacataagtacctgtttcttgatttaagaaaccagctcctaagttgtttatgcctgttgttaataacaacacaataacagtaattaatatttattgagtgcttgttcagtgttaggcactgttttaagccattttcatgttttacttatcaccacaaccctatgaagtagattattatgatccccactttcagatggaaaacttggcatccaaaagttaagtaccttattatcaagagtcacacaggttcatagtgatggagcgagaatttgaatccaggctgaagacttcagagttcatgttttcaatcccctgtatttatgtagcttaacacatgttaactatttgcatttataacactgaagtaatgctgtatcattttataaaggaggaaaatccttgagaagctaaatcactcaaatgggattcaaaccttctactcctaacttttctagacctatgatttttaccctagtcatgtcataaccacagaggagtcttaagtttatgtttcttgtttttcgctgccttttcctggtttatgtcccttttcattgaccggttacttaattatgcaaaagtatttatggataatttttggtagaatttgtgtccacgttctgccagatcatttttttacatctcagactcttctgcggcaatttctttccttctgtatgtattctgtcagctgatagttatatatctaacctatgattatggacccctcccgaaaacaaaggtcaygtcaatgaaatataactcttatgctgtcgtcatgaagactactgctactttcactttctaaaaccatgttccttttttggtatttttcaattgaatagtgtcttcaaaatgggtagataatgaaaataaggcaaatatagatggagtatggagaattattattattttactaacaagagagggaatgaaaacaaaagatagggaggacataacaatctgtatttctatcgaggccttcttttgctgactgatagccaaagcacacatgggtattttttttagctttttatgttttcataccttgctttctgacatatatagaaaatttagaaacagtcatctattttatttttaaaaatagacttttactatrtaggagttacctataccaaaaaccaataaaacatttattatatctccagattcgtggaatttagatatgggttattttaaaaactagggacaagaaataaaagccatcatcctcctgggcacatgcatatcatttttcctatatatttaatttaacttaccactgctaaagtccattcattttaatactagaatggaaactctgagatcataaaattattttacttaaataatatttactatgaaataaactaccaaaacaaggaaaatgcaggaagtaatataaaactctaaaacaaatagaattttatgagcaatattctgattgaacagcttgtattaataccagacacagatttttataaaacagctaaaagcgcatcatccaagactgctgttaggactttgcatcagtgttgtcattgaagaacaaaaaacaccaaaatgctaatctaaattaaaacaaaaacagcttccttgtgtgtattctgccttggctcattgtggttcctataagattaaatcataagataaatcactgtttaccataagagaaagtggtctaaattagcatttaaaggaggcaactaaaagtttagtttttaaataaatataatttttttttaataaatacaaaagtattggcttcactgtcacttaaagcagggcaaggagccacatttcttaagtagtagactagctacgtcaggagtaaagaactggttttaaaaatacatttactgttatgttttctgaaaacattctcttatttaatattttctcacatatgttcagttttgaagcaaaagatccataaatctatgttacctcataaaactttctgtatatgttaaaattttcctaggccccaagagaatgttataaattagttatagaatacttacgtttaaatttaagtctttacttagttgtttttagaagagaaaaaaaagtcttctatgcgttgggttaattttattagtagcttttctcttcatagttgctatattgccagctagtagagagaagaaacgaaagtcaggatttgcctcctttcagatggtaaactcacagaggcatttaactggctgtgtcatgcactgaaaacagcatgaggcaatgaagttaaatttatgaagcattcaggatatgttagataaagaatttctagattgtgaaatatgttctgggaagagacttgagaacaatctaatcccctggatatatttaagaaaaggataaatagttatctgtgtaatttggggttcagattaaatgcctgccttaagacagcgtcagtaagaactgaggcttaatgaagtcctgcacttcccatagcatgcaacaacaaaaaagagagatgacagtatttcagatccactgttgcttggaaattttgttagaatttcttgtaaaatatgtgtttaacagaaatcctgccagcatttacagttttaaatctttaaggaarggacacaaaagcaaagttggaaaaaattttagctttaccattatttgcttgttcaagattcttaaccattaatatctttaatttttacaaggctaaaggagccccaaatctaacaaacttaagtgtctttggtttaaggcatactattggtaacgagtaattttatctttaatagtttttataatgcatgtaaaaaaagctcccagatagaatattgaaggaaacctcttatgtgtgcttaacaaaattatttctacctaaaatattacatatttttggccttttagtcatgaatttaattacatcttctgggttcttattttctattgttaataccacttacataatgcttttgtgtgtatatcaataacttagcttttccaagtgattccatttgtagcaagtttaatttctgtcatccaaattaaattactattacatgtaagcctggaaagctatttaaaattttgagttggaacaagaaatgccatagattaatcttaaatctgtacaagaatttctgcttaatatttggttatactgtaattgagattttgttgcaaagactttcaactatttttgtatcttagctttgttttatgactacactgagaaatccaacagtttatgtatatcttcagcacacacactgtggctgcaggaagagaaactaattgtgttcacgactatttagtttgtattcctttgtttttaatcattgtgctgtaagccttatacatttaatctgttacttgttaaaatttctttctactgtcactaaagcacttgttttcagaaacccagcatggcatgcatgtatcagtctgtaatcatatacactaaacatcattaaattgaacctcaaataatgcattaaccattgcacagtacttaatgtttttatgtcaagttgcaagataaaacctttttcagatgagataaactgtagtatattccaaaggtctttgtttagtaaaagattctgaaatttctactacaaatataaaatagttatgcatttgctatacataatatttttaaataaaagaaatattaaatacctttttgtgtctgttgattcagtgaatccagaaacttgctgcccttattcttgattttaaaaatcagtgtagaagtttgttcatctgtgactttaatggcagctgcatttttgttttggaccgttgaatccaagctgtaagaaggaacttctttttccttttacaatactaatcaattgaatttgacaagccacctatgtaattttaagtagtatagtggaagttctggtctgtgggccgtctttaatccagcagagaaagcgttgtggctttgctctgtctgccacatggagaaatgcagtaaccagctgcagctgacccagattgtatatacagtacccctgaatagtgattccctctttctcagtagactcaagttcagcccacatattacatcaccaaaaattgctggagactgggggcgggaatctccttaggatttcctctttgtagccttaaataggggggtgggatcagcaggaggttgaatagttttgaacaaggagagattgtgtgcaggttgaaggaagggcaccatctggaaacaaactatcatagttcagcgggcaattataaaacaaacattttagtctgctggccagagatcttttaagttgaataccgaaaaaaaaaatagtgctccacttcacttagaagtagttgcaggctgatgagtttggtttttgttaacaaagaacaagagctagactttgtcaggaggcagccacctaaataatgtaataaatactctttatagcctagaagaatttgtaaacattttacwaagttgctaatgaaggttttaaacttacaagaaacttgatgttgttgtagtatgttatgtcttactgtgtaatgtgtcttaagataaaacagcctttatatataattaccaaacataagtgaaattctttcagatgcttaagacttttaaatattacattctggtgttacataatgtcatatcctcctattctacaaaatgacctctcctctctgtaaaaggtcattcttgttattaattgatgtggtgtggtttaaaaacaaacataaccctgaactgagtaaaaaacaaggaagctctgactctatgccagctatgtgaacttagacaaatcactttacctgcctctggcaaggttcttctgctatgaaataaggtggtggaagaaatgaataagtgttgagtacaactatactattgtatttcattaattgaagaaatgttaaataactcagtagctgaagaaacacaaacttaggcttaagtaacttagcttagcacttaagtactaagtagtggaactgggatttgaatctaatgccaaagcattatgccacactctctgtcattgattacctagttgctgtaagctgcttctagataaaacttttgggctttctctacatacctgtgctttcccttccttattgctgtagcttgtgctgtgtttctctttctgttargccacactgttgatccacatcctttatttaaagtctgagcttattttctacctctttcacagaatcatttatttgaattcctatgccatatataggtataccagaggttgcaaacacaagggcctagaaaggcaaatgctcacaagaagaatggagcaggtaatataaatcagtgaagtaaatcagtagtaagatactggagggaaatgaagtttatggcaagttggcatccttttggttaatttaaagggatctgcctgcaccttctcagctgtgcttgtggccatgaaggattatgagacagtgttgccagatcttcccattattcaggaaaaaagagccatttagatttttcctgtaatacttcctgattttaaaaaacattgggacagatgtgctgccagcttctggcctctgatttgtattatgtatcgtttcttgagcattcagtaattatgttgtagtcactaatggcttaaatctgggaaaaataagagataataaattctttctgagcttttaaactttcagcagtttggagctttctaacttgagcacttagtaatatcactagccagggtaggaaattggaatgacaggtatttagggacagattatggttagatatgttaaattgaaaatgaaagtcaggagctcagttatatggagagatttgaaagtcaccagcaattaggtagtagctaaagctatggaactaagatactagagaaagtacatgtagaatgtaaaggaaggttaatgacagaccatgataccaatttccaggaaaccagcttacaagaaacatgaggaaaaagaagaatggtgggggcttagggggaagatacgaaagttcaaggtagggaaaacctgagaactagacgagaatggttacaatactgcagagacattacatagggaggggagaccaagagagatgttttaagacttagaatgagaaagttattaatgccattgccaaaataagtgatacatacagatttcagattatttagtgtgttgaagggtgactagataaaatttaactgacaaattagtgtccacaatacattaagaaattagaaatccataagaaaaagacaacccaaaagaaaaaatgaacagaaacatttattacatagaaatatatacgtttaaccttattactaatcaaggaaataaaaattaagacacagagagataccattttatactcagaagattggcaaaattgagatggataataccaattgttagcacaaatgtggatcaacagaagcttatataccgtgagtgggagtatgaattgatacagctttgaaaaataatgtgacaccatcttgtaaagttgaatattaatatactttagcacttggcagttttgctcctaggcatgtttgtatatcctgaagaaattttgtacatgtgtactgggagatgtgtataagaatgtctatagcaacatggttgggggtgggatgggagtaactcaaaagtctatcaaataaaatggatgagttacaattgtcacacatkagcttgttctcattataaggaattacagcagcatttaacagcgtggacaagtcttagaaacaaaatagacgaagcaaccacagaagaccatatttttaaattttatttaataaatgcttataaatcacttggtatgtactagacactttttttttgagacggagtcttgctctgtcacccaagcgggagtgcagtggtacgatctcggctcactacaagctccgcctcctgggttctcgccattctcctgcctcagcctcccatactagacacttttctaacattacaaatactattatttaatccacacatacaataaaatatgatttttaaagctcaaaaataggcaaaagtaggaatacagacaaatgtcggggaaaaaataagggaatgatcttaaagttcaaggtaatggttacttctggacaggaagcaaggagatgaagtagagaaggaacatacagatagatgcaacagtattgatgatgtcgtagttcttttttaaagtagtttaccccaacatattaaaatattaacatgtaaccaataaaaaagttaatagatattttacattaatttttcatgttaactcttcaaaatcttgtctattttatattcaaatacacctcaattcagaatagacccacgaaacagtagtcacatgtggcaagtggttatattggacagcacagtatagcgagtgactacaggcgagttgtcatctgagtttaataagatggaagaatggcaagaactggcacattagtaccccgctcaaatcccacttcttccttgaagctttctctgatcccatcagcaaggaatgacatttttttgcacagaattcttatgaaactcctgtttaaacttttctgtgctacttttttatatcttctattgctgttattgatgtacatatgccaacatccccgtgccatttccttgaggaatcttttagctctccttagggatgttgtagtcataagttgactggtctttcacaaatgtttattatrttgtttgataacaacaagtgtcacatgtgttgataattttttcttagggcaggagtctcaccatgttgcccagactggtctcaaactcctaagcagtctgcccgcctcagcctcccgaagtgctgagattacaggcatgagccaccgttcccggcaataatttttgtgaaatcacgattctcacacaaatatgaaatgaatatgtgtcagaattttcatttaaattattaaatttataagggaatcaaaaatgtgtcaagggagaattcaaagtaacacacatatatgcaatcaggaacgctgaagtaaatttacaaatagttgcaaaattggtcatcactgattagatcccactggacataattctttggcatgtttatggacaataatttgtattaccagttttcaacagctgtgcagagttgtaaaatagctcagaaggaccaaatgggtgcactggagacaggatacccagtaatcttttttcccatctcaaagtttttcacaattttcctgacacatgtgtatcaaatattacattaaaaatagaacgaagaataaaagaagtgtactattgtatgtttctcttccaaggtgtttgttgaagggaggacaaggatgttatcttgaggcgtgggatcagatttgaaggaagagttgcttagattttgttttataagtaggggagatttaaacatgtatattgggccaggtgcagtggctcatgcctgtaatcctagcactttgggaggctgaggcgggtggatcacttgagaccaggagttcgagaccagcctggccaacatggtgaaaccccatctctactaaaaatgcaagaactacccaggcgtggttgcgcatgcctgtcatctcagctattcgggtggctgaggcacaagaatcacttgaacccagaaggcagaggtggcagtgagccgagatcgcaccactgcattccagcctgtgacagagcaagactctttcttgaaaaaaaaaatggtttaaaaaaaaatatgtatactggctctggggaaggagccagtaggggtgaatgatagtagaggcaacagtggttgtctggaaggaggcagcaacgattgcattcaaaattacagttgagatttcggaagaagagagagatgattcttcctccaagattggggaaagtgggaagaacctcagcttcatttggaacctcaagattcatttggagtcatagggaaataaagttgaggttatctaaagaaaaaaaagtatgataggtgacttaaagaatactgtaaagatttactgagtggaaaatgaatgatactaggatgagtaaaaagattgccatgccaaccttttatgttaagcacctattgtcaaaacattgcacaagattttctttctcttggagtgcaagatagagcaactgccttaaatgagtttgcagtcttgaatagataagatataaatgtaaaaaaaataagtaatgagattttgaagtcataaaagtcattaagtgaatagtaagcacacataatgtatgattttttaatagaatataagtaatttttttttaaattgggctataagtgaaacgtctgagatccagctgtcactaacaggttgcatggcattagacaggtccctttactatctatgtatttcaggttcttcatctataaaaggagaggattagactagacagtgtctgaattcctttcttggaatctgtgagaaaactagagaatattgacaccgaattagataagcaaaatataagatttggataggcagagataagtccagaaaacattttaggtataagaaaaagctgagtaaaaacagggtttatttagaaggcagtgggtatgtcattttggttgcatttaccctgagagtacatgaacatgaagtaatggggtaaaagtaggaaggtatgtttttcttttctctccagctatagttgtctaatacatttcacatgtgcattgtgaactctccagaaataaacttaaataagtgacctttcatgttaaggactagtacaaccaaattttagaggatgtgttatttttgttggtacaaaaagcatggagggtaagaaatagttaacttcaatttgtagtcacatgaaccatttcagaaatttatttgttgatctttaaaatgtaaaacatttctaccagattgagataattttcaaagtagttaagactcaaatgatagctatcaactcaaggcaagagagtaaaaacaaatattaaataatttccctatgtcagtcagtggctgggctgctggctaaattaatatcttcaagttgtaacacaccttggaaaatggatacttgcataggttttaagtctgaggttctcagtttaaaataactctccattatgaaactagtcagaggcagagccaattgaagaactcagctcctttccattaattcccatatgtgctggagtttctaactctagcctcaaactatacttgaaaatgaaatcacaagaagacatttacaaaatagcatattattacaaaaaattggtatatgtctgaccccaactgtatggaaagctaggccccagtaaccatatgttacccaggcttcagtgtattaatagcaatatattttaaatgtagcgtacagtggaatatatctataaacaaccccttccccccttttctttgtcatagtctcccaacctacaactaagaaaacgttcatttatctaattgtatttcaggtatctatttgtcagatttaacatacatcgattcagcatacccatcaactggcagcattctagaaartgagcaaagatcaaatttaatgaataatatccttcgaataatttctgatttacagcagtcttgtgaatatggtaagtttctaggggataatgccaagccattaagattgctgtaatccagtgatttatttacacacactgatgatcacttttcacacagcaggggacatcaatttcttatttccattctaatgtaaaggaaaataatgcttgttttattttgccatttactatgtagcatcctgtttaagatcttgcttttaaggaatttaagtatttaatatttaaaatttttatttttatattttgcttttctgctattttgcagcaactttctcacagcacaaaggcactaagtatttaatattactacctcacagctatttggccctttatagcacagctatttggccctttatagtttacaaagtcattttctagtcattttctattatctcatttgatctccctgatctattatgtaaatcgttcttacagttttcaattagggaagtatagctgagacccttgagcctcgtgacaattgaccaactttcttgagtcagactatcgagtaaatagccagtttttgtccaacatgtattttatggaatgacaaatatagaaacagctacataagcccaaatgatgagaaaaggcattttttttaatgtttaaatacttccagtttgataggaaataaagttaggctgttaatacataatttttatgggttaaaaaactgagttttacattatatgattacttcaagtgaatttatcttaaagctaacttttgcttcatgcatctatactttttagaaaacctcaaaaacttcctaaaactatcagtgtggagatagaatcttactgaaagttaaatcaaataattccttattttgtccttttctcagtattttaaacatagcatcaagttgtgatgttaaattaatcttgcttgaaacttacaaggggaggagataaaccacatttataaatgggaaccaggtttctttaaaagaaaagtaactgccttcatgtcttctgtttagtttagaatagttcttgatctttttctgtgaaatttctcaaatatatgggactttataattggagctattaaaaaaatacaacaatctatacaaacaatatacaactgtaattttctaaattaccttcagattcacattaaagtttatctcagtaatgtccttctagagttaatttaaattttgctgccatgtggccttaatttacctttaagttattttcagcttaatttttaaagttctggttaagatgtactttatcagataattatttatcaccttttgcctagatattcccatgttgcctcatgtccaaaaatatctcaactctgttcagtatatagaagaactacaaaaatttgtggaagacgataattacaagtaggttggatcttcaaaagtggtttgtataactttgtcctgtcctccacctttctatccctwtgtatttaaacatctaaatcctacatggtatcrtacaaaggactaatccagtggtttacagcagtaaaggtactaacatgtattacttcttaatcacttgttatgattgagccaatatacaaatacctcatctgttctttttaatattttatctctgtttgtagagagctaacgtttgatagttctaatttaaatttcttcctttcccccatattcaatcattgaatccttatagaatttgtcttttaatagacagaaaaattaatgaaactttttaaaatagaaaaattactcttctttaatgctaagtattgacacatmgttgtttgtttttcattgtttttgcggattgagagacttggtccatcttgtctcaggagaagaaacctttctccaatgtagcagaattatcctcttccctgtattatagcaagttctttattaaagatttttgaggccgggcacagtgactcacgcctgtaaccccagcactttgggaggccgaggcgggtggatcacttgaggtcaggagttcaagaccagcctgaccaatatagtgaaacactgtctgtactaaaaatacagaattagccgggcatggtgcatgcctgtaatcccagctgcttgggaggctgaggcaggagaatcacttgaacacaggaggcagaggttgcagtgagccgagagtgcaccattgcactccagcctgggcaaaaagagcaaaactccgtctaaaaaaaaaaaaaaaaaaaaaagattgtttgaaatcatttttaaaatagctgatatccatttttatctccttatatccacagtatttcccaaagatgggagaggaaatttttaaattattaaccctttcatctttcgttgatacagtttacatcaaaactgctgggtttttttttaaggtaggaggataaagagcttatttctcttgaagcttcactcttttcttttagcttcatttgttactttttttaaaaagtttatttagctttattatcccatttgttcgcaagctttcaaattgaattttgcactttcacaaatattttttccaataaaaggtcgtgtttcaaaaatttatcgaagtgaaagactagattatttttcagtgttaatgcattacatagaaatattttttatcttcctttggtaatgaktattaacttcctttttccagattttgacagtttttaaaaaattttgtagaacagaattagtcccagtaaatggctatagaaattctggaaaacatctaggaataatttttctaaatgcatctaaaattttactratgtttgaaaatgcctttattgccatcttctctctcacaccataatagcaacactgtatttctgtaccaattttcagtctacaaaaagtttctacatggttacttacttgaaaatgtatgaagtcaatgaagaagctttttaagactggagttgtttcacaaatctgttgccctaggttgtttttcaagtttgatggtctgtgtcttatacttaccactatttttcccttctctctaattactgacatagaactcctacctaataaatacttaagttttgtccagtgagatgtagaacagatatcttaaaattcaaaatgtgagtaagtagctattagtcatttatctggctcaagaaacttactgaatttaaaagaatttaaagtttattagattgaaatgtaatctaagaaaattttgcacagtttatagaggatggcaaattttttgtgactactgtaaaattataatacaatatttattaaagctagtttttactttgctaaaagggtagacttagccagtgaagccatgaggtagttctgacattctgtaaattgacatatcatataatgccttcatttttgtaggaaagctaatgctattatactggtttttgttttcatgaggagctagaaccagagcagcccttccattacattgacatatatttactaaggttttgttataggccagttactgtgctagttgctgggattataaaaataagatactgttcttgccctcaagaagctcagtctaatgtcagatacatccacaaaacagatgattataaaacatttcaaacagaaccataataaagatatgccaaggatgctatggaaacatagataaggggggacctaacctagctttacctaggaaaactaaaaggaaatatgaacagcttcaggagacagcgtcatctgaggctgaatcttaacaggtgagtgggagttagtctcacgtgaagggtaaggaaaagtatgctggggatggaatgatcaaaggaatgggataagaaacagtgtctttgcatggcgaacgatgagtcatttggtgttattgggacatcatacggcactagagaagacattgtttttctttttcttggagacggaatctcactctgtttcccagtttggagggcaatggcacaatctcagctcactgcaacctccgccgcctggggttcaagcaattcttctgcctcagcctcccgagtagctgggattacaggtgcccgccatcatgcccggctaatttttgtatttttagtagagatggggtttcaccatattggccaggctgatcttgaactcctgacctcagatgattcaccagctttggcctcccaaagtgctaggattacaggcgtgagccaccgcactcactgacagattgtttttctaaaaatgcagtgtgttgcctgagcctaataatttagtgtgtttgaaaaatagagcattttaagatgtcattaaaattattagaaaaaattagaagaaaacattttttagaaaaaatgccttttatgatgaaaaatttgtaaatagaaatggcatgtcacttacaaaaggcctgttttgggcaacttcatctacataggcagccagtatagatattacaaattacatgtcttttgatcagggtgaaaattcttctgggtgattttattttaatactgaacatatctgttcttaatgaatcagcatctctattataatgtggtgctttgacgatgttgtaagcagctggcactcagactagccttcactgctttttaaagatgcctctgctttttatattgctgtcagtttctaggtgctaccaatagcaatgtgattcacccaataagctccctttctgttcctttctattttggtgccattgggaaatggtagttatttcatttactacttttctttcatccactagactgtaagcttcagaaggacaggaataccgtgtctgccgtaatctctattatattccagttctgagcacagtgcccaacacaagtgttcagtaaatatttgtcacatgaatgaatgcagtatagtttgtagcctaaataattaaacatcttcataaaaagaaaaagtctggttaatcatttatctattcaatatatgcattttatattatcaaataactggaatataattaataacctacagtagatttatcattataaatgcctcttgtattattcaattatttttaaaattttagtcagtagaatactaaacagtttttattaaatttcagacagactccgcaatattaagcttcgtgtattacaccaaagcattttctacaactactttagtgtcctgttttctgaaatagcttccactgatagaaatcataatctctttcactgtgaaactcagaactggatatattatcctaaatgaaacttaagtaccatataataaactctgacttaggacagggacttactaggaattttgcaaacaacatttttatttgtatagatctttctgctgaagagttctgtcagctggtttgttagatggttagttttaaataaggtgtttttagaaataatttgcataatatatttaataatacatatgaaagtttctgaatttaaatgtaaagtatcagtgtaagctctaagttgaatcatcatttagtcattcatcaaatatctttaaatgtgttccatggtttggcaactttggggtaattggggagatttttgtgtttttaaatacaactttttaatgtattttcccttcctaatatttcctaaaataaccataagatcagctttgtatgaaagagataagagacttaacatcttaattaaaaattgcccttggccaggcttggtggctcatgcctgtaatcccagcactttgggaggccaagatggaaggatcgcttgagcccaggagtttgaggcttaagtgagattccctgtctcttaaaaagaagaagattgctcttgaagaaaagtatataggtcagattatttcataaaaatgtttttagtttttttgtgagaaaatacacaactttaatcttattttgtcaaatgttaattaatcattgtatgtattttgtctttttaaaattcaggctttcattaaagatagaaccagggacaagcaccccacgttctgctgcttccagagaagatttagtaggtcagtacgtagttttctcttgttaccaaatctaaatcagataacctaataaggaagaatatactccaaagtaaataaaaacttagtacatcttatactgcatgtaaaatttattttgatattaaaatctgtcctttctgggttttttggtttttaatttaaaagttgctggccgggcagggtggctcacgcctgtaatcccagcactttgggaggccgaggcgggcggatcacagggtcaggagatcaagaccatcctggctaacacagtgaaaccccgtctctgctaaaaaaataacaaaaaaattagccgggtgtggtggcgggcacctatagtcccagctactcaggaggctgaggcagcagaatggcgtgaacccgggaggcagagcttgcaatgagccgagatcgtgccactgcactccagcctgtgtgacacagcaagactccatctcaaaaaaaaaaaatgttgctatagtttgtcagtagtgtacaaacaagtatgctacctaatcaaggaaaatagatagatgcaacagatggaaaataatagataagtagttatgaatattcatttttgattaagaatgcactgtcctaggcaatgaaggttgattacactagaaatttctgtggtctaatgggaaagtctactaatttgaataattatagaagtcaattttagtgacgtaattttttcaaatgttcactttaatactagaccaagtattaaaaatgtaaaaatcatagttccttactttacctgttacattgtaatggggatattatgcatataccacaaataattttttaaaaaacataaaattatcattatttaagaaatccctgataagtaccttttttaaaattcccaatataggccttcgcactaagtttcatgtatattctaaaaatatttgatggctaatctgataagatgtgaagaagtggagaaacaaaccatgacaatgtctatggggaagaatattccaagcagaaaaaacattgcagtttaaatttcttaaatttgcttttctttttattcttaaagtgctgttttgcacttttataatattcttttatttattcccataagcctgaacagtgtcagtgtagatttaatttctgatttgagtgtttgacctaccctacacattctttatctaagaggaagttgaaactaggagtaaagaagtaatgtataaaattaaaagagcactgaacctaggactcagaagacctgtgtgtttagtccrgattttgtctgtgatgtgaaagctagtctcttctaattctacttcttcctatgtaaatggagaaaatatttacactgcctctacttagtataagtaagataaaaattaatggattttgtatggtttgkgattttgtgttttaggacttagatatatttctcatcttcaagccaattaaatagaactaacatcagtactatctcaaaatttgaaccacatttaatattttctttcaagggaytgaaaaataaagtaatcatttgaaaatctctttaaatttaacccttaggtcctgaagtaggagcgtctccacagagtggacgaaaaagtgtggcagctgaaggagccttgctcccacagacaccgccatcccctcggaatctgattccacatggacataggaagtgccatagtttgggttataagtcagcatttttaattttatctttcaaatttttaagtcttttgtaattggatttattgtcgatttattagttcrgtagaaaatggtatccttgaatagttttcttttttcttaatagctgttttctgattcagtaaaatgccttgtttgcctaaaagcttttatttcttactttacctgaatttggaaatgggattttgtcaacaatgcatttatatttggggacgataaatgaacattacagagggccatcataaataaaatcaggatagcaatatacctttttaaaagagttacaacctttatatcaagacagtcattgtttgtcttaaccaaaataagtcaaaaataacagctataaaaattattttctttattcctaaatataaagaaaactgactttttgtttaacttcattagttttgcagtattgttttttcaaaatggggacacatgttcacttttgccatgatttctctggaaatgtaataactgttctccaaaagtgaatgtggaaacaattttttaaacggacacgaggcttaaaatgaaattattttaaagtatgctctaattatatagatagatagggccaggtttcctaaaacattttccctaaactgttcatttgaggcttttatggtaagatctgagtatgacagttaggtaaatcttttatgtcctaaatctttatataaagagcagtttttaaattagtaacaataataaaagatatgaacttttttttctgtttctagtttcattcataaaatgaacacagcagaatttaagagtgcaacgtttccaaatgcaggaccaagacatctrttagatgatagcgtcatggagccccatgcgccatctcgaggccaagctgaaagttctactctttctagtggaatatcaataggtgagaaatacttctctgagagggttgcaatttaactttaaataaaaatgttaataaaacttggctggaaaaaaaccccacccacacacagagaaaatttggttaaaaaaacaaagtagcagttaaatatgggatgaagttaataatttgtgatggttttaaaagtgcttgctgtttttaactccagaaggggaagcatttgaagaaggtggaaaaagaacatatgggctggttgaattagttaactgcatgtgatttggatatggggaggaggaagagtgtggagtcaagaatgacttccggttatttgggttaaacaagtataatagttagatgatgatgctattaccaaggtagagaagacagagtaataatctgtgggcagtgaagcgtttgtgaatttggggaatcaggtgtgttttggacatgtttagtccctatggagatgtcaggtaggttgttgaatatgtgaatctggagctcggggataaggtcagatctgaagatatacgagaggtagcatatttataagccatgattggttgagggtacctaaagagagagtgtacataaataaaaaaacattctcacatttagaagtctgattattttttaaaagaaggatgagtcatcaaaggaaactaaaaaggagagatcagtgaagtaaggggaaaaaaacaaaagcccagtagatgaagtatctcaaggaggaggaaagtactgaatgtgtgaatatcaaatgcagaacaagagagctaagatgagaatggggaattgactgggggatttggcaagataaaagtcattggtgaccttgataagagttgcttcatggaagtgtcagggcatggcctggattggagtagatttgaaaatgagaggtgaggaaacagagatagctactgtgaaggagagcagaaaatagagaccatattagaaagggatgtgagattaagagagggatttgtttgtttttacttcctaaacttttaatttttgagtcttctagatgagcattatttcttgttacaattagaaattattcatatagcctgggcagtgtggctcacacctgtaatcccagcactttgggaggcccagatgggcagatctcttgaggtcaggagttcaaaatgagcctggccaacatggcaaaaccccatctctactaaaaatacaaaaagtagcagggcgtggtggtgcatgcctgtaatcccagctacttaggaggctgaggcataggaatcatttgaacccaggaaacagaggttgcagcgagccatgttcgcagcactgcactaccctgcctggatcacagagcgagattctgtctcaaaaaaagaaagaaattgttcatataatagctacttttatttttaaaaagaaataaaggaggaatatgtcttcatctatgattaactaccagattgttcaaggactaagcctattgttactaatatcttaatattggtaaacagccagtagaaggagatgcaaaaggagattgattttctggaacatactgactttcttagcccttgagagttaaaattaaattatttcagagctctccattaccattcagtagttgtttattctgatagtcccctttttatataaaaatacaagtgattaaatgataaaatgttttaaaaagaaggcaagtttgtcacctgaaatacctcttatcaatgttctaagttgcctatatgcaaatactaatctcagtatgaagaataattttgcaaaggaaagaactttttttcagtcaaaaattttctacacgtccatggaatttggcatgccacttaaagcaaaaagtttttaaaattacagctctcaagtatataatattttactctttctcataagtgttataatgagaattattctgtagtttatagcttttacttttcatggatgtccttttggctaccaaaagattattgtttagttattttattgagttacagttagtgtctcagtgtggagacttttctcttttagagcagatttttgcatttgtgtttattttttaattattctaaggctaagtaagtaaacagtaaaagatcattgcatcctagtttgtaaactaagaacattacacataggcatttaccttcgaggatttttgttttaaagctttaacaatatgaaaaaaagaataagtctattaccataagatgataggtgttaatatacacacacgagtttttccctcagctttaacttttacatgcaatattaatctacagtgaaggctttgaaaatactgtgggaaaattaaccagtgcttagaacaatggccttaaacattttctaatgtggtatctatcctagataatcttgagtagtctcacctagctaactaagagaagcatattcactctgagcttcatgcttacattttctacaaataagttatcctaattatgcttaaattttcagtctttaccacatagtgccacaaatcaaaggataatgtagataatgtacaagaccccaccaccaccacgggttacctctggttcttctgaaccatacaatacagaaaattatttcagtgattgttatctcagtttatccaaggatggtacataactagtgccattgcaaacccgtagaagggtattaatccatcgtctctaagagagacgagtctaatggataccttacagcatccattacaggtgtctgatggataccttacagcattagaatttgagtctctcagaaccctgcccgtaaaaaagagtttgagtctctcttcttagaaccctgtctgatagacaatttaacttgacctattaatcatcctaatttttttgagagccagaattacctttaaagtaacatttaagtaaactaagctgttttggactctctaaattcattccccatagtttttttgttggttttttttccccctagctaattgtaaacgttctgtttgaagaccattttattttaactgatcttttggccaaagagaaaattgttgcatttttatagcaccggtttttggttttttaaatttagagattccatcttctttgtctctagagacaaataagtggatttcattaggctttttatacttagggtagtaatggactttaatacaaagagaaaggagtatgccatgaatcgtcaaggattttataattatattggtcctaaattatgacaaacctaataagaaattttgtgttattttatgttctctaatggtrggaaaaattgtttattgacataatgaatttcagctacaaataggcaagcaaaaatgttttatgctattttgttattttaggttgtcgtgtcaactgtattccaatatattgcaaaataaacctaacagcagtaatattagaataaagaattaatatgtggatatgttcatctacaatgcgattgtcattttatgagcatagttaattaatttatttttamattgtgaaatgcaaactagagaggtaattctgatgtttaaaaaatagrataacttttcattttaggtagcagcgatggttctgaactaagtgaagagacctcatggcctgcttttgaaaggtaagataaattgtccatttgaactacttggagtttattttgtctgggttaaataatataatacaaattttcagagataatatttactacatatccctaagcgattaagttttctactggtaaaagaaattagaagttgatatttaagtttggatatgtaagtaatgagaatgaatgatagtcttatctctaaatgtttatttggtggcatgacacatgtatttgaattttaatacatttacatttataacttaaaaataataaccgatcatcgacaagtaacctacttacatattcaaaaaattatttccttaagttctggttcatttaagtaattttaaggcatttagtggaatggtcaactttattctctgctgctttgtcaaggacaaaatgatttaataaattttaaattatacaagtaaagcaagttaaggttagaatttaaatggtcataaactcaaaattttcagagtacacttttatactgaaatactctaagttgtgctcccttctccttcctttgttgctttaagctgttaaatctgtcatctgcctgtagcaaatatcatactatattgaggtctaagtacatataagatctgaagaatgtgaccaaacaatgcaaataattatttattaaatgtccattaggattcttatgttttcactgaccatttcagttctgccatttcagactcataaggtatttggcttttgaccaaaacaattgctcccttttttgtatatgaactaagtaactaaatttctraaaatgcctatattcattactcaagcgggtcatttagattgaatgttaaatgtcatattaatactgaagttgaaaatgtgtaattgcataactccttatcagtcacaatttataaaacaattttaaattaaattttatttgaaatcataaatttcatgctgtttaattggaaaaatagatccttattttttatgtgacttcataaagatttctcactattatgtgattaagattttgtttataagttctacattgcaaagtacttttgatcctttctactctaattatcagtgttcccaacttttgttctctttgttttgcgggataataataagtaaaaacaaattatttttatttatttttgcattatttttcttgcaacctttacttctgatctgttcatttgggtttgcctgaaatgtgaaaaacacaagaattgcctttgacatgttgtctgaatttgttcaaattgtctttccctctagaaagaacgtaaaaccatgagaagttgattatagagtgtactgtaatctttatatttaaaaaatattgattaaccaaattgttttttagattgcttgacttatgactaaccagaatggtggtgtgttaaataatctgttctcatcccagcaggttacttatgaagacagtatttaatgatgttaccttcacgtctcaaaacaatttttttgctttataacaggtgttttgctttgcagacatgtgtggctaaaaaaagctacttttcttatgccaagtttaaaatagtgggctcttagaacattttgagaacagtgaaatgaatgctgcccagcaagattcagacatgaaataatagaaagtgaataaagaactaggatataaagtactactcatggatagtgaacttgaaaaatgtactctgaatgttgacataccattttctgttcttattttctagacagacatcaaatacattgtcttattttctagacagaaatcaaatacattgttgtctttttttctagacagacatcaaatacattgtttaagttgctaaaataatgcttttcctttaaaacatcatttatcaacagtgctttcgggttttcctaggcaaagaagtatcagtatttttatgtgtctgtttttattttttttgtttttaactattatgtgccattttggataagtattaactcatcatttttatcatttattggctttgtcagttaatgtagaaataatataacgcctatattactcagttcatttcttttatttactataaaggataaagaggaaaataaagttttcctcatgagtttacaagccacattgcttttaggtgtcttcatagggacatataataaaaatgaattacttatataaatccgggcatcatatttaaactagaatccaagaagtggtatagaaacgtaagaatttttgaagtatttttgaggttttttttttattatttggctataaatagctctttaattcttttagcagatttgtgaaagtgaatgtatatgtaaatatatggtgtgtactaaatacctctaagtatttctagagtcaatagtagaagaaaaaattttttgaaatctatgctgcatgctttaaaaaagaaagaggaacaatcacatactatccttttgtaagatttagaaagctatattacaagaagaaactattatactgttctaggtattgataatgactgtgtgaataaaagtatatgtaatatatacaatttataatggaatccaacaggaacagattataccattctctcggcccggtgacaagagtggcacgaaatggctatcgaagtcacatgaaggccagcaggtacaattcccctgcattcaggggtcacagaactcccttatggtgttggtgattggcttacatgggtgtggtctgacgttatttcttttctttctcaactaattgatttaaaaactaaacaaattacctagaaaaactttctttccaagatctaatatgaagataaatttcaactattctttctgatccacagagctaattgctaaaacttgcatcttaatgttacatattttaaaatgcttccaagttggtagcctttaaactgcaccagtctttctaatgctgatagtttttgaatgaacaatataaaaatctgcttctttattcrtaagttgtaatcaaagcattttctttgctaataaatttatatttgatttgtctttttaaaaagtttttcagataaactacaggtcctgaatgtagacgagtctatttcataaaataatcatttgtatatttaaattcatattcattcagttgtttgtctggttaaaccaggtctcttttggactgttattagctgtggaggcagataagggtggtgtattgwttgggaacgtggggtttagtggtgatgggtaatcagttcataatacaacaaaataccaaacttcagaagcaaactttacgtcagtttgatggtgtctaatctccgtgcatgtacctccctgaatataaatagctctagcatgaaatttctactggtttataggttcttaagtcactctgaagacacctaaataatcacaaaggaataaactggcaaactttagttttcattgctcttataggaattctgcagctcatgtcaagtcaccagtgacatttttgtcagcatgtatgttttattggctcatgtagaaatcattaattattgtattaaacataggaccttaaatcaattagggaaagatattaaagtgttggttattttgtgatttttttttttttaaaagatacatgaaaaggaaatcttgagttttgggttttttcctttcgtggagagctattaggccataatcacttatccattgacaccatttaaatgttattaaaatgtattgcagaaagctagtttttaaaatatattattattgactttattacttctttctgctattttagaattaaattaagcatgttttctttttttttttttgagcttgtatttttattttcagttttatatatacttaaatacttttaacaaatagaatcctcatttttcctaccaggacttaaagtttctatgtggaaaataaggttgcaacagtgatgcagtgtggcatgttaagaagaagaaaacaaatcttaaatttttaatttaatatttactaaagtgaattactgcattctttctaaattatactgttcaaatatgtaataaagtgtgttttttaaccatctgctgactttaataactttctaatcaactttttgtacagcttataaatttcaagattaataaacctttagaattgtcagtgtcttctcagctctgaataaagtaacaaacttttaaaattaagaataattacattttatttaagtacctacttgatgactattgtagacaaaagctcttatgtgttcttttcttcgttattatagttctgcagaatcagaagatttggcagtacatttatatccaggagctgttactattcaaggtgttctcaggagaaaaactttgttaaaagaaggcaaaaagcctacagtaagatttcatcatattatattttaatacacctctaaaaatatgcaaatttataagactctgtaaaagtactaaaacaattaaaataaaacctgattatagtagacttgaaataatattaaataaggtcctcccctcttatccttgggtcatccattccaagatcccccggggatgactgaaacctcagatagtaccaaaccaaattaccatcatttggaacatgtttctgttcatgtcttccattcacaaatataataccttttctatcttaactaagcacttaagcccacacagtaaccgtaacttttgcagtttgcgatgctatagcaaaactagcatgaatttctttttccttcttcacaatttcacagatacaaaatttgttcttaccatggatcttagcaaccttagcgtctaatttttctttccttaatccaagaagttttcttttcacttaaggaagcagtggggagtgggacacaagggtagcacatatagtgtggagacgctggacaaagaaagggaagattatgtccacagaagcacagagcagaactgtgtgagattttatcatgttactcagaacaacacatgattttaaaacctgtgaattgtttatttctcaaattttccaataaatatttttagactatggttgcctgtgggtaactgaaaccacagataagagggaaaatattgtacacatttgtttcaccatgttttcttaacataaaatgttattatatgtgccatatagatttctgttaaatcatgtgttaagggtgcttaaatcctgtacttttttttacccccattatagttcgtatacaaaattatttcttagagaaccctgaaagtatatcatgaagaagtattttagtattaagtttaggtaaaatagaaaataaagagtaacaaccctaaaaaatggaatttgattgtgttttatcattttatttaaattcctgtaatacagttttgttttctacataacatagaatccaaatattaaatgctttccaaacctataactatattggggggggaaaaaaggaagattggtggaacaaagctcttaatatgtatcaaagaagtttcttcttcctcaacaccagcatagtagtttgactactaaggaacaatttttttccctttctcaaatttgaaatataaaacctttgatatatattcacacttaaagcttttgaagatatgggggcttcatataagtaatcttattttgttgtttatatcacagtaagccaaaggcacatacaaatcaagaatctcttaggcaggctagtgaactcagaattgcatgtcagttgaagcattaccataccttttgtgtgctggatgctagaaatagagcagtgaacaaggtgaggcaaagtgtcttcctcctggattacatttcagtgaggagaaatagagaataaggctttaaaataatgtcataggatacagaatgatggggcaaggagggatgccaccatggcaaaacatttgagctgagatctgaatgaggaaggtgagttagctgtgtgaatatctagagttcaggagacaagaaggcttgtgtagtttacgcattgaaattggggaaggtggaggagatcaagtaagaggcaaaagctggagttgtttgatgataaattaaacatgatgtatgagagaaagagtgaaaacaaagataacttctaggtttggggactgagatgggtgtatgttggggacatttattgaaatggggggcaggtcagtcttggccaagttcagtttgatatgcttattaaacattcaagtggaggtgtcattgtggctgttgaaaaagtatggatcatgaggtcagcagagaggtggcagggagatagatttgggagtcattagcatacagatagatagtatttgaaatatggaactggatgatagattatctaagaagaaagtatagctagagaagaaaacaaggttggagatggggctctgtagcattaaaggtctcccacaaagaagagtataaaggaaaactaaggaactgttatcccagaagcctagcagttacagtacttcaaaaagcaaagagtggccagctgggtcagatgctgttaagaggctggctatgataaggayagaggctttgctaaaattacaatcatcagtgaccttgatggcccaaaagccaaatgaaatgagttaagtagaaaatgggcaaaacagaagaagtagaggcaagatttagagacacccttgcaagaagttatgctgtgaaaaggagaagagaaattggttggtgtctggggagtgaggagatgggtcaaaggagggattttaaaggtgggagtactattaaggttcatttgtataatggtggtagagggagagagattgagaagcaatggagttaattgcaaaagcaaacttctttattttttttttctttttttttttttattatactttaagttttagggtacatgtgcacattgtgcaggttagttacatatgtatacatgtgccatgctggtgcgctgcacccactaactcgtcatctagcattaggtatatctcccgatgctatccctcccccgaccccacaacagtccccagagtgtgatattccccttcctgtgtccatgtgatctcattgttcaattcccacctatgagtgagaatatgcggtgtttggttttttgttcttgcgatagtttactgagaatgatgatttccaatttcatccatgtccctacaaaggacatgaactcatcattttttatggctgcatagtattccatggtgtatatgtgccacattttcttaatccagtctatcattgttggacatttggattggttccaagtctttgctattgtgaataatgccgcaataaacatacgtgtgcatgtgtctttatagcagcatgatttatagtcctttgtgtatatacccagtaatgggatggctgggtcaaatggtatttccagttctagatccctgaggaatcgccacactgacttccacaatggttgaattagtttacagtcccaccaacaaatttacaagaaaaaaacaaacaaccccatcaaaaagtgggcgaaggacatgaacagacacttctcaaaagaagacatttatgcagccaaaaaacacatgaaaaaatgctcatcatcactggccatcagagaaatgcaaatcaaaaccacaatgagataccatctcacaccagttagaatggcagtcattaaaaagtcaggaaacaacaggtgctggagaggatgtggagaaataggaacacttttacactgttggtgggactgtaaagcaaacttctttaaaaagtgagagagagttggaatctagggcataaaaagagagttgagtttgcctttagatagaatcggggttaactattcttttgtagctggaggaaagactgagtatgtgggtctacaaacaggtagttacatggcagtgacaggagtatttgagattaagatttcagaagtgatacrgctcaactctgaggttaggactttggttgaagtgaagtggacttgatcattggcacttagaatgtaaagaaactaagaagccaggagcattgtaatagtatattcctgtgtttgtcctatccaggtagcwtcttggacaaaatattgggcagctttgtgtgggacacagcttttttactatgctgccaaatctctaaaggctaccgaaagaaaacatgtaagtatttgttctctacatttttagcgtggtttcccagactgttcatggttataaagaaagcagtcctaatgggatacaaaggttttttgggtttgccttgttttttcctatcttctagtccaaaagtttttacatttatttcttttttaaataccatttttccattgcaaatgtcaaaactgcacattacgcttatctattttgacatcaaagctttctcaaatctggagtttcctgttcaatattgttcaaaactattgccttggagtttcctttcctaatcagcaaaatgtggaaatgtgggaccaacatctaaagttctttccacctcaatctctggttcagtgattcttcccaacaatgaagaggaatgatcaattacaacagttactgcaatcactttcttgtgcttcatattacttaaaagaagcctcttttcaccctgtagaattttcctataaatcttttttgcatgctgttttgtttttacataccagtgatagaatctttgaaaggaagaatgattttctatgttgcattaataaaatctgagaggaattttatttctaagtcacatgttttgggggagaaaaattacgtggtttatcctactgaggaaaggtaagccagtgaagaaaaatttaagtcctttttctacttaaaacttaaccaaatgatactgtataattcagagtaattcagagaaactcttctttattctcacagttttagccctttaatcaaaccacaggtatagaaaagaacatttttggtttaaatgaatgtgggaagtaccgtaagatagcattgcctttctttatcagctatacccaccacctgccaccctcctgatcatcatgactcattgtcttgcttttcttcatagtgttagcatatatgtttccctaattaatccatggtttcattttttaactgtacctcagtgggatcatatatattcttaagcactagcttttttgctcactattattatataattgttaagatagctcttgcattgagataaaggacttgagtgaaggatcatggagatttcttcggtgaatatttattttttgtattctggtcaaattgacaataatgcctatataccctacaacatttacatagattagttttgctagaacaatttgtagagttagtactgctgttctcaaagtgagaaaaaggttggattcattcagttcaattaaatccttagcttcatatggaaagtaacttttcacatagccacattgagatacttgctggatagatttcacttagctgactattgtagaaaagtcattattcaaaataaaatggtttttttgttttttgttttttcttagtttcaattagaaaaagtccaaattagagaagttataactgaatttgtcatctaatggatatgttaaatattgttttgtgctttgcattgttgcttgtgcataaagttactagtatattatactttgggtttttaattatatgaggtttctgataggtaatgtatgcaaaatgtttggaaattaaagcatagtgagttgtgagaaaatcttattgagtaccaaggaaattgaccgcatttctcatcttttctaattaaattaaaatataattaaagaataaatttgaagaacaggatagagggtatagagacaggtctatatctatatttggtattaatcttgagatagaaaagatatggcacagaactaaatggaagaaaaaaattttaatcgttttcaaataaagttagaatacaaataaattggaggaaaatatctgctatatgtaagcaaccgaaaaaggattaaaatcaccatttaaacatagcaccacctgtattgttgtgttttggttttggttttggttttggttttggttttggtttttttttttgccaaaatatttaacctgaatcttatgaggaaataatcaaatccaaattgtgggtcattctatgagacagctggcctagattcttaaaaagaccaaaatttggcaggtggagtaagggcagggggacaggaggactgttctagattaaaggagacttgacaactaaatgcaatgtatgtcttttagttgaatcctggagttatattggggaaaaaatttaaaaagctataaaggttattattggaacaacttaagaaaatgtaacatggactttatgtggttgtctcttcaatttcttagaaatgacaattacgttgtgattgtataggaatatattcttgttattaaaagatacatgttgaaatatttagggttcaatgttatgatgtctgcaatttgcatttgaatgttcagaaagatcaaacaaacacaaaaatgtagattaaggatatatggctaatcattgtggcattctcaacttctgtacagtttgaattttttcaaaataaaaagctggaggagaaaaaaaatcatagattaaaatatacctgttcatggcaataaacccagaagtgggacatatggaagtctgtataccttattttagtattctataaagtatatatttttttgcctatgaagaacagtttgtgtgggtagagtgatcaacctcacttactatttaaaaatgcaaattaagggagacactttcctgccattagacaaaaatttaaaagattgatgacatagcattggtcatgatatggggaaacagactgtcatccatggctggtaaaaatttaaattggtattgttttkgtggtggccagtccgagtcagtatttagcttggtaataaccagaaattcctcatctgagaatctgtcctactgaaatttttgaacaagtgcacaaagattatctgtagaagaatatttctataatatttatgacaacagaaatctggaaatacccaaaatacttatcaataaggaaatggttactgatagatgaaaaacacaagtcagagtgtaaatatatcccccattaatacgtaaaaaccaacagcagcaatgacacaaacctctgatataataaatgcatagaataaggtctggaggttgtcacctcaagtgatgattatatctggggaatgtgatgggattcgctggtggttaaagggcatttgcactctagtttcatccctgtttctgaagcagtttatgttgcttgagttactttttactttttgaaaaagggaattgaggtggaagtttttaggcttaagaaaagaatattagaagatcatagtattcatgtcgaagtacattatgagctgtcaaatcagcagtcctgtggtagggccaatttcattcttcacagtagtaaaacttactgatttctttagctttcatatttcaatttcatgttgttatgaatgtgccatgttcattctttttcccatttcctttaatcgtgaagcatatcatacatacaaaagaagataggtagtgtacatgtacattttaaagcataataaataaaatgaacacctgtatactctccacccagtgtgaggaacagaatgttactagaaccgtcaaagccttcccagaggcatccacttcttccctgtcaaccatatccacagcttcttgctgtcctgaatttcttgttaattgtcgccttgtttttctttagtgttttaccatgtacacgtccttatacaatgcactgtttgatttttaaacaatacctgaatggcttcacatacagtcttaagcactagcttaagccaacctgttcttcttttataactgccctttctcagaattaagaaaagaagttgtagctaaaataataataaaagaatggttaactacaaaagtaatagacaggctaagaatacccttcttttttgaaaaatacaagtaagaatattgtcattaagaattatctggttgcagggagctgagatcacaccactgcaccacagcctgggcaacagagtgagactgtctcaaaaaaaaaaaaaagaactctctgatagcactgctgatttattacatcatcagatttaagacagcatagctactaaaatgcaaatgtccttcctataaggagtagtacagtaattcagaaaaaaaacaacagattaatatatcatattcacaaacatgctctctgggaatagggaatagatcagttaggttttgatgcagagttgaagctgggaaggtctggaaagtaggagattatctgaagaaggcatgcctaggatgaaattcagcagtaaaaggccccaggctggctgagaccagcatgaagtcacaaatctcatcttycattaggagaaactgaaaatacactccctaacactgaagttttgctagaataaaccataaattttctgtttccrctaattatctttttttctctcagttcaaatcaacatccaataagaacgtatctgtgataggatggatggtgatgatggctgatgaccctgaacatcctgatctcttcctgctgactgactctgagaaaggtgaattgttagaataactggggcttacgatactgcgtatgtgtttgtgtatatgtatgtatgtatgtgtgtgtgtatacttgtcatatatataatgttttatgcatacatgaagaacttgatgagccaaaacctagtttcactggaatactcaagagagaaagtatttgtgtagttttatctattgggaaatacttctgtcccattatgtattttaataatatttgtggagcttattttctttgctccatgggcatatatgcttgaaaattaaaagcccagctaatccctagagacctaactaggaaaggagggagggaatttgagaatatataccccattgttacttcaaatttttagagacttgccatataggccatactgcttccttcatcaataccttgaaatggattgttattcttaagttctgaaagtggcagagttttcctttaaatatttattctatcacttttaattaaattattcagaaccaatattctgcagtcttatccacacagatctagagatgccacacaattattgtatttatttagatgtattttattctaaagaatatttaagaacaaaattatttcttttaatccataagcagcaaaacagtgactttctgaatatatttggctcagatcactttccaagttaattataatattttacatacagtatatagagagacacttatgaataaaataactggctattgaccattggagtttataaagtagatatgagaaattggaggatgggccatgtataatcacatcatatgttcttcttactctacctgtgactatagtggatacctcaaggctcatcagaaaatatccccaagtggttgcttttcttccatcataacaactgctagctgttgacaagtaccagaaagatactttcagcagttcacaactggaatactatgttaccttttattgacttcacaactatattttgacctctgtttattcagatactattttgtatcaacagatatcccacttttatgtttcagtgttttaagtaaacaagtaagcaaatatgttggaggcaggaaaaaataataccaaaatgtcttctttttagattaagtagattgatttacagaataaatacaccctactcaacattttttttcccataagttattggggtacaggtggtatctggttacatgagtaagttgtttagtggtgatttgtgagattttggtgcacccatcacccgagcagcatacactgcactctgtttgtagtctttttaccctcatcccccttctcacttttctccccaagtccccaaagtccattgtatcattcttatgcttttgcatcctcatagcttagctcccacgtatcagtgagaacatatgatgtttggttttccattcctcagttacttcacttagaataatagtytctaatcttatccaggtcactgcaaatgctgttaattcattcctttttatggctgtgtagtattctatcacatatatataccacagtttctttatccactcgttgattgatgggcatttgggttggttccatgattttgcaattgtgaattgtgctgctgtgaacatgcgcatgcaagtatctttttcatataatgacttcttttcctctgggtagatacccagtagtgggattgctggatcaaatggtagttctacttttagttcctcagggaatctccacactgtattccatagtggctgtactagtttacattcccaccagcagtgtagaagtgttgcatgtttaccacatccatgccaacatctactgtttttttattttttttattatggccattcttgcaggagtaagctagtatctcattgtagttttgatttgcatttccctgatcattagtgatatggagcattttttcatttgtttgttggccatttgtgtatcttcttttgagaattgtctattcatatccttagcccacttttcgatgggattggtttttttcttactgattcgttttgagttcattgtagattctagatgttagtcctttgtcagatgtatagattgtgaagattttctcccactctatgggttgtctgtttactctgctgactgttgcttttgctgtgcaaacgctctttagtttaattaggtcccaactatttatctttgtttttattgcatttgcttttgggtttttggtcatgaaatccttgcctaagccaatgtctagaagagttttccaatgttgtcttctagaatttttatagtttcaggtcttagatttaagtccttaattcatcttgagttgatttttgtataaggtgagagatgaggatccagtttcattctcctacatgcggctagccaattatcccagcaccgttagttaaaaagggtgtcctttccccactttatgtttttgtttgytttgttaaagatcagttggctgtatttgggtttacttcagagttctctattctattccattggtctatgtgcctattttcatagcagtaccatgctgttttggtgactgtggccttacggtatagtttgaaatcaggtagtgtgatgcctccagatttgttcttttcacttagtcttgcttcggctgtggtgggctcttttttgattgtatgtgaattttagaattgttttttctrattttgtgaagaatgatactggtattttgatggcgattgcattgaatttgtagattttgcttttggcagtatagtcattttcccaatattgattctacccatccatgagcatgggatgtgtttccatttatttgtgtcatcagtgatttttttcagcagtgttttgtagtttccttgtagagctctttcgactcctttgttaggtatattcctaagtggttttttgttttgttttgttttgcagctattataaaaggcgttgaattcttgatttgattctctgtttggtcattgttggtgtatagaagcctactcaaaattttgaattcaaagccccagcctccttcccatatcaaaggcataattcacgaaattacatttcaagatgagagcattttcattggatttagttaacagattctttgttttcttcagtttctcttagcatgcctaatagaactacttcaggtagccaaaattttatgaagtctatctatactaatsgttttttgcgggggaggggtgagtatgtaaattgtagctgtggccagctttattgtagatatggctttttttcacattgacctaatgtctgtgtctgagttcagcaagtgtaacrgtgttacttgactaaacatttggtgaagaaacaattacttcagaaagtgaaaaagttattttgagtgttagaatctcaaggaaaagctgaataatgcttaaatatagttaggctcttgagccattgaatgcagttattaaggaaagaatagaattcagcacaaattgtgaaataaaaagaacttaggtcaatgaaaaaaggaaataaagcttaatttagagcagcctatagtacatggatcctttcttttctcaatttgttttctcaccttaatacatataaccatttaaaatatcctcattatatgtcagtcttgaattaaagtcaatatagaaattacaaaatacacacagcacaaatgaatatctaatttcttaaaagagagaaagttgcctcctagactttccccaagagccctcaacagaactggaaatctgtaataatattgacaaatatcttgtaactaaagactaaaagcatagtctatcaatgttatatgactaatccttaattatactgaatagctagtgtttaagtattaaacatattgaagcattctggcatgttaaaacttaacattaacatctactaatatttaggccaggtgtgggggctcatgcctgcaatcccagcactttgggaagccaaggcaggcacatcacttgaggtcaggagttcgagaccagcctagccaacatggtgaaaccccgtctctactaaaaatacaaaaaacttagctgggcatggtggtgcacacctgtaatcccagcttattgggaggccgagacacgagaatctcataaagctgggaggcagaggttgcaatgagctgagattgtgccactgcactccagcctgggcgacagagcgagactccatctcaaaaaaaaaaaaatctaatatttagatcatctaagtagtaagtattcagaaccaatattctgcagtcttatccacacagatctagagatgccacacagttattttatgtaggtgtatttcattctaaagaatatttaaggagacaaaattatttcttctaattcataagcagcaaaagtgactttctgaatatatgatagcatgtaaatgtgttgcatcgagaactctttattgtattggaaatacaataaaaataggaaatacaataaaatggaggtgttgaatagaattctaaaactgaaaactctagtcatgtttaatttgctcattattatctggcagaattattatgtgtcgtccttacatttttaatatttcccccttattttggataattttaggaaattcgtacaagtttcaagctggcaatagaatgaatgcaatgttatggtttaagcatttgagtgcagcctgccaaagtaacaaacaacaggtaagcatttctcctaattctcagaatagtccataatttgggaacatatgtaaaagagttccaagagaagtaaacagactagttctgaattaactaggagaatggtggtgtttttattcytgttgattacagttaataagatatgaaggtctacatcttagtgaggagctagacagtaatcatgcaaacaagtaacaaaatttcgaacagtcagaactatataaagaaaacaatagacgtatgtgatatagagcaatgggagtacagacaacttttgataacataaggttgggcagcaaagatctccctgaggagatggtattgacaagaaccacaagaaggaacgagctataagaagaggagagcagagtgctgtgtaagggaagagcaagtgcagggagcctgaagctggaacaagcttaaggtgagttcaaagcacagaaaggtagctagtatagtagtcagagtatagttctctaaagggtaaaaattagatggcatattaaattaataaaaattattcgaattcatctttatttgatctattgacaatttgatgtgggtttctgtggtggtagtraaaccaaaaaccatttaaattttgtttgcttttattttactgaaacaaaaatggtctaattgaaaggctttcagctgcagaagagcaggaatccattgtgttgttttccccaaaccctgttgcacagttagagttgaaccacagattggtagagcagacataaaacacatagccacatttatagaaatttatatagactttttgtagaaccagttgtttgttaaatatatttgaaaatcattgacttagcatattgataatgcagaagtctatggttagcattatcagtaggtaatattgaatatgatgcactatataagcttagaaagcttacagaagtatttttcaccctgtcatatcaggatgtaagttattaccctttcttgataattgaaactaaggctccataatacaaaatgacctacacaggtcacacaagtaaaaaatggtggattcaaactttcttcatcctttaagtccattctttttgtttgttttttgacttttgggttcagagggtacttgtgcaggtttgttacatgggtatattgtgtgtcactgaggtttggtgtataaatgatcctgtcacccagttagtgagcagagtacccactggtttttcaaccgtcacccctctcccaccctccccactctggtaatgctcagtgtcgattgttcccatctttgtgtctaggtgtattcaatgtttacctcccacttacaagtgagaacatgcagtatttggttttctgttcctggattaattcacttaatggtctccagctgcattcatgttgctgccaagggcataatttcactgttttttaaaaatcactgtgtagtattccatagcatatatgtaccacattttctttatccaatccactgttgacaggcacgtaggttgattccatgtctttgctatagtgtatactgctgggatgaacatacatgtgtctttttggtagaacaatttattttcctttgggtatatgctcagtaatgggattgctgggttcagtggtagttctgtttcaagatctttgagaaatctccaagctgctttccacagtggctgaacttacattcctaccaagtgtataagcattcccttttctctgcaaccttgccaacatctgttattttttgacttagccattctgactggtgtgagatggtatctcattgcaattttgatttgcatttctctggcaattagtgatattggccgtttttcaaatgcttgttggccatgtgtatttcttctcttgagaagtgtctgttcatgtcctttgcccactttttaatggggttgttttttgcctgtaaatttaagtttcttatagattctagatattagacctttttcagatacacagtttgaaaatattttctcccattctctaggaatgttggtttattctgctgatagtttcttttgctctgcagaagctctctaattaggtcctgtttgtcagtttttgtttttgttgcaactgcttttggagtcttcatcatgaagtctttgccagggcctgtgtccagaatggtatatcctaggttatctttcagggtttttatagttttaggttttgcatttaagtctttaatccatcttgagttgatttttgtatacagtgtaaggaaggggtccagttttaatcttctgtatatggctatccagttatcctagcagcatattgaatagggagccttttccccattgcttgtttttgtcagctttgtcaaagatcagatggtagtaggtgtgaggcattatttctgggctctctatactgttccattggttctatcctgttccattggtatctgtttttgtaccagtaccatgctattttttggttactgtagtcttgtagtatagtttgaagtcaggtagtgtgatgccttcagctttgttctttttacttagaattgctttagctatttgggcttttgttgttgttgttgttgttgttgttcccatatgaattttctaatggttttttctaattctttgaagaatgtcattggtagtttgataagaatagcattgaatctgtaggttggtttggacaatatggacatttaacagtattgattcttccaatccatgagcatggaatgcttttccatttgtttgtgtcatctctgattactttgagcaatttttgtaattctctttttcttttttaattttttttttttttttttttttttggagacggagtcttgctctgtcttcaggctggagtgcagtggcgcggtctcggctcattgcaacctccacctcccgggttcaagcgattctcctgcctcagtctcccgagtagctgggagtacaggcgtatgccaccacgcccagctaattttttgtatttttagtagacaaagggtttcactgtgttagccaggatggtctcgatctcctgacctcgtgatccacccacctccgcctcccaaagtgctgggatkacaggcgtgagccactgtgcccggcttgtaattctcatagtagagatcttttacctccttgattagctgtatccctagatatttttttctttttgtggctattgtaaatggaattgtgttcttgatttggctctcagtttgagtgttattggtgtatagaaatgctgttgatttttgtacattgattttgtatcctgagactttgctgaagttgtttatcagatctaggagctttgggtcagagactatggggttttctagacataacatcatatagtctgaagagaratggtttgacttcctctttctatttgaatgccttttatttctttctcgtgtctgattgctctggctgggacctccagtaagtattatgttgaataggagtggttagagtgggcatccttgtcctgttccagttctgtaagggaatacttccaacttttgcccatttagaatgatgttgctgtgggtttgccatagatgactcttactattttgagatatgttctttcagtgcctaatttgttgagggcttttaacatgaaaggatgttgaattttatcaaaagccttttttgcatcttttgagatgatcatatggttttctgtttttaattttgtttatgtggtgaatcacatttattgatttgcatctggtgaaccaaccttgcatctcaggaataaagtctacttgattgtggtgaattaactttctgatatgctgctggattcagttagctaatattttgttgagaatttttgtgtctgttcatcaggtatattgacctgtagttctgttttttcattgtatctctgctagtttttggaatcagaatgatgttggcttcatggaatgagttagggaggagtcttttctttctcgatttttcggaatattttcagtaggattggtactagctctttttcgtacatatggtagaattcaactgtgaaatccacctatttcaaggcttttttgggttggtaggttgtttattactgattcagttttggaactcattattggtctttttagggattcagtttcttcctcattcaatcttcagaggttgtgtttccaggaatttatccatttcttttaggttttctagtttgtgtgcatataagtgttagtctctgaggattttttgtatttctttggagtcagttgtatgtcacctttgtaatttctgattgtgattatttggatcttttctcttgttttatttgttaatctagctaccagtctatcgatcttgttttttctttcaaagaaccaacttttggttcattgcttttttgtatgcattttcacatctcaatttcattcacttctgctctgattttggttatttctttttttctgctagctttggggttggtttccttttgttttgtttttctagttcctcaaggtatgatgttaggttgttaatttgagctctttctaacttcttgacataggtattgagtctgatatgttgtgtctctgttttccttagttttaaatcattttttgatttgtgtcataatttcattctttacccaaaagtcatttggaagaaagttgtttaagttccatataattgtgtggttttgagaaaacttcttggtattgatttctagttttattgtactgtagtctgaggctatggttggtatgatttcaatttttttgaatatgttggcacttgctttatgcccaagcatgtggttgatcttagagaatgtgccttgtgccaatgaaaagaatgtatattcttgtgttgttgaatgaagtattctgtagatgtctgttgggtctagtttgtcaaatgttgagtttaagtccagaacatttttgttagttttctgcctcagtgatctgcctgacactatcagtggggtgttgaagtcttccattatgtagttatctaagtctctttgtaggtctctaagaacttgttttcctaatctagatgctccaatgttgggtgcatgtatctttaggatagttaagtcttctggatgaattgaaccctttatcattatgtaatgcccttctttgtcctttttgaccattgttatagtctgttgtatctaatataagactagcaacctttgttcttttttgttttccatttgcttgataaatcttgctccttacctttactttgcacctagtatgttgttacatgtgagatggttctcttgaagatagcagacagttgggtcttgcttctttggccagcttatcactttgccttttttgcctgtttacattcaaggttactattgatgtgtgaggatttaatcctgtcatcatgttgttagctgcttgttatgtagacttcattgtatagttgctttatagtgtcagtggactatatacttaagtgtgtttttgtggtggcagttatttttctttcatttccacatgtagcactccttaaaggacctcttgtaaggcaagtctgatgatagtgaattccttagtctttgcttgtctgaaaaggattttctgtttccttcacttatgaagcttagtttggtgggacatgaaattcttagttggaatttcttttctttaaggatgctaaaaataggcccccagcctcttctggcttgttaggcttctactgaaaggtccactgttaacctgatgaggttccctttactgccccttttctcaagctccatttaagatttttttcttttgcattgaccttggagaatgtgatgattaagtgtcttggggatgctcatcttgtatagtatcttgtggggagtctgaatttcttgagtttgcacatcaacttctgtagcaagattgggataatttttgtggatcgtatcctcaaatatgttttccaagttgcttactctgtctccttttcttgcagtaacaccagtgagtcataggtttagtctctttacataatcccatatttatcaaaggttttgctcatttttaaaatttttttctttaatgtttgtctctgttaatttgaaggagtgctcttcgagttctgagattctttccttggtttggtctattctgttgttaatgcttccaattgcattatgaaattcctaggctgggagtggtggctctcacctgtaatcccagcactttgggaggccaaggcaggcagatcacttgaggtcaggagttcgggaccagcccggccaacatggtgaaaccccgtctctgctaaaaatagaaaaattagctgggcatgttggtgcatacctgtagtcccagccactagggaggctgaggcaggagaatcgcttgaacctgggaggcagaggttgcaatgagccaagatcatgccaccgcactccagcctgggcaacagagcaagactcccatctcaaaaaaaaaaaaagaaaagaaaaagaaagaaatttctagagtgaatttttaaattccagaggttcagtttggttctttcttaaaatggctgtgttatctttcaactcttggattgttttactgttttccttaaactgggtttcactttttcctgtatctcactgagcttccttgctattcagattctaaatccaaagtctgtcatttcagtctggttaagaaccattgctgggaacctattgtagttgtctggaggtaagaagacactgtggtttttagagttgctagagttcttgcattggttctttctcatctgtgagggctgatattcctttatcctttgaagttgctgacttttggatggtgctttttgtttttatgtttttgatttcccttcagggtttgactgtggtataagttgggtatagtcaattggcttcctttctggatgtcttcagagaaccaaggttcagcttggcactcctgggctgtgtcctgtaactcccaaggggctgggactgggcccctggctttttcctctggcctcttgaggtcgaccaccggctgcactgggtggaccaaggtgctcccaggctgctggcaaaacctctccatcaggctactggcaaaagcacttcctcaggggccactgttgaaagtgttctggcaggatggtgggggccactggtaaaagcactatggtgacagtcgcccgcaaaagcattccaacagaatagtggaagctacactgtgtgcctgctcccatgggagtggccaaacagggaccttggaaggggccagtagacagtgggacatgcagctcagactcaccccagtcccatgggaaacacagccctgctctctccaaatatggcagttagcaaaggtcagagccacctagaggagtatgaagagccttggtgggtgggcgcctatggccgtgttcctttgcagctttccccacaccataccccctgggctccatgtagacctaagttctgtctctgccagctctccaggcagttccccctggcaactcaaatatccaggaggactatgggatctcctgccactaggatcccagcggtttgtggtgagagtgggccattccacagttactttactcaccccttccttaggagctgttcaggaccaggaatgagtcccagcactccacagccctgtgcagggttcctagcttcttcgctcttcaaccctggttctgcatcatctctccacccactctcagaaaatcggtgattttctctcagtgcatcctctcagaagataggcttggagtatgctggtctactagatactcagatctctcttggtgggagaagctcttcctggctttgcctagttggccatcttgtcccaatcccgagggcatttttttaaaatattgttggagtgggctttgttctctcatagtttttattgtttcaaatatatatgcaacactaatagcagtatttagtaccatttttagcaacctccataaaggacatgaaatgtcatagagcgaaaattattttttgccttgtcaggttagtgtctggggcagaatgaaagaaacagatcaggctttgtctagactaagcctttcaggattcacctcattgctatacattttctttaaatgtaatttagggtattaagactctttttttttcaatctcagattccaagatgaatctagacaatatatacatataccagcttaaaggttcaatttcttttactgtattagtgagtatttctgtgcaacaagtcaaccagacgtgtataaatatttgtttctatacttgcaagaattagaatagtggcaaatttgtaagtagaacctgtgaaagttttagtagaaaactctgactcaaatgcaaaatatcttaaaccacattcaggcaacttaaaaagaaatgaaacttttactttacttaaatacaagtttctttttttttctttgagacagggtttcactcttgttgcccagcctggacagtgcaatggtgcgatcttggctcactgcaacctctgcctcccgggttcaagccattctcctgcctcagcctcctgagtagctgggattacaggcacccaccacaggcccagctaatttttgtattttcagtagagatggagtttcacaatgttggccaggctggtcttaaactcctgacctcaggtgatctgcctgcctcagcctcccaaagtgctgggattataggcgtgagccaccgcacccggccaaatatgagtttcttataatcagacctgaaaatttatactttaagcacttgagcatttgtgttgtatttgatttgtaattcagttatgagtacattgkccaacataatttttttattcagaagctgacacttgtaaggtatttatgtttttgcatataataggtttcagagagaggttgctaaactgtgagagctgtcttaaggacagaaaagaccactgacatatgaatacctctcccagtattttggaaaactggttttgaggatttgttttaacatagtgaaactctaataaggaattttgtttttctgtacttattttaatcatgattttacaaataaattcttagtaatgtttgttataaaattatttttgctgattttaaaaatatgcacctaggaatttttgtaatatataatgagaaaataaataatggcaaacaagtgtatctggaatctcaccctaccagagtcatacttactcttgctctcatttattcattcagtaaacgtctactgagccccctgtgttagacaagaaagatattgtctctaccccttctcctgtatagatgtcattttactagaaagagtattaactcattttggtgattttctctcaaaaatgttctagcatgttaattattcataaactattgaagctccttatatcaagttccttttaaaagatacttaagtagaaagattgggcttgcctaaataacaaggaaagataagaaatactcctttgaaaaacaacttttaaactcagtttttaatgcttatattttttaggttcctacaaacttgatgacttttgagtagaagcctgagaaraaaagagaggtgaactgttgcttctacgtgagcatgaggacctgataaaagagcgccagctataaaccatcctgtgccaggaagagcccagaggctctgtctcagtcgttggagttctcaaccaaaaaagcactaatttcagggaatgatttgagatattcccagagaacaaattggagttgcaaaacaaactgccatgaaccatgcttcttatctcagaactgacctgtggaaaccactgccttaaaagaatgaaaggaaaaccaacatgaaacaccaaatagygtgtgtgaatcttctggcggtgctgtgcttggaatagatcgtagctaatttgcatttcttttaactttgtaataattttagaggggggaattgccttttttagatatgctttaaaaaggaaaaacatactcttgtggattccatcaggagctggttttgaaccgaggtgaagagacttagcagggattgtaccagcagcccacctgcaaggtttgttctccctctagtagtctgcaacctcactggctttctcacagcaagagtgtaggaatgagaaatgttagtcatgtgagttcttgggtttgtttgggattgggtgggggtgtttgttttgttttggatgaggggagaatttttttaaacactaaacttctgaaatgtagtactgtaaggggaacattatttcctgcaggaggtacaaaggctgtgtgttcatttgccagacgctttttttttaaataggttccagaaaacatggttgtttctaactagggttaaagtttagctttctatatgaattcattgttggaccacagatctgcttaagtaaagagctataatcccaacctaaacttttctgagattttacaataattagatctttttccaagttaattgggttttcccttctcccagtcataggtggtttttatcatcaagacagactgatattttgtcaggatattttcttttacagtgtttgatgtgcataatgccagagttatttttttattattcattttctctctttttgttcaatatgagattcaggatcatatttgtttaaaaggtaacacatagagatgtatgtatatattttgttataagacatacaaaataattttaagagggataaaggtgaaaatatcagattctggaaattttaagtatctaaactttatacttgtatgatttaccataaacataccaaaacatttttctgaaaatttactgtcggtctctgacatgaaaccgtattttgtcagtagttgaccaagcagttttatgagaactcttctatgcaatgatgcatttaatttctaaagtaaatgttgaattattaaaaaaaaagtttgaaggtaagatgccttagaattttaatgaaaaatgacactcaaacaaaggctatatgtcgaatgttataaactcttgagacataatgaattttagcagtggcctagagtaaggtaatgctttgtgactgatatctactaatagacttctgttactttgggcctcacataaaatttctcacattcgtattcttagagaattttatacttttttattataagtattttgcccttgagtccatgaaacttcaatagaaaatattgcttatacaataattagcttaaaatccatccaaaggaaaagagaagagctttttttgagtgttaagttttttaatttagtwttctgtttggaaaagatgttaagagttcaaatatgcttcttatgtaacagaaataccattatttctggggtttagtgacacaggctggagaggacaaaagtttcctgtcctgaatgatttttcaattaatgctctaagcttaacccatgttgggtaatagaaagacatagccagcagtattactacgtagaccttgcacatcttacttttgttttgcatttttaaaaatttcttaatttgtttatttctcttcagaaatagcgtttttaacagtgtatgtgcttttttaaaaagtattgtgaatgagaaccctgtggattttttttatttcatttgtttgtcataataagctaacgtagaaatgttgtaggttaaccatatctgtggaaatatgcagttggaagtcagagcctgacatcacatagttttgccaaagggagagagctaagctggaagatgtttttgatactttcggctctaaacattaatggatgtttgcgtagagtaagatagcgttcaaatttggttaatagtttatagatagacttgtggcctctgactgactaaatttcttaacagcacagaagtcgttgtttttctgtctttaaaatttattcattcagaaaattagtcattgctttttaagattattttagcatttgaagcaaattgaaaacagaaaagtgacttaaaatagtgtaggtgaattttttatctataatttaccaaataatacctgataataattcaaagaaaatatgttaccaaaatatattaaatatataggtagttcattcgtgggaagatgaatcttcttattaagcctgccctcaattgtaaataagtgactcaaaaactcaaaatgttcatcagcattcaggtcatttgtttcacccttagccaagaagaactcattagaaattcagttataatttcaatttaagcctgtttatgataagcataatgattggcatgttatatagcctgttgaaaataactacagaatgaccttccagagcactgtttttggcctcgtgcccgctctgttcaggctctgcttgtttttcagaatatgatttttacctccagacagtaagaattgaacaagaactgatcaaacacaccttcctattttgttttcttcactatgtaaatattatttgggcaaacattacaaaaagggatccaaacaatttgagtttcagtatttttttctccctaggcatgtgcttcaatttcaaatatttttttctgtgtggaaaatgccatgtaactattgcactaccttctgtgtggactgtgttggtattggttctttctgtatatcaaaagtcagggtgtttataactgcaaagtttgtataagtggctttattcctcttctagaagatttatgaggagcctaggaagcactattggtacaggaggaaaaaagaatggaaaacatgtttacagactctagctttccttattagcttaaactggggccctcaaagagcagcctgttgatcttttggccaaatgacttgagcataagtcttttatttctttttaaggttaaatcgtaaactgtatacctttactactgaaaacaaaactatagggcatcatactaattgaaaatcaatagtaatgggttccatccattrgctttttaaatgaatagatctggtattgatttccttcctgtttttttgaggcacattcctttacaaccagtgtttaaaccaccacgtaatcatcttctgcaaacaaggggtgccagtgttgcctaacagaagataatctttaataaagcaaatcctctgcttcaaaggtttttgaaataattggatccctttttgaaaaggaagatgagtttaactgtgtccaggtggagtaatagtactgctgttgcatgaayagatgatacaaagcaagtgatgaggttggtatgacttctttagtgaccttttagggtttgcttttattttcctctcttttttgtattatttctttcaaacatagtaaatatatgattttacagccaaagtggtattctgttttttctaagctttgagatacaaatattgctatttaatcacattgatgatgaattactttccatgtgaaccttctcaaaatgatttaagtacctttgattttgctcccctaaaaatggcttgtgtctaaagtgacatttttttccctatttggagggttctaatgaaagagatccaggcataaaaactcttttgcttattgaaagcaatttgattacacctatgtttcaggttatagtggggagaaaatttggtcagtgccttattatttgaagagcaattttagggcatcaagtatgacaataatcatgtgccctcttgctcctcttatttcaggagtgtgtgctatccctctctccaccagcttaatctttctcaccccaagtctaacaaagtctttacagaaacctctgtaggtgattgttgcagtcttccttggtttttgagtctttttaaacaagctcctaccctgcttctatccttttagagtaggagattaaaaataaacccaccccagtcaacctttagataagcactcttaaaaacaaatttgaagagcactcttcagccaagttcatttttattttgttgttgatgttttgagcatacatttaattgtaaggccttttggaaaagccctaaaagaataagatacaaccagaaatatttgagttttgttaaatgtactgaaatcttgtaatgaaaatccctttggccagaaatgagatttatttccatttatttttacatttaagtaacactcaaaacaaacaagtagtcacttaacctgccagttattattttcttgaaaatatacaagaaagtaaaaatatctctaatatataagttaaaggaaagttaagagactaagctagttttttcagtgaaagcaaagttggaaatattttgcttctctcagattattggaagacctagagctactggatgttaacctgaatcaagatgttcttttcacatttttttaaagggctagtatgttccagagtaggcaagtagtcattcaagccaaatgaaagagttaactggtccttgaggagtgttagcaaaatttaaattttgaccctggccatttgtactacagaagtgattatgggattaaaagaatacataattacagtgttttgggattgggctcttttttttcttaatagaaaagcagaaacttcataaataatagctgtgctttagataccagataacaaatattgtttcccctgaagatatgacctactagaactactcacatatatagtccaataattactgacttaataggtatggtaaaatagctgataataagtcagactctcaagagtttctgtaccttgattattgacaaattcattgttttacatcctactaaagaacatgtgtgtggggagggggtggggaactggttcacaacataatctgaaggagatcaaacatctgtaaggacaggtacccagtgatgataatatatctgaaaacacaagccatttttattctttatcccaattaacttgaggtactctaatgatgaagcactcgattgcactatgacctccttgagtgatgtgcagcttggttcctctctcactttttgtttctttttaatatgcaaatgtgagtgtgcgatcttcagtgtgtctgcataagctaacttaagatgaatttaagtacagttttctgaaatatttctattgaaataaattacttaaaattatagattgggtgaggatgtttttgttactgtatttgcatttttatcatgaacttttaaggtgcaaataaactttaagttgatttttttcccctttctaaggtagtcaacaaggctattgttggtgcagggaaagctctgaaaaaactttagtcactcttctctagcccaagacaagaatgtgccacctcgcatgtggacaaatggggttgtggggaatagagagtaagggcataacatttccaactacatctcccactctgagtatgtgatacgataggagtagtccccaaagaggctctctttgctaatacataacatttttttctttttaccatttctgaaaacaatccatattcgagaccatggagctttaaattggaagaagtacagaaatacctgtgtggagtctcctgtaggctattgtctgggtgttggttatgcttgagaattccacgttagcttagcctctgcatggtttaggaacccccagccaggaaaagcccaatattttggcaaattataattcagttttcagcagttttctcacctccatagtgccctttgaaacttctcactgtccctttacttgaaccaaaagagaagaatgacacttatttgttggggccaacctgtcattacctcatatagtaccacctttgtcatacatcagtttcccatatatgcagaattttctagatcccctttcctgtttcaacggttgtttgtcccaaccaataccatattgtcttcattactatatagctgtataagttggtatctggtgagctaattgtatgttcttcagaattagcttagctcttcttgactttgtctttgctgtaaattctaggatcagtttgttatgttccatgaaaacactgttgttatttttattggaattactttggatttataggttaatctgagaattcacagttttgaaaaatttactcctttcatctgtacacatgtctctctgttcatttagggcttttaatgtccttcagtaatgttttacagttttctcctgagtagtctcttacattttttattagtttatgtctaagtaagttagtttttctttctactatgaatgtgacttttttgttacatttcctcattgactattgtgtgtaggaatgccattggtctttatgttgattcttatatctagcaaccttgttgaactcccttacctagttataatggtttgtccaaagatctgttggaattatattagtggcaaataagaatagttgtttcttcctttccaatctttgtaccttttttttcttgtcttatccttatttggctaggactccagtacaatattggattagaagcagtggtacaatgccaaagaacttaattatccagtctcctcagaaaacctcagaatataacacagccctagaatgaaccctaagcatgttatagtgtagcccaagtataatctttattgtatttgtaggccaactaatcatcaacttaaatttctcctttttcttgtaaagtatgtttatactgttaggcagaaaataagtggcatttgctctcagccaccacttatcagtcaaaactaagtaaaatggtgggtcacagggatactgcaaaatttagagtatccacgtgtaattaattttcttattctatgtcactgattctcaactggaagcgattttgtccccaggagatattgtcagtgtctacagacatttttggttgtcacaactgggagagggttcttctggcatctagtaggtagagaggtaagggatgctgctaaacatcctatggtgtacaggccagccccccaacaaagaattatctgttccagaatgtcaataatgccaaggttgtgaaatcctgctctatgtgagtgacttattgtatctcataagttgaatatattgagcttggttgtaggaaagaattcggtttatgtttggcaagggactttaacttttccctggaagttaacctttcttacagaagtttaacctactggccagaggagataaattaatagcatgggaatatattcatggcctggaccataatgtgttattcttcaagtatttgttgagctaaaagctacatgtttcaacctaaagtagatttgtggggacattctaaatgagtgcagacctacagaaatgtttgtctacctctgtatggttattccaagtctgaaaagataaccccaatagcagtaggacaaaataggttatcaatatgtcaggctggattatttatttaatctgagctttaataaaaccagaagctatttactttttgttcttatgatagtgttatatccacattataaaaagttcaattaaagaaaactatacagtaaaaaatgcatgcccgacctatcaaattcccatctccaaatttaataaaaacatctatctttgactaaattcctgtaatgctagcctagtttctttcagtctcaggctctgaagaatgatttttcacctccctcaaacctttgcccaatctaagacccttacatatactctagtactgtcagagctaaaagcataaaaagtatcgtccttactccacatagacttgtgatgcattggttacattattttttatttggtcgaattagctgtaaaaatgattataagagagtactttgaacaaatatatgccaacaaattgaataacctagaaaatggacaaatttctggaaactcgaaacctaccaacacaaaatcacaaagaacatctgaacagacctataactagtaaggagcttatagatcagtaatcagaaacctcccaaaaaagaaagaccgtgaacctgatggcttcactggtgaatgataaaacattaaagacaaattaataccaatccttctaaaatttttccaaaaaattaaagctgagggaacacttcctaatttattctgtgaggctaggattatcctgataccaaagtcagacatagacactacaagaaaaccacagatcaatatctattatgagcaatttatgcagaaatcctcaacaaaacactataattttaatttcagcagcgtattacaaggattatataacatgactgagtgggatttattcctgaaatgcaaggatggttcaacatgaaaatcaatgtaatataccatattaacagaatgaaggaaaaaaatctcggtgcagaaaaagtatttgacaaaattcaacaccctttcatgattaaaaaaatgataataacaaactaatagactctacctcaacataaaagccatatatggaaaagccatatatggaaaacccacagcaaatacactgaatggtgaaagactgaaagcttttcctctgagatcaggaacaaagcaagaatgtacactttcaccacttctattgaacatagtactggaaattctagtcagaattggaaagggaaagataaaattatctctgttcacagatgatatgattgtatatgtagaaaaccctaaagattacacacacacactattagaacaagtaaatgaatccagcaaagtagcgggatacaaagtcaacataaaagtcacatttctgtatactaacaatgagcaatctgaaaattacaaaattccatttactaaagcatcaaaaagaataaaataggaactaacttaaccaaggaggtaaaatatttgtgcaatgaaaactataaaacgttgctgaaaaaaattaaaggcaaataaatggaaacatatcacctgctcctggattgaaagacaatatcgttaagatgtcagtactactcaaatcaatatatagattcaatacaatccctattgtagtgttttttacagaaatagaaaaccccattcaaaaattcatatggaatctcaagggacccctaataaccaaaacatcttgaaaaagaacaaagctagaagacttatttcctgatttcaaaacttactacaaagctacagtaatcaaagtactgtggtacttgcgtaaaaacataaacctacgggatagagagcccagaaataaaccctcgcatatatggtcaaatgatttttgacagggtgccaagacacccataaggaaaggagtcttttcagatggcgctggggaactgtatctccacatgcaaaagaatgaagttgtatccttacctaacactgtatacaaaaattaactcaaaatgaatcaaagaccttaatgtaagacctaagcctgtaagtcttactgaagataacatagggcaaaagcttcacatcgttgaatttggcagtgactttataggtatgacactaaaggcacaggcaacaaagggaaaaacagattggacttaatgaaaatttaagatgtgtgtcatagacaatataaacagaaagcaacccacagaatgggagaaagcatatgcaaattatctagctgataagggattaatatccagaatgtatagagaactgaaactcagcaacagaaataattcagaaatgggcaaag

SEQ ID NO: 96484 - DNA, 108432 bp, Homo sapiens
taactatagacgcttattctcatatgctgcatgctacatgccaaacatgtgagacagctggtcatgtacagtgacattgtcatcatttgctcacatggggatacctaagcaattaaaaactgacaatgaacccacttatactagtcatgcttttcaaaatttcttatagctttgggctataatccataaaacgggaattccttataatcctagaggacaaggcattgtagagcgggcacatcgaacattacaatgcatgttgaaaatacaaaaagggggtataggaggccaactaccacctcaatcaaaactacatttagccttatttaaattttttgactcctggtacggatggtaagactccagcagaaagacattggcaagtgttagaggaaaagaggaaagtttatctgaaagtgttatggaaacccctggaagaaggaaaatggaaaggtccggtggatttactgacatggagaagagggtatacttgtgtttttacaggagatggacaaactgtgtgggtgtcctcaaggtgcacgcgaccatggaataggagactggaggaacccagggtggccaaccatgggcccggcccctccgatacgagccatgagccagctgagcctgactccaaagatggagagaaggccaagcagagtgatgatgacatcaatccccacaacctggggagaactcaagaaaaccacgtgggaagctgagaaactactggagcatcagtgacaggcaaaaacccctgattccatgttcttggccatgttagccatagtgtcccatgtggtatgttttcgctgtgcagaggcaaaaacattgggcatacgttctcaatctcccagcagtacgacctatactttggagcgacactcctcctgagatttatcatgatcagggagagtaggctccaggacccctaactccccctgacatagaacagttagactctcagaataatgtcattaattatactgctccactggaaggacttcctttgtgaatcaacacaaagatgtcgctcagccatagctgtcttacaattcaagctcaaacatggttgaatcattatggaaaaattatgtacttattaagtcttggttctattaaccaacctttcccggcccaatcgccctaattgtgctgattatatggaatggattccattcagtagttcctacccccctccgtggacccagtgtcttggtccactggctagaaaacaatctatgttaactggagacattgtggattgggaacctaaaggtcaattagatcgaaaagatgaaaatcagaaatcatggcacaaacttcattggcattggtggcaagcttttaatgcttcttctttatacagtactgggatccaatcccagtctgccacccagattgcttggcatggagcaggctttagcccacctcttcctcagtggcattatctagggaggaaaggaccaattcaagagactatatggaaggcagcactcccatgtatgaatggcaacatctggactggaatactatccaataatagcaatagtaagcaacacaatcttaatgttgcatttgtaaagaatatcaccactcaatttacagtttttgtttttaattcttatgtctttttggcagctaagaagaaccagctccaggtaaacaatacccaattgacctgtaaatcttgccagttttatcactgcattaatcacagcacattgcaaacacatagtatttctaccttgatgattctgggtcacatccctgggctatggattcctgttaatctgtctgaaccttgggctgccatgcctgctttgcattttgtgaaacttcttctaactcagcttacgcatcgtgtctgtagagacttaggcataatttttgctattgtttccttagtcacactaataacttctgttgtgatgtcctctgtagctttgcataattctattcaaacagctcagtacctggagaactggacgcgcacagctgaccaaccgtggctacttcagaataaaattaacactgagttacaaactgaagtggcaatgttaaaatccacggtcctttggttaggagaaaaagtacagagcttgcagttgcagcatcagttgcattgtcattttaaccacactcatatttgtgtaaacaactaagaatataaccaaagtgactatccatgggaccttgtgaaagcccatttacagggagcgttcacatccaacatcacctttgatattggtgaattacaaaacaaaattcttgttttaaataagcaaactcaaaaatttcaacctgctttagaagactggaccaaattccagcaacgcctggcaagcctcaacccttggacctatctaaagcaccacattaacaatttatatgtagttcttggaataatgttgttttgtctctgtcttctgctcatagtctgtaaaatcggacggactgccaatcagagaatgagagatgcccagcctggccttacattctttcaattaatacataaacacaaagggagagatgttgggagccaaaaaggccaaagggatcatgatcaactcagcattccactggaggctatatgatcaaatagcaaactgtttatcactatcacgaatgcaggatgtgagcaaactcacactgcgcctgccaccaaaaggttggctgagggcctcactccctggcacggggctccttgaagttatctactgagaaatctagtgtctattgttcaaacgatgcagtctggcaagcctgctgtgaaccaaccagccgactgacaattaccccacaatcaccccccatttatccctatctgttttgcctaataaatatggagggctgtgtaaagctcagggcccttgtccactagaggcaaggtgccccctgaccccttcttccaaatatactcttttgtctcttgtcttttattctcacgttcaccaccctttgttgttaccctaagtccatgcaggttgcaagtggcacccctgatcaacgacagaatcgggtgctctacagtcagggagggccatgttaaacccttttgtaagccttgggttttgagtgagatggggagccacttaggtgttgtgagcaaataaatgacagaattagaccttgtaacaacaagaaaaccctatgtggcagctgaattaagtggacagaagtgaggcaaagtggaggcaggagaccagttaggctattcaaataatggaggtgagagataacagcagtttggcccagggtggggaccatggaggcggtaaaatttaatggttaaattctcatagattttgaaagcacagctgacaaggcttggtgatagacatgctatagcacaagaaaggagaagtcaaggatgaccccagaattgtggccccaggaactgcaatagaattaccagagaaggtcatggatggagttgggggtgggagaagagttgggagctcagcattgaagtggtgcttgtcagaaatcagagcagaaatgatgaggagcctaagggtcaaggagaggtgtggaccaatgataaaaatgtgggcatcactagcatgggctcaaccaccaagagttgagcactgtgtgggcagggcctcgtgcctgtaagaaagattcaatacacggtacagatttttcctctccagctcttccttccttgtttttttttttttttttttttggtttgtttgtttggtttttttgagtcggagtctcactctgtcgcccaggatggagtgcagtggtgcgatctccgctcactgcaagctccgcctcccgggttcacgccattctcctgcttcagcctcccaagtagctgggactacaggcgcccgccaccatgcccggctaattttttatattgttattagagagacggggtgtgaaaccgtgttagccaggatggtcatgatctcctgaccttgtgatccgcccgcctcggcctcccaatgtgctgggattacaggcatgagccaccgcgcctggctgttttttttttgttgttgttgtttttttaattgaagtgagcgatagagtcaaaacctctttttttttttttacgttttagttatttcctagatttccaatctctccaggatgtgttactacatcactataaagaatttataatttacattccatagtatgtttgtttgtttattttgagatggagtcctgctctgtcacccaggctagagtgcagtggtgcaatctcggctcactgcaacctccgaatcccagcatcccgggttcaagcaattctcctgcctcagcctcccaagtagatgggattacaggcgtgcgccaccacacccagctaatttttttgtttgtttgtttttgagaggagtctccctctgtcgccaggctggagtgcagtggcacaatttcggctcaccacaacctccgactccctggttcaagcgattctcctgcctcagcttcccaagtagctgggaatacaggcacgcgccaccatgcccagctaatttttttttttttttttgagacagaagtttgcttttgtccccaagactggggtgcaatggtgtgatctcagctcactgcaacctccgcctcccaagttcaagcgattctcctgcctcagcctcccaattagctgggattatagggttgtgccaccatacctggctaatttttgtgtttttagtagagacggggtttcactacattggccaggatagcctcaatctcctgacctcgtgatccgcccgcctcggcctcccaaagtgctgggctcacaggcgtgagacacctcgcccagcctttttttttttttttttttaaacagagtcttgctctgtcacccaggcttgtgccaccacacccggctaatttttgtatttttagtagagacggagtttcaccatgctggccaggctgatctggcctccatctcctgtgcttaaatgatccacccacctccgcctcccaaagtgctgagattacaggcatgagccactgagctcggcccataatgtttttaaaaagtatatctggagatattgacacaattatgaatgcaggctgtaacacttagtaatatggtcaataaattattttgcaatttcaaagtatcattacaaaactaatttaaaaagcagccgggcgcggtggctcatgcctgtaatcccagcactttgggaggccgaggcgggcggatcacgggatcgagagatcgagaccatcctggctacacagtgaaaccctgtctctactaaaaatacaaaaaaattagccgggcatggtagccggcgcctgtagtcccagctacttgggaggctgaggcaggagactggcgtgaacctgggaggcggagtttgcagtgagccgagatcgcgccactgcactccagcctgggcgagagcgagactccgtctcaaaaaaaaaaaaaaaaaaaaagaaaaaactaatataaaaagctgttgaatttctaaacgcatttccaattgacctttatcaattgccaatagttttcaaagtgacaaatgctgaaatttctaacgttactttggaataagcaaatatctctctttgttatagatcatctgtaaaactaatgccatattgaagaaagccaaagttataaaactaaatttgtgaaacagccctttattctttccttttctctttctaggatgggttgaattagtactaaatttgggtttcataagggcgaatttatctttgaaatggattttcctcccatcaggtagtcttaattgctttataaaaatctaaaatctaacacaggtttttaaaaagtaaatttttcaagcagttcatttcctgatgttcggcccaaaagtaaacactgagtatatacatttacttcaaattaaaaactgacgaccggaaagcatacttttaaaggtaatgtccttgtggaaaaagaattaagaatcacgagaacggaactgctatttgctacctctggttttccgttcacagaagcacgaggagcccagcgctgcggctctgcctcgctgggccacccctttcgggcacgaccgggagcgggtgctcctcacaccgagcgcccgggcgagcacagctgcagcctgcggatggagcccagagccctgccctgcagatgacgcgccgctgcagcttcgcccaccctcccacaaaatggctgcgggtggcgccagggatgctgggcgcgcgctccttggaactagagaggaggtggccggggcggggccgagggaggggggtagggcagagccggcgggagcccggcgctgattggccggcctggctggcgggcccccgccgctggttcgtagccggcgcagcggcctgggctgggatgtgaggagcggcgggttccgggctccgggctctgggtggcggcggctgtgagcggcggcactgcggcgcaggccagcgggcgccgtcggcggctggccctgtcggccgcgggatgaggaagcggaccgagcccgtcgccttggagcatgagcgctgcgccgccgcgggctcgtcctcctccggctcggccgccgcggcgctggacgccgactgccgcctgaagcagaacctacgcctgacgggcccggcggcggctgagccgcgctgcgcagccgacgcgggaatgaagcgggcgctgggcaggtgaggcttcgcgcggagcggggggggggggggggccggtccctcactttgcgcaggtgcgtcccgcagggggccgcggtacctcccagcccctcccagagtggccgtccgcccgatccgcggccgcccccgtccgcgcctgtgtcccgcatttggcccgcggcagccccacccccgctcccttccccaggcaccgcggcgggagcgccctgccctgccgctgaccccctgtgtcctgctccggccctctcgccaggcactcctggcctagccttgcaccccgaccctttcccggggaagccggggggacccttacgctgggggcttggcgccgcccgaagtcatgaccccgcgtgggagagcagggtagggggtggggagtccttggaagatccctggacgccaggcacagcagaggcgggaggcagaggggccggcgccagaccctgagagcgctggggcccactcggacctcctcctcctgctctgcatcaggccccacaccgagcgcccgggcgggcgcccctcgggctgggctgcgtgcgcggagccttactggcgccttgggccctcggcggctctccccggtaactagggtcgggggcgtgcgtcgctcagaactcggggacctttggggaagggctcagtgggcggcggggtgctaggggaaggagggactcggagcatcgcagccgtcggagggaaacctgcccttcgctctgctggtgatggttcgtggtacttgaaatctgtccgcacaagttcgcctccttgggaatcatctcgcagtcctgagtcgtttggttattggcgttcaataacctttgggttattgggtagaagatgaatgcgtttatataaagccactttcaaaactgagatgggaacgtgtttcatagggacagatttctcctcccatctgctggtttcctaattatctggctgttgtagaacgtagcattcctgacagctttgaagccttgctacttcgtggtggtttgaagaagttactatatgatgatctcaggcgttgtagcagaggcacttcttttttgaccatctggaatgcccttagttgacgctggccacttgagtgtaaaatatgcgtatcgctcctaaggaaaagtagaatttcaacttcattgcttaaaaaaatcatgaaattaaactatagacacttctaagtcgatggtttgacagaagggcggagactgatagttttgtgtctttrtgtgtaaaattatgtagcatctgatcaatatcttttgtgaaactaatctgttctctttgctatggaaagatttatctgcattaaaaactcatgatttaactttaatacaattttattaacagacatggcataacgcttagataaattggaaaattcttccttcgaaaaaatcaaattgccgggcgcggtggctcacgcctgtaatgccagcactctgggagaccgaggcgggcagattatcagaggtcaggagttcgagaccagcttgaccaacatggagaaaccccgtctgtactaaaaatacaaaattagccgggcgtggtggcgcatatgcctgtaatcccagctactcgggaggctgaggcgggagaatcgcttgaatctgggaggcggaggttgcggtgagccaagatctcgccgaaccgagatcgcaccagtgcactccagcctggacaacaagaacggaactccgtctcaaaaaaaaaaaaaaaaaagaaaaaatcaaattgttttacacaacgtttggggaaacagcggcgacctggcaccttcttgaagaatgtactgtattaaaattacccgattaatttttattttcgtgtcaggacaaagagagacattccagtggtgtccatatcctttggataagcaaaaggctgttaggggtaaaaagcaaaacaaagggaaagaagaccaaatttgttaggttgtcttccttcccagctggctgtctcagacatccttgagctttcttctcttcctcgctcaggctctgcgccaccatcacctcctcctcactgaggccttcttagaccagcccacycctgtcgaccttgttatcactcgagattgtaatttttgctcgtgtgcctcccccgcaaccagaatggaagcgccatgagaacaggagctttgttttctccacttaagtatctccagtacctggcacgtagtaggtagcagaaaatacttgttgaatgaacaaatatccatagaacagatatccattgcgccacagagccggctcgtttgtgtcttttatgatccttctttggatccttccgcacattttttaaactctttattgtcgacatacgtggaagtagagaagacaatctaatgagccttcatgtgtccatcacttaaaagttttcagtgtttagccaattttgaatcatccatccctcttctctttttttttgtaggatgaaggattggatttttttttttttttttttttgagaaggagtctcgctttgtcgcccaggctggagtgcagtggcaatctcggctcactgcaacctccacctcccaggttcaagcaattctcctgccccagcctcctgagtagctgggattacaggcgcccgtcaccgtgcctggctaacttttgtagttttagtagagacggggtttcaccatgttggccaggctggtctcgaactcgtgacctcgtgatccacccacctcggcctcccaaattgctgggattacaggcgtgagccacagcgcccggcctggaatatttttaaacaatttttyttttaagaaagttccgtcacccaggctggagcacagtggcatgatcatggcccactgcagcccagacctcctgggctcaggcgatcctcccatatcgatgctgggtgtatgccaccactcctggttaatttttttttttttttttttttttttwatagagatgaagtctcactatgttgcccccaggctggtcttgaatttctggcttcaagcgatccttcttcctggcctcccaaagtgttaggtatgaaataccgtgccaggcctaaattctcctgcctcagcctcccgagaaggtgggattacaggcatgtgccaccacacatggctaatttttgtattttttgtagagatggggtttcaccatgttggccagactggtctccaactcgtgacttcaagtgatctccctgtcacggcctcccaaagtgttgggattacaggtgtgagccaccatgtctgacctctttttcttttctgattgcattgtatttctagaacaaagttaaataatagggatgacactgagtaacttgtttcattcctgactttaatgagaatgctgttagtgtttttgccatttaagtgccatgctggggtgtgttgctaatgttgtggggagctttttgtttttgttcctgctccctcactgatgtttttaaaataaaaaatggtgattgagttttctcaaatgccagtgtacatctgtggaatgatcatagagattttcttcttttatctgttaacataatgagttatagtaatggatttatattattgaatcatcattgtattcctgggataaactctcttattgtatagccagattctatttattcatttattttttatttttattttttgaggcggggtttcactctgttgcccaggctggagtgcagtggcacgatctcgggtcactgcaacttctgcctcccaggttcaagcaattctctggcctcagcctcccgggtagctgggattacaggcacctgccaccatgcccggctaatttttgtatttttaatggagacgggattttgccatgttgaccaggctggactcgacctactgacctcagataatctgcctgcctcagcctcccaaaatgctgggattataaggcgtgagccaccgcacctggcctatttattaatattttattttgaaattttacatcatgaggccgggctcggtggctcacgcctgtaatcccagcactttgggaggccgaggcaggctgatcacgaggtcaggagatcgagaccatcctggctgacgggtgaaaccccgtctctactaaaaaatacaaaaaaaattagccaggcgtggtggcgggcgcctgtagtcccagctactcaggaggctgaggtaggagaatggcatgaatccgggaggtggagcttgcagcgagcccagattgcaccactgcactccagcctgggcgacagagcaagactccatctcaaaaaaaaaaaaagaaagaaaaagaaattttacatcatttgtgagaatagtctgtaattttctcttatgcaacctttatcaagttgttttagtgttttctatagctttgtaaaaagtttcttacataacattttattctaaacttttatttttattattattattattatttttttgagacggagtctcgctgcatcacccaggctggagtgcagtggcgcgatcttggctcactgcaagctttgcctcccgggttcacgccattctcctgcctcagcctcccaagtcgctgggactacaggtgcccaccaacacacctggctaattttttgtattttttttagtagagacggggtttcaccgtgttagccaggatggtctcaatctcctgacctcgtgatccgcctgccttggactccgaaagtgctgggattacaggtgtcagccaccgcacccggccattttattctaaacttttagccagcttaggaattttttaaattatttgtttaaaatttggtagaaattctcttgtaaaactgtctaagcctggtgcctttcttttatttatttatttatttatttaaattttttggtacaggcaggtcttgccacgttgcctaggctggtcttgaacttctctctcaagcagtccttccacctctgtcccccaaagtattgggattataggcatgagccaccaccctagccagtgctgtttcagaatatagcacttcggtaactactacagtgtcttctacgtctgtttagaatttgctatgtcctggtttcagttttggtggtttatgtattcttataaaattaccaatttaattcaccttttctsctctgtagctatggccatttccctagttttcttccctgttttttgtaattagggtttttcctccgttttcctctttttttttttttttttttttttgagtctcactcttgttgtccaggttggagtgcaatggcatgatcttggctcattgcaacctccgcctcccagtttcaagcgattttcctgcctccgcctcccgagtagctgggattacaggtatgtgccaccacacccagctaattttgtatttttagtagagacagggtttctccatgttggtcaggctggtctcaaactcccaacctcagatgttccacccgccttggcctcccaaagtgttgggattacaggcgtgagccaccgcgcctggcctgctttttcctcctgatttaggctagtcagtamtatatctaatatccatacatacactgaagtggggaaatatatatacacacacacatacacacacacacatgttttgtgctccatcaaagaaaatatctctttttagttctgggggatgctgagaagtggagagaacaggttctttctgaaggggacagcagctaccacaccctgtcctgttgctgcctggcaggaatgtggtcccagagtggccagattgtccagtctttctggaaaagactagctggtgttttttttagtttgttttgttttgtgtttgagatcgggtttggctctacacccggactggagtgctgcagtgcagtcatggctcactgcagcctctgcctctcagggtcaaatggtcttcgcacctcagccttacaagtagctgggactacaggcacccaccaccatgcctagctaatttttgtattttttgtagagacagagttttgccatgttgcccaggctggacttgaactcctgagctcaagtgatccacccgcctaagcctcccaaagtgctgggattacaggcatgagccagtgcacccggccttttgtttgtttatatagttttttttttgtcttagtgtgtgtgcttgtgtgtgtgtgtgtagtattgccaacttttttaacattggtaagtaactcagatgagaacaattttggaggttaaaaaaaaaaccccaaaccagttttttttgtttttaaattctgggccaaaagataatttttaaaggtaaatatttatctcattcataggtcaactctgtactccttgagacgaggaactagatcagttttgctttgcatggtatctggtgtgaggaggtactgggcaaatgagtgatttttttttttcttttttttttttttgagacagagtctcactctgtcacccaggctggagtgcagtggcgtgatctcggctcactgcaacctctgcctcccagattcaagcgattctcctgcctcagcctcctgagtagctgggactatgggcgcccgccaccatgcccggctaattttttttcttttttttcttttttttttttttttttttgagaaagagtctccctctgttgcccaggctggagggcagtggcgtgatctcggctcactgcaacctccgtgtgccaggttcaagtgattctcccgcctcaacctcccgagtagctgggattacaggtgcacgccaccatacctggctaattttttgtatttttagtagggacgaggtttcaccatgttggtcaggctgatcttgaactcctgacctcatgatccgcccaccttggcctcccaaagtactgggattacaggggtgagccactgtgcccggccttaatttttatatttttagtagagacggggtttcaccatattggccaggctggtcttgaactcctgaccttgtgatccgcctgcctcggcttcccaaagtgctgggattacaggcgtgagccaccgcgcccagcccaaatgagggattttgtgggcctttcattagccctggaattgttgggaatgtgcattgaaggcatgactggtctaatttggaccctgagaaggcagtcatgagatgtacacggtctgtgtgttacctagtctttatcctccaactcccaaccgacaggccagatctgctggattgacagagatcagtgggctgcatgggaggtttcatagccagatcaccctcatacgtaaatgccaaagaacatagtcatcacacctatttcttcctttacccaaagaagatactttatccaaggttgctaatggcttccccctaacccagaagagtgggtggctgaggttaacatctgtcttcttcagtgtcagccttcccgaggttcagtatcaacctcaccctctaagtgtccctgtatggtatctcttcatcttttctttacagattaggaagatgggagcgagttctgagctagcttttgtggttaaagtctgcttcatccatctcctttttccttttgctccaccctcagtacagtctgggccaggactgtgacaaggcatggggctggctttgtttatggcgccatagctggccccccycctcaactggtactggttttcctcttcctaactcagtgtaccttatcaatgctgcactccagccagggactggccacactgggacttggtgctttgccactgccttctgctttattaggactctgcatcctgtatctctgcttggttcctagttcctttcagccacagtgacccttcccaagggagtgtccgccttctatggtgactttggcagacaggcctgaactgtgaggggtatctttgggcaggctgaaagcacctgaggcactttcatggaggaagccttggagagaggcatggaagatgggtcatcttgtcaggtttgtgctaacagcgatggagacaggacctcatttcagactcccgctgctgcaacttctcctcctcttcgttcccctcctttctctcctcttccattagaacacttgtccttccagagtgaaatctgcagggaaaatgtttattgaaatataacctcaaaagctgacagatgaagtcaatgctcttcacccagagatgaygccacaggactttggtctcagtgtgcttgtgctttggcaggggccctttcagcatgagagtgggtaagccatctatctcgtgccacaccgagagccagcgtctagagtgtcagtcagtgaacaggggccaagagccaggatgccggaaccaaactgtcccattaccagcaagacttctcatttaggcctcagcccctttgtattgtgatttactgcttcagaggatagccttcatagagacccaggtctcaggtgagttttcagattctctggcttgggtgagttgtgtaacactctgagtttgtttcttcatctgtgatgtagggataagagtgtcttccctgtaggattgtggtgaggcccaggtgtgtggaatgttcctggcacatggtgagtgcttggtcagtgacatcttctagatgactagccccatgatgattataatattaagagctcagggtactggccagtgtggtggctcatgcctgtaatcccagcactttgggaggccgaggcaggcagatcacttgagttcaggagttcaggaccagcctggccaacgtggtgaaacaccatctctactaaaaagacaaaaattagccaggtgaggttgtgagcacctgtaatcccaggtgagggattatctcctgtaatcctgggaggctgaggcaggagaatcgcttgaacccaggaggtggaggctgcagtgagccgagattgcaccactgcactccagcttgggtgacagagcgagactttgtctcaaaaacaaaacaaggaaaaaaaaaaaaaaagagggtactgagaaagatctgttagctcatgtctagaaggattttcttctacccttttctgccccaaacaattaagagtctggcttctcagccagtcgtgcatatagggtccatcctgatcagttaatgtgtctgttggtattagagcatttgtagcaatactatttgcttatttaacacttttttccagccactcatttaacagtttgagtacctgttacgcccagtaacacctgtgaatgctgaggccgttgcagttctcctggcctttacattctggtaggggaggcagataaaacatgaagaaacacatgatgtcatgtgcttagggcactaaggaggaaaatggtgccagtgagggaatagccgcagatgaggccctgtggctgtgtgtgcacagtctgggtgtacaggggatgtttctgacaaggagacatgtgaatggatgccactggctgctagagaaatggcatggtgtgtgtcatcatgtcactctgactgtgtgacaagcacagactgcggtgggcaagcagggagaccggctaggggctgccagggtcayccaggcaagagatgacaggggctcaggccgggacagcagctgtggagataagaagaggcatgtgattctggattcacaaactactttctgagcaacaggaagaatggagttgccagatactgagatggggacagatgtggaaagagcaagtgctttggggcaggagaagtaatgtttggttttggacatattgaggtgcctgttaaacatccaggtggataggggatagagttcaagggggaggttagggcctgtacctgaccatggctgtgacaggtggtacctagacccttgcagcagactctcccagcagacaagtcaggacagaggagtcaggacctgggcaatgagttagaaggattgctgggaaaaggtgtcaaggcagccacctaaagaaggcctgttgcagaagaaagcctgatctgcaattggatttggtgacacgagatcagtattgacaggagtggcttactgcagtggtgggrgcaaaagcctaatggtgagggctcaaggaagaagtggagagaggaaatgcaggtagcttttccagggagctgtgcagtaaagggggaaagacagggagggatggctggagggggtgagttttcttagcagtgatattagatatcaaaaaataaataaataataaaagcatcactatgccataggacaacttcaggcagcccactatattgataattatgatattatgatagttatgtgatatattagccaaaatcgcgccattgcattccagcctgggcaacaagagcgaaactccatctcaaaaaaacaacaaaagaaaccactcaatggtaattgtattccatgtgttccagaagttaagtggagttatggaaaacctgaaaattacygaaatggaatttctaaagatgaaaaccacaatgtgtgagataaaggttacactgaagggaattacactgaagggcagattaaacactgctaaagaaagggctcaactattcaatgtgaaacctggggaaaagagaaccaaacaaattttcaaaagcatcgttacaaggccaggtgcggtggcacacacctgtactcctgccatgcctgtaatcccagcatacctgtaatcctagcactttgggaggataaagaaggaggatcacttgagcccaggaatctgagaccagcctgggcaatgaagggagacctcatctagaccaaaaaaaaaaagaattagccaggcatggcgtgcatgattgcttgagcccgggaggtcaagactgtgtgagccatgatcaagccactgcactctggtctgggcaacagagtgacaccctgtctcaaaaaaatatataaataaataaaagcatcactatgctataggataacttcaagcagcctattatattgataattatgatatcataattgtgcaatattagagcagtctggagtgtgcatgggaataatccaggggagaggagaagatggacggcatgggacagagtaggtgcagtgatgtctctgggcctgtgagaagggatgggacccagtgttctgaggctgagcagaggagttcccctcagataggaaggaaggccaaggctgtggggaaagacatgggtaagttgatctatttgtgggtgaaggaatctgccagttctcttctgagtgcttgtgctgtccttaggaaataagcagcaaggccatctgctaggagggcagagggaaaaggaggtactgggcctctctctctcagttccccacgtgggcgcagtctgagctctcatatcgtctttctgacatttaatgtttttaaaaaggatgacaaggacagttcccttgggaagtcatttcagtcacgacctgctgtgtatctgtggagttgacatgttctgcatagttgagtgctcccctgctctgggaagcctgcacggggtccctgcacacatcccagcatggagggkctcagggctgggtttgagacgaaggtgggcgaaaggttcacatgaactgaggtcatgacagagtgatcaggtgggaccaggcagaactctcggcccccagggcttgctggtacacagattgctaagtgtcttcattgttaaatagaattaatcttcatatggtagttgtgggctgagttgcctcattcacttgtgataagtttagcggataagaaaatgtcctgacataatgagagcagagggcagatgggtgttggtgtgggaaaggctgagaaagccaggacttttgggtttgtaaaggtgaacgtggacacggctgtcagtgagggaatacacgcatacctcaggggtgctgaaacttagggtttgttcttgaagcctgaagttgtcctgagcttcatggtaaaaaaaaaaaaaaaaaaaagttcaaattatcttcagttcttatcaggctggtggagtcttcaaacaaagcttggggtatattgactgaactgttcgtaatgggaaggtaagaatgttcagggtmaatgccggtcattttgatgtggtagttcagatcactagaatagatatggcttttaactttcaactatttttttctcctmataatgtgtacatcatatatgccctaccccttcatccttgacctttgccactcctggtcctggataaccacattgctcctacctgaaagtggccctgtcaatgccaagtgcccataggtcattttattcagtagctactgtattcctgctgtttgccagatgttgtgccaggccctggggatacaaggagatagtacctgtcctcagggagctagttgtctgtcatgttttatgcttggcaaccatcagctcttgcatactcaggctttgatgatgcctttggcaaagagaaaatacagggatggctggagaaggttagtctaccttcattcacatttatcctttcttaaagactcctgtgttgctctgacatttttatgtactgatttatcttcagggtatctgctatggcttgatggtttaatggtttaaatgtgtccccgaaaatttcatgtgttggaaagtattggaatcttggtcctcaatgtagtactaactacatataagaagtgggacctggccggacgcggtggcccacgcctgtcatcccagcactttgggaggctgaggtgggcggaacacgagatcaagagatcaagaccatcctggccaacatggtgaaaccccgtctatcctaaaaatacaaaaattagctgggtgtggtggcacacgcctgtaatcccagctacttgggaggctgaggcaggagaatcgcttgaacctggaaggcagaagttgcagtgagccgagatcacgccactgtactccagcctgggtgacagagcaagattccatctcaaaacaaacaaacaaaaaaactagaggtgggacctttgggaggtgattgggtcatgagggctttgctctcatgagtggatgaatccattcatagattaatggtttattgagggtttgggttagttatcatgagagttatcactgttgtaaaaggcagtgtggccatctcctctgatccccattaccatgtgatgccctgagccaccttgggactcttcggagtccccaccagcaagaaggtcctcaccagatatggccccttgaccttggacttcccagcctccagaatgctaagaaataaatttccttctttataaattactgacctcagttatttaattatagaaacaaaaaactgactaagaataggtctcttagcctcttgcttgacaggatgtaatgcaaaatgcattgctggccaatagagccatctaaagacatgagaaaaattctcagtttggggacacaggacaccttgacaaggcacatcatggcataacctacaagaaggcaagcaaaaaagactgccattctaggacattcaatatctggcttagggttccaggaggaagggactgttaggccagtacaggccagctgggaggctgccagtgcagccccagagcctcaggaaaaagctgaaggagattctgccagggcccagggaagcatctccaggtatgaggtcgcctgggagatgtcatagctgtggtgaagggcggcctctgaggggccctctctctctcactctgttcctctctcaaacagtttgatttttttttctgattccaaagtaataaagagttcttaataaaaatttaaaacagagaaagtgaaactccctctggataattgctgtgaacagtgtggcctgtgttgagagtattgctcctgtgttcttccatccatttagcaagtatgtctttttcgttgacctagccttcactgaaggctagagtggataaaatgctgcacaagagtgggacaaatcccagtccttgtgggacttctgttctcatgaaggagaaacacggcaacaaagatagcacataagtatacagtaaaatttcaaagggtgataaagtgctataaagaaaaataaagcaaggtaaggttatgtggctgtgtgtaaagcacctgaaaacatgccgtaccacagtggtgaaatatttttgtttctgccaggaaaataaggccttctcacagtaggatacccagttgttcagttctgccgactgaatcctcatgattttttgttttcttctttgggaacaaagagacatttatggactgctcttgtgtgttttattaaggccttaaagttttcaattcagtagagtgaaattgctctcaacactgactgcttttgaatatgattatggagattgttgttaagatttccgcctaaaagctaagaagaatttaatctgttagtcttggggaatgagatttggcgttactctcttgttccttctmagagaataccatggaattaaatgataaaacacttttcctcaacaattttgatggttacattaatgaaggagttgatgaaaactaattgtagacattattattattattattattttttgagacagagtctcactctgtcgcccaggctggagtgcagtggtgcgatctgggctcactacaatctccgcctcccagctcatgccattctcctgcctcagcctcccaagtggctgggactacaggcgcccaccaccacgcccagctaatatttttgtatttttagtagagacggggtttcaccgtgttagccaggatggtctcgatctcctgacctcgtgatccacctgccttggcctcccaaagtgctgggattacaggygtgagccactgcacccagctaattatagacatattttaaaagaaacatagaacttccactactgaccaaggtggctgaatttacccggaaataacccaaatagcagccacaacaaaaacgacaacatacacgaaacaatttttaaaacactgggcaccaagcaacaaaggacagtaaactcggagaagtgacagacaaaggaagtgagccctacagtaccctagctgatctccttgagagagcttccacgccatggcacagggaggggagccacgtggactcccagggttgtgggtgtggagctgagaatctggagagaccaatgtggctagagtttataggacagagtaccagagaggagagagcaacacagagagagaccctggggtctgcagagggtccccttgatcagcacacgtgtgtgaggaaactctctgtggctggggaaagaactgtctgaaaagatcagaagatacagtccctgctacttagagcaagattataatttactggtagaacattcaggaacagcatgcttcagtagtgggaaattccaggtgtatgggtttgtgagggctaccataacaaagtaacacagaccaggtgacttaaatggcagaagtttattttctctcgattccagaggccagaagtccaagatggaggtgtcagcagggctggtttctcatgaggcccctctgctttgcctgtagatgaccaccttctccatgtgtcttcatatggtctaacctctgtgtgtggctctttctgcatttcttcttacaaagctgagtcatagtggattagggtccaccctgatgacctcattttagcataattacctccttaagaccctctctctaaatacagtcatattctgaagtgctaggggttaagacttcaacatacaaattttgaggggacattattcagcccatagcacaggcatgcagagtgggaggaaactatgatgtgtatataatgaagagaataatcaatgaaaaccgactgagtactgacacgcacgttagtgttgaagagaagcacattaaaacactgtaggctgggcgtggtggctcacacctgtaatcccagcactttgggaggccgaggcgggaggatcacctgaggtaaggagtttgagaccagcctgaccaacatggagaaaccctgtgtcctgtctctactaaaattacaaaattagccgggtgtggtggcacatgcctgtaatcccagctactcgggaggctgaggcaggagaatcacttgaacctgggaggcggaggttgcagtgagctgagatcgtgccactgcactccagcctgggcaacaagagcgaaattccatctcaaaaacaaacaaacaaacttactgtaattgtattccatatgttctagaagttaagtggagagtcatggaaaatctgaaaattacccaaattgaatttctgaagatgaaaaccataatgtgtgaggtaaagtttacactgaagggaattacattgaagggcagattaaacactgctaaagaaagagctcaactattcaacatgaaacctggggaaaagagaaccaaacagattttcaaaagcatcattactaggccaggtgtggtggcacacacctgtactccgaccatgtgtgtaatcccagcacacctgtaatcctagcactttgggaggataaagaaggaggatcacttgagcccaggaatctgagaccagcctgggcaacaaagggagacctcatcaaaaaagaaaaaaattgaacaattagccaggcgtggtgtgcaygcctttgattmcaactaattgggaggctaaggtgggaggattgcttgagcctgggaggtcaagactgcatgagccatgatcaagccactacactctggtctgggcaacagagtgagaccctgtcaataaataaataaataaatrcatcactatgctatgggacaacttcaggtagcctattatactgataattaaagtcctcaaagaagaggagaaaggagagaaaaaatatttgaagaaatagtggccagaaactttacaagcttggtgaaaactgtaaacccactgctaagaagcttaattaatctcctgcataagaaacatgaagcagtataccaaggcacttcgtaatcaaattgctcaaaatcagtgataaagaaaaaaaaaaccttcaaaccaaccagaggaaaaaagacatactgtgcacacaggaacaaagatatgggcaaagaagttttcttaaaagaaaagtaagtaagaattcagtgaagcaacgtctttatttttttaatttttttttttgagayggtgtctcagtctgtatcccaggctggagcacagtggcacaatctctgctcactgcaaccttcatcttccggattcaagcaattctcctgcctcagccccccaagtagccaggattacaggtgcccgccaccacacccggctgatttttgtatttttagtagatacagagttttaccatgttggccaggccggtcttgaactcctgacctcaggtgatccacccgccccggcttcccaaaatgctgggattacaggtttgagtcactgcgcctggccttgaagcaacatctttgaygctgtcatgccatgtagtaatgtcactcaatatagtaatgtcactcaataacaggtacaccttctgagcaatgtggtgttaggcaagtgcattgtcacgcgaagatcagagtgtatttacacaaacatagatggtacggcctattacacgcctgggctatgtggtaaggcctattgctcctaggctgcaaacctgcacagcatgatactgtactgagtcctgtaggcagttgtgacacaatgttaagtatttgtgtatctacacatagaaaaggtacagtgaaaatacaatataaaagataaaaaacagtacagtatagggcacttaccatgattggagcctgcaggactggaggttgctctgggtgagtcagtgagtgagtggtgagtgaatgtgaaggcttaggacatgaatatacatttttatacaacttgcagtggtttgtttataccacatcaccacaaatgtgagtaatgcttttcactgtgacgctacagccatgacattaggcaataggaattttttagttctattataatcatatgggacaaccattgtataagtggtccactgttggctgaaatgctattatgcagtttgcatgactgtactgaaagaaaaagctatccgtccaaaattcttgaccaggtgaaaataactttttatgttgtcattcctcccaccccaaatatcttcaaaggcaaaatagtgaagttttcagatataaaaaagctgaaagagggccaggtgtggtggctcacgcctgtaatccaaacactttgggaggccaagatggaaggatcacttgagcccaggagttccagtccagcctgggaaacatagccaaactggctatgttttatagactccatctttacgaaaagtcaaagattagctgagcatggtggtgtgcacctgtggtcctagctacttgggaggcaggaggatcacttaaggccaggaggtggagactgcacttaagcgcaggtgacagagtaagatcttgtttcttaaaaaaaaaaaaagaagaggctgagataattcatcatcagcagacccatgctttaagaaatgttaacacccaggtgtgctggctcatacctataatcccagcactttgggagatcaagatggtgggatcgcttgaacccaggaatttggggcttcagagagctatgagcatgccactgcactccagcctaggtgacagagaaagatcccctctctaaaaaaacaacaagtgaaattacaaagtagctcacatggaatgaaaaggaagacacacgtatgcccygaaagcatgcttgaggaaagtgaaaatatagcactgaatgcctatagtaaaaaagaaagatcttcaattgatgactttagctttcacattaaaaatctaggggaccaggcactgtggcttatgcctgcaagcccagcagtttgggagactggggcaggcaggtcacttgagtccaaggagttcgagaccagcttgggatccacagtattttggactacttttttactgtgaggaagggaaatgagaaaataaatgtagagaactggcatgaagctaactttgtataatgattgaaccctgagacagtggcctttctatcaagtttctgagatccttacttggcaaaataaaaacccggcaatattaggtcagtccccattttatagaacattttattagttcatgaaacaaaaatctaggaaccagttctttggggagtgtcaggaagcggggagggttatgttgggaggaatcacttctgaagagagatgaatagggttgaagatgaagcagtcaagatggttactaagcgttttataaccaggtgttttggtttttaaaaaatcaggcatttctgtgcattagagcctgctgctgcctccaggttgtaaacagtgttctaagggccagccacagtgaaatccagtgcagggctaccatcctgatagagcggcttggtaccagtgtcccacaccccaatgtaggcattgcccatggggacgagaggggacatagacactccttgggggccttttgtgtaggaaccgtgaccaccagtccagtgtctcagtctgtggtctctcctttaaagtaggaatcttcctaattagctgatcactctcgttcttcctggactccccagtgtctttcagaaatagcttctggtaagttgcagcttgctcatgatgggagggaaggaagaggaagtagaacagtagaggcagaacaattaaaaataaatggtgaagggcctggtgtgtggctcacacctgtaatcccagtactttgggaggctgaggaaggaggattgcttgagctcaggagtttgagaccagcctaggaaacatggtgaaacctgtctctaccaaaaaaaaaaaaaaaagtcaataaaggcacaagaagaattaataaaaataacattgattgagaactgtgtaccagataccgtttccttaagcgctttacgtgtgtgaattcatggaatgctcacagctgcctcatgagattggtgggtcgccctcttcacagatgaggaagccaaggcatggatggttaagtagcttgcccagggtcgcacacccatccaagtggcagacctgccatctccactactcatgctctaatcgctgtgctctcctgcccctgcttagggctgtctctcttatacatcctgactattacaaggggaaattattatgggttgaaaatattgagccagtgtcacttgagagaaatagtttattcatcagcatattgctttccttctctgacagcattggtgactctgcggctgtgcytgaggggtgggcttctgagggcacagaagtcttttcttggagttggtggcctctgagtcttccacagagccttctcttggagttggtgaccttctctgtggcccccttattgtcttggcaccttcarcctccagtgctttggttgtgactgggaagctctgggtgccagctgagggagtagggaagcaagacctccagggagacctgtgtaccccagtaatcactgggatgcatgagagatctgatgcatcactgtgactcaaggggaccccccacagtcagcgccccaaggcattgaaagctttgaaggatgagtgtgtttgggtccactgtaatcaatttaagtaggaattcccgcagtggttttgtgcatttctttaagaaaataacctgraagcccagtctttccagataggaaaaaacaaagggcaaggacccacttatatctaaaartgtcctttgttaacaaaaaatctacaaagggctttttttttttttttttttttataacagagacagagaaacagggtcttgctgtgctgcccacactggtctcattctcctggccttaygcaatcctctcgcctcagcccccacagagtgctgcattacagcagagtgctggcattacaggggcgagccaccatgcctggccagagctcctttaaagagcaagtttttccagtgtgaagttataaaatagcttacttaatgtgttgtgcatgcatgtgtagctatttaaacytgtggacacaacatcagtgctcactggcactcctggtttgggatcttaccctcttgaactgagacgcggtctcacaatctgaatggaagtgacgtgtcactycggtaggcagaagtggttaagagcaggtacgtgatccttcgtgccctctgctcctgctgcagcaaaccctaaagccttgtgtggaggtggcagtgtcgcaaagtgatggagtttctgcaagacaggttcctgagtaatgtgtttagtagaactccagctgacctgtgctggacccacagctagaggaagaaataagctgtggttctttaggcctcttagatttggtagctgttgctgcattttaactttatctagaatatatagagaaattttaaaactccgcaacaaaacaccaattcaaaaatgggcctagaactcgaagagacatttctctaaagacggatagatgacttataagcacatgaatagatgcccaacattactaatccattrgggaaatggaaatcaaaaccacaatgagataccacctcacaccaattaggatggctaattttttttttttacttttgaaatgtggtccttctctgtcacccaggctggactacagtggtgcaatcatggcttacccttgatctccctggctcaagcggtcttcccacttcagcctcccgagtagctgggactataggtgcatgccactacacctggctaggtttttaatttttgatagaaagagggtctaaatatgttgcccaagctggtcccaaactcatgaattaagcaatcctgccgcagcctcccaaagcactggaattacaggcatgagccactgcgcctgtctgaggatggctaataatttttttaaaagaaagtaggctttgcagatgccaccgccgctgggagccctgtactatcagccatggtcaaccccactgttcttcaacattgctgacgaaggcaagcccttgggcygcgtctccttcaacctgtttgcagacaagattccaaagacagcagaaaactttcatgctctgagcactggcgagaaaggatttggttttaagggtttccgctttcacagaattattccagggtttatgtatcagggtggtgacttcacacccataatggcactggtggcaagtccatttacggggagaaatttggtgatgaaaacttcatcctaaagcatacaggtcctrgcatcttgtccatggcaaatgctggacccracacaaacggttcccagtttttcatctgcactgccaagactgagtggttggatggcaagcatgtggtctgtggcaaggcgaaagaaggcaagaatattgtggaggccatggagcgctgtggttccaggaatggyaagaccagcaagaagatcaccattgctgactgtgaacaactctaataagtttgacttgtgttttatcttaaccaccagaccattccttctgtagctcaggagagcacccctccaccccatttgctctcagtatcctagaatctttgtgctcttgctgcagttccctttgggttccatgttttccttgttcccttccgtgcctagctggattgcagtgttaagtttatgattatgaataaaaacraaataacaaaaaatagtaaatgttggcaatgatatgagaaattggaacccttgcacactgttagtgggaataaaaatggtacagaaactgtggaaaacaatatggctgtctctttaaaaattgaacatagaattactgtataatgcagcagctgcgcttctgggtatctaccaaaaataattgaaaacagggtctctaagagccatttatttgtacacccatgttcatagcagcactattcacaatagctaaaacatggaagcaacccagatgtccacccatggatgaatggataagcaaaatgtggtatatctgtacaatggaaagaatttctgaaatatgctacaacatgaatgaaccttgaagacattatgctaaatgaagtaagccagtcacaaaaagacaagtactgtatgattccacttacgtgaggcmctagagtcgtcaaggtactagtagcagaaagtggaagggtggttgccatgggctgggggatggagaatgggagttactgtttaatgggtacagagtttcagctttacagatggaaagagttacagagatggatggtagtggtgattacacaacagtatgaacatatgaacatattaccactgaactgtacacgtgaaaatggttatgatggtaaattttgttacgtgtaaaaaaattggaaaaatgtgtaaaatttcttaaattgctgaagtatatgtggcaaattctctgccccccatttcccctttcttaatatgaatggtccctcctcccacaaaactgtaagccctccctccatgtcaccgtatgaacactcattctttgttttttaatgactacatgtcatctcagtgtatggacacactatcccctattaaagagatgtaaaattagtgtgctgtaatctgtagctttcttgtatacaaacaacagtagttggttgtaagatataaaggaagagaagacaaattcaaaaaacattcctcagattattcatctaacagaatcccaaattttaaaatgcccatccgtttctctcttgttcaatacaagctgattctgaagttcagatgaaaaaatatacagagatctcgtaccaagggtatattcaaaaaagaaaaaaaatgacctacagaagtgccatgagcctctggmaaaagaagagaggtgtgtggggtctggtccatgctacagtgctcagctcaggaataacaggccagtgtgacaggacagagattcccaaatagacccaaatacacttgtgaatttagttttaggtgaagttggaataatagttgagtggagtcaaggttgattttgattgttaataaaggtttttgggacaattgggtagccatttgaaataaaataaatctggatccatatcttactctgtaaacaagaaaccaagaagtactagaagaaaacaggagtgaaattctaaagtcttgaaatggaggagggctttctaactataactcaagagtccaaattctrttaagatggctgaaaagaaaaatgggtgcagtggttcatgcctgtaatcccagcactttgggaagctgaggcaggcggatcaactgaggtcgggagttcgagaccagcctgaccaacatggagaaaccccatctctactaaaaatacaaaactagccaggcatgttggcacatgcctgtaatcctagctactagggaggctgaggcaggagaacctgggaggtggaggttgcggtaagccgagatcacaccattgcactccagcctgggcaacaagagtgaaactccttcttaaaaaaaaaaagaaaagaaaagacttagaataaatttgactttgtaatatgaaaaaaatttgcatgatgtaaataatgacaaaatacaaatatttgcaactcataggtaaagaggtgtaataataaagaacttctaggaattgaaaagaaaaaagttcaaggcccaatgaaaaatatgcgaaagatagcataattcattgaaaaggaaatataacccttcaatatgtgaaakaattaacaatatttatttratttttaagggtcttactatgtcagccaggctggagtgcagtggtgcgatctcagctcactacagccttgacctcccgggctcaagcagtcctcccaactcagcctcctgagtagctgggagtataggcacacaccaccatgcttagctaatgtttaaattttttgtagaaacctatgttgtccaggctggtcttgaactcctggcctcaagcaatcctcccacctcagcctctcaaaktgctgggattataggtgtgaggccctgcacctggtgaacactttattaattaatgaaagtcaaaactacaccaagatgccatttctcacctatcagattggagaaaatgcatctttgacaaccactttgttagtgagggctgagggaagcaaggatttgggaggataatcttttaataatatagatgcacttactctttgatccagtaatttccattctaagagtgtcctatctgtacatacaaaattaggtatgtacagagtgattcattgtagcactgattgctggaaaccacctgattgtccagcagtgggaaactggcttaataacctatgttatgccaacccagttaggagytgtaaaataggtaagcattgatgtggagaaatttcttggatatcttgttgatagaaaaaaaaatcaaggtgtaaaacagtttacaatactacctttttatgagaaaaaggaatgagaacatgcacctgtatttgtgtaaggaaacactggaaggataaataagtagcaaataaaaatgcttatctgtgggcatgatggggacaggatacatggtgacaagttggcagtgagactttgttttaatttttgaactatgtaaacatatgacctttttcaaaaaagctattgttaagctagaaacaaaaatgagcatgtagagtattaatctttaagaattagttaggataacacttggtgctgtaccagcagccagccacatgaggccttactcacgttgcataggtgagaactacttacctggctacacctgcctccatgttgagctgggaaatgtagcccccagctaggcagccattcccatgcccaactctacactccgtagggaagggacagtacaaggttttggtggtctyctagccatctccacctcaggacttgggcccctgatctgtatggtcacctcttcagagggccagagagcagctcccattggcggtgtgagagtgtttgcccagagttactcttttgatattgtcagtattcttatattcttattctttgccagtgatttaggtgaaaatggaacctcatggtttaatttgcatttctatgtgtcatcttaatttagtgacgtatgttttgggaacaggaaatataacaaaatagctctgtaggccgttaggtatggtttagatatggtttgtttggccctgccaagtctcatgttgaaatttgatctggcaggaggtaggaggtgtctgggtcacccagggggaagattccttatgaatggctgggtccactcttatgggaatgagtgagttctgactctgagttcctgtaaaaggagcctggcaccttccctcccctctgctctgcgatctctgcccaccacatccccttgctttccaccctgagtggaagcaacctgaagccatcaccagatgtggatgtgggcaccatgcttcttgtctagcctgcagaactgtgagccaaataaacctcttttctttataaattacctagcctcaggtattcctaatatagcaacacaaaaatggactaaggcacctttgtcatctgaagataaatttctagaatattgtcttatcatgagtttttgttttgtttgaataaaaagtgaaggcgaatgattttgagagctagtttaggagagtcttagtatggccttgacccggaaggctgaaaggcagggtcctggggcctgtgacctgtcctgatgatcaggcctgtgggatacagtagtggggaggaggttttcctgctccattctcagcacaaggagccttagggcttagagattttcaactggatgaaaatgcagatgcttgtgtttgtttattctaaagcttttttttgcaccttcatttctaattcttcattgataagttgcccacatactgcatttaaaattaatttcttttttttgttgtttttttgagacagagtttctcccttattgcccaggctggagtgcaatggcgcaatctcaactcactgcaacctccgcctcctgggttcaagcgattctgctgcctcagcctcccaagtatctgagattacgggcatgtgccaccatgcccagctaattttgtattttagtggagatggggtttcaccatgttggtcaggctggtctcaaactcctgacctcaggtaatccacctgccttggcctcccaaaacgctgagattacaggaatgagccacygtgcctgcccccttaaaattaaatattgattaaaggcatccatctcatcaaccaacattataatgaaaagtaaatgtcagccaggtgcggtgactcacgcctgctctcccagcactttgggaggccgaggcgagtggatcacgaggtcaggagatgcacaccatcctggccaacatggtgaaaccccgtctctactaaaaatacaaaaattagctgggcgtgggtgcgtgtacctgtaataccagctactcgggaggctgaggcaggagaatcatttgaacctgggaggcggaggttgtggtgagccaagattgcaccactgcactccagcctggcaacagagcgagactgtctcaaaaaaaaaaaaaaaaaagtaaaatgtcaatcattttatttactgctggcacctggtgaacacttgataaatatttgttaaatgaatggaaattcaaataaataatactttttatttgttctcacctctactataaaatactctgaatgttctagacattattggaagatgagaaatagataacccttataaaaaggaggagtcaaaattgccattgattgcagtgactttctacttgaaaaactccaaaaaaaaaatcaagtaaaaggctgggcacagtggttcacgcctgtaatcccagcactttgggaggccgaggtgggcagatcacctgaggttgggacttcgagagtagcctgaccaacatggagaaacctgtctctagtaaaaatacaaaattagccgggggtggtggtgcacrcctgcaatcccatctactcgggaggctgaggcaggagaattgcttgaacccgggagttggaagttgtggtgagccaagatcgcgccattgcactctagcctgggcaacaagagcgaaactccgtctcaaaaaacaacgacaaaaaaaaaaacaagtaaaaattctcaaaactcatggagtcccctcccctcccctcccctgtccttccctcccctcccctcccctgtcctcccctgcccttctgtctctttttgagacagagtctcgctctgtgacctaggctggagtgcagtggcgcgatctcagctcactgcaacctccatttccggggttcaagcaattctctgcctcagcctcccgagtagataggattataggcacccgccaccacgcccggctgatttttgtatttttagtagacacggggtttcaccatcttggccagactggttttgaactcctgacctcgttatccacccagctgggcctcccaaagtgctgggattgtaagccactgtgcccggccttttctttcttttttgacagagtcttgctctgttgcccaggctggagtgcaatggcacaatgttggctcaccacaacctccgcctgctgggttcaagtgcttctcctgccttagcctcctgagtagctggaattacaggcatgtgccaccacgcccagctaattttttctgtgtatttttagtagagacgggttttcaccatgttggccaggctagtctcaaaatcctgacctcatgtgatccacccgcctcgatctccaaacgtgctgggattacaggcatgagccaccgtgcccgggtgtaagattttcttttctttttttgtgtgtgtgtgttttgagacggagtgtcgctctgtcccccaggctggagtgcagtggcgggatcttggctcactgcaagctccgcctcctgggttcacgctcttctcctgcctcaacctcccgagtagctgggactacaggcgcccgcyaccacgcccagctatttttttgtatttttagtagagacgaggtttcaccgtgttagccagaatggtctcgatctcctgacctcgtgatccacccgtctcggcctcccaaagtgctaggattacaggcgtgagccaccacgcccggtcccaggtgtaagattttcaaatgcaaaataaatataccaactgatagctttcttatataccagtaaccagctggctggaaagatggaacaggataaacttttatttcacagtagcaatagcaacaacaaaatacacatctaagaattacataagaaatacatagaatgttacctaggcgaggtggcgcatgtctgtaattccagtgagctgagatcgcaccactgcactccagcctgggtgagcaagtgagactctgtctcaaaaaaaaacaaaaaacacgcatagactgtttatcaagaaaatcattaaactttactgagagacataatatttaagtggaaagatacagtttgtttttagatgagaacatacaatattgaaaagatactgttcctttttcaaatagatttcatgcagttctggctgggattggtcagactcagcttcctgtctagggaagtcagagtgcaggggcctgagtgagtctggcaacatggggattctgtggttgcagacggcaagcttcagtgtggaccagggactggaggttcagcagccgcttagcgtgggattgcaggggcggtgggccctgtatcttttgttgctaagctcaccttggcctgtgtccagcttccagctctctgagagctgcggaagatggctgggggttctccacactgttttcyaaactttaacatacttctgcttttagtgtatctggccttcgtagtccaaaccttctatggtttaccctctgcagagaataaatcttcagtctcttgatgaattggggcagtggccccactctgttcagtgaggtagaagcccagasgggtttttccagttgtccgcctgatcctggcctccacctgatcctcccgccacgggtacctggtgctgttggttcatgtgccttgtcttcccctgtgctggttttggacttttctggatctgtcaccttaattcctgtccttctgttttccagcttctaaystggtattggtgtctctcctctcattctgaccactatggttttatatccttttaaaattttactgtcattttagtggcattttaagaggaaatagttaaatctaccatctttagcctcaaacataagactgtaacatgtgtggccggggcatggtggctcacacctgtaatcccagcactttaggaggccaaggcgggtagatcacgaggtcaggagttcaagaccagcctggccaatatggtgaaaccctgtctctactaaaaatacaaaaattagtcgggcgtggtggtgcatgcctgtaatcccagctacttgggaggctgaggcaggagaattgcctgaacctgggaggcggaagttgcagtgagccgagatcgcaccactgcactccaggctgggtgacagagtgagactccatctcaaaaaaaaaaaaaaaaaaaaaaagtaacgtgttcaaggtggcaatttaaacacagtgaagaattgcttgggtaactatttagagatacagaaatttagaaycctacgtcccactatataccaaaataaattccagagagactgaatgtaaagtgtaaagccctaaaataaaaagaatatttacccactctcaaggacagaggagaacatcaagaaaccataaagaaaaagatgaatagagtagaaatacataaaaatttaaaatggtccttaatttaaaaaatcctaaataaaagagacaaatgatagagggaaatatttttaacgtacacttctataatgtcagacaaagatttagcatccttaatataaaaagttcttggccaggcacagtggctcacgcctataatcctagcactttttggaggctgaggtgggaggatcacttgaggccaggagttcaagaccagtctggccaacatggtgaaaccctgtttctactaaaaataaaaaaactcagcaggcatggtggtacatgcttgtagtcccagctacttgggaggctatggcatgagaattgcttgaacctgggagatggaggttgcagtgagccgagatcgcaccactgcactccagtctgggcgacagagcaaaattctttccctgcttacccccacctagacaaagttattatacatcagtaatgagaagataataygagatattttgtcattaaccacagtgattagagcagcatgttattctgatttttaaaaatgtatagaagaaacagtgaaatagaaatgttttttttttttttttttttttgagacggagtctcgctctgtggcccaggcgggagtgcagtggcgcaatctcggctcactgcaagctccgcctcccgggttcacgccattctcttgcctcagcctcccgagtagctgggactacaggcgcccgccatcacgcccggctaatttttttttgtatttttagtagagacggggtttcaccgtgttagccaggatggtctcgatctcctgacctcgtgatccaccygcctcggcctcccaaagtgctgggattacaagcgtgagccaccacgcccggccaatagaaatgttatatgcaatttttttttttttttttttacaaaggaggcatcattaatgcatgctagggtaattgtatacttgtttgggagaaaatagttttgtcatctcrtatatgctaaaataattccagattaatttaacagtaactattgttaacattttggttataacttttcacactgttcatacacctatatttttgcattttcacatatgattttataagctgtaaaaccactatattctggattttcatccaggtcttcacatagagatggcattgctttgaatgactacatagcacctccttatcccatggatgccagcctcccttggcactggtgtggcacagtgctgtctgaccctgaaaggtgttctggggggtggccgatatggacaaggggtccaagttcacgtgtgcccggagtgccaccctatgcactctgcayaggtctgcataggtctcctgccacctcctagcctgaggcctgcagatgtggagtttgtacctttgttgcctcttctgggtacttgctgtgttttgacacatactgaagagggtgtgcaggtgatggtgctagtttgcttgtacagaagcaaagaaagagggataaaatgcagaccagtgaggaaacaggcagtaatgttaggaggccttcacaaacttcactgttgcccatgaggatagaccaacagttggtggaatggtagctggaagaaactcctgcctgcagcatatcatgacttcagggaaattttagaagaatagtcactgactttgccagtaaagatcctatatgatgtgcacccagcatccttgtgctaaatgggctcatcgtttatttaattagcttcctattgatggacaattggcttcttcctagttcttcctgctattattagcaactttcatatgtctaacttttgttcctttgttagtgtccaattatttagcgtaatttgagatttgatgggtcaaagagtatgaatatttaaaattttgaaactgttgccaatgtgacttccaacatgattaggaaagtttgccttcctaccaagagagcctcagtgcccatttcccccacccctgctgtcattagatggtattattattattactgtttttgagacagggtctcactctgtcacccaggctggactgcagtggcatggtcttggctcattgtagtctcgacctcccaggctcaaacaatcctcccacctcagcttcctgagtaactggaactacaagcacgtgtcatgacacccagctaatttttgtgttgtttgtagaggcagggttttgccatgttgtccaggctggtctygaactcttgggctccagtgatcctcctgccttgtccttccaaagtgctgggattacaggtgtgagccactgcacctggccattaggtgatattattatgaatgtctgtcagttgatgggtgagattgaaatttgtgtgatgtttgccttttatatatatgttgcataatatttatatcacttgaatcttaaattttttataaattcttactttcccttgaacatattttgaatggtccaagttgtgtttaagaaactcatcttatcctacagaaccaatttttctacctaatgagaaagtggttcacgatagaaactgcagacctcattcattagcttcatcccaccaatacttcttgagcatccaaattctgggcactggtgatagagtattgacaacaagagctacgctacttattcgtggggagagattctgtccatcatgttagagataaatgttttgttgcagacagaagggaaaggagtgagtctgacacaacatggtgagagagcctgattaggctggatggccaggggactttcgagaatagcagtgaagcatatgtttggaggaggcagaagatttggggcccctgcgagagactgaaaggcgctggagagtcaggggttgggtgaggaagtgctagagaggggacagcagcatggggcacagggtcctggaccagttttagaggcccttggcaggattaagggggcattgaccccagacatagtctctggagtctgggaaggaaatatcgggccttctagttayatttccccaacctctgaggagacctatttagttcagtttactgtgtctttctttgttcatttgtagagagcagagtcttgttatattgcccaggctggccttgagctcctgtcccaggtagttctcctactttggcctcccaacgtgctgggattacaggtgcgtgcactgtgcrgcctcattgtgctgctcactgcccagtcctcattcgagatgcctgcctcgctaagcatttcccttcctgcctcattcatatgcacagcagcccattagggcagattccatcacagtcagaggctctggagacccctctcctaccactctgccacctgccactctgccacagtgctcctggtgctccgcagggcttttaaagtcctcagactgagggcccagccctctcttcctcccccgtcaaaggaaccagggcaggttgttcaaacagttaccctggacagtaggaggmaaaggaaatcactgtcaaactggcagagggaacgctggcacctctgccacactccctgcccagctgctgttcagcaaggccctgaaggcccacacctcccagtcctgtaatctaagggatatccacagagggacctgcaccctgcaaggaaagtgtgcaagagcagcgcctgggaaagccatctgccacctctgaaagcagacaggtggccatctgcctggctgagctgatagaaaagcctcttgcaggcactgagtgtttattgatatgtggcaacctaaggagccctgtgcccccgtgggaagcaaaacctccgcagtctcaggtgcaagagtggagacctagaggagctaccataaatgtctgaccctggatgtgttttttcccttgcagttttacagatgctgtttgatgggaaggctttacatagtacactcagggtatgcccttcttcatcaccaccaagcgcagaaactgcatcaatagaaacaggcttcatcaacacagatgatcttgtgggctcccctggttgttagaatggcttttgttctctcaggaaaggactctgtgtctgtccatcagtacctcctattattggcccagtttcacagctcaaagcatgcaaaaggaagtcagcctcctgaaatataaatgacaacttttatttggtggcatgcagtgaaacttttttttcttaaaaaataccctttatgggctgggcgcagtggctcacgcctgtaatcccagcactttgggaggcygaggccggtggatcacgagatcaggagattgagaccatcctggccaacatggtgaaaccccgtctctactaaaaatacaaaaattacctgggcatggtggtgggtgcctgtaatcccagctactcgggaggctgaggtaggagaatggcttgaacccgggaggcggaggttgcagtgagctgggatcgtgccactgcactccagcctggtgacagagcaagactgtctcaaaaacaaacaaacaacaaaaaaaaaaccstttatactttgtcaaatgcagtatgggaaatcaaagtacaaaacaacaaaaaaaccctttaaatttcccaaagaaaatgttttactcttttagcaggaaatggtaaaaacaaaaagggggaagtggcaacagaaagctttctagattgagttcagggacacagcatttcttcttaagcatgatgagctcagctttttttttctatattgcccttaaaactggggacagggtctgttttttaaaatctttgttttctgcatatttctctttgataggcagcagcagggaatggaagtgctcttcttgtagtctggaggggctgcattaagtgtcgtccagcctgcaggtcgtcaggatggaaaacatcagttgtgtacatgcatgatgtggcaccagtgaatccagtggtgcccagaacaccccactgtagcttagcaggaatgtgctgcattatttgagagtgggggccctctggagtgattgtacctttacttttccygtttcctgatccaaatacaaaatcattgacagctcagacctcttaggaaataatgtctttgttcttcaaagtagtctaattatgcttgagtatctgttcagaaagtacagaaagagaagaaagagataggaaagagaaagcaaagtcaggtaaaagaagggatagatgtgattggggtaggtttctaattctgaactgctggagggaggccaaacactgtcattctaagaaaatacgacagtcaaaagctgaggaaaccagacaagttaattttttttttctaaaatagtaatttttttttctaattataacaattctatcttaggattttattgcacttaatagtttggcttgtcagatttcttttggtgtcactgtctttcaccatccatttggsatcctgtggttgtgtaaatggggaaccaaaagggtcctcatcatggccatcaggaaagatgggctgtgtccagttccaatggacagtgcatcttgtacacaagcctcagcttttcatctgtaacacgtggcttatgtacagccttttagactatgaggcatgaatagcaaacagtggcaatcgatgctgaaaaaccagaatgtttaaaaactgggccataaaaatgtagaacgtattctgtcaccagagctggggtcagtggggtgaccccctccctgcctccctgccccccagttctccccagaccttcctgcctgcctgtttcctgcctccaggacagtgtgcaccctgtgtccgtcttctgccgctacacctgtgaactggcaccacaggtgggaacagcccttcaggccagattctggtttttggtttttrctttactgccaaatatgatctagtgctacattcaacttagttgatttattgaggctataaattcctacccatttgtttattcacttaggaatttgctttaggtcttgaaataagaacctccccgtccttaaagattaaaggctttatttggccgctccaggatggcttcctttgtctccaaattcccattccccttgggtttatacaaagaccactgcgaaggagagtccagcatcctcagtatcctgaccagcctgttccaaatgtcagcggcaggggagaccttgagacactgaagtgcaggtggtggcacgttagtgatcacgcagcagtcattctttgatgagcagaaaccacggcctgacgttgagtttggttctgcagaggacagaaggaaaggccaggaaggygaagtgagcagtgtgtcccaaggtgtgcagacagccgttggcccaggcaggctatggtctctaggcccaagacaaattttaatttctctatgcctcgggtgcttgcttatttcctggaccttggaaggatcacagcaactctcccgtaagagccaagggtctgcctgccgggggtagaagctaacattctcagtcctgctctaaagtgaacccagcagcagcccagcctgtacagaatacagctgggtcaggcttaggttcagctgtgtttttccctttggggcctttatctgtgtgccctcctgagtgctgcataaataaccatattcscaaacacatgttttgagagcattgtcttttggaagagttagaaggtaatgctgcatattctgcttaaatatttacatattctgcttataaatttgcttattctttaaattttttgtttgagttatttactttcatttacagatacttgttcacactttgggaattaactttaaaggtatattaaacatggcatgtttgccaggaaaaaaaaaaacagaaacaaacaaaaaaaacacctatggcttgccctcagytctagaatttggaaaaagcattatatgagatttctgatttattttgtctgttattttggtattacttagagattcaatttttaaactagctaattttcatttacagattatttgtatgtgtccttcataattagatgacagaactgtggtggcgatagagctgctaatttaaaatcaccaattttggaggctctgtttgtttatttataaaaatagagacagagtctcactcttgcccaggcttgagtgcagtgacgtgatcatagctcactacagactcagccttcagagtagctgggactatgggtacacaccaccacatctcgttaattttttttttaaattaagacacctggtctcactgtgttgcccaggctggtcctgaactcctgtcctcaagctattctcttgctttggcctcccaaagtgctggaattataggcatcagctaccatgcctggcctgtatgtattttaattagaattcattttaattttgagaaatctttttgatagatatgtacaataaatagatacgcttttcaagaacactgtcctgagcttgagagatacagatagtcacttaattagcagtcccttcatttagcctatcactttaataaacaaatgtggttgtgccaggcatggtgactcatgcctgtaatcccagcastttgggaggccgaggtgggtagatcacctgaggtcaggagttcgagaccagcctggccaacatggtgaaaccctgtctctactaaaaaatacaaaaattagccaggtgtggtggcacgtgcctgtagtcccagctacttgggaggctgaggcaggagaatcrcttgaatccatgaggtgggggttgcagtgagctgggatcctgccactgtactccagcctgggcaacagagcgagactccgtctcaaaaataatataaaaggccaggtgcggtggctcatgcctgtaatcctaacactttgggaggccaaggcgagtggatcacatgaggtcaagagtttgagaccagcctggccaatgtggtgaaacctcatctctactaaaaatacaaaaattagccaggaatggtggcaggcacctgtaatcccagctacttgggaggctgaggctagagaatctcttgaacccaggaggtggaggttgcggtgagccgagatcatgccattgcactccagcctgggcttcagagagagactctgtctcaaaaaataaaaataaaataaaaaataatcaaatgtggttgtttactgtgcctagcaccatgttagatacagtgtgtagtttttttgttttgttttgtttttttgttttgagacacagtttctctcttgttgcccaggctgggatgcaacggtgcaatctcagctcacctcaacctccaccccctgagttcaagcagttctcctgcctcagcctcccgagtaggtgggattacaggcatgtgccaccaccccctgctaattttgtatttttagtagagacagggtttctccatgttggtcaggtcccaacctcaggtgatccacccgcctggcctcccaaagtgctgggattataggcgaaccaccgtgctgtccagtttattttaaatgataataaaagtcctagtctagagcctaagggccagggtcaacttgaggccaataaaattagactttccagggcaagtcccaagcatcagtattttgtaaatgttataggaggctgcagtacacagccaagtgactgtcaagcaaagtgacttccaatgcagttatttcaatgggaacaagacacacactgtgaaacagaaaaaggtgtgaaactcttaagtacagtggaagcccaaagaaagtgatggtggttctgatcctttttttgcactaatcatgggacagtaattctttgattatgggttcatcaagcacaaactatgagcctggcattgagttaagtgccttggagacaaaggtgaaagacaaagtctttgctggcaggaatccatcatattggagaagaaagacaaccagatccaatgatgtcactgttgggaagaaaaaaacctttcttccaccaacttagatccaaattgttagggggactgtgaattaaatgacaatagacagatcaacagaagaaatgtttattatgcatatggcaatactctaagagagagtagctctctgaagaagaggtgaaggtttatataccagcttaataagggtgtgtgtgtgtgtgtgtgtgtgtgtgtgtgtgtgtgtgtgtgtgtgaaggattcgtaggatggaagcctctgatgaggcttttctacagcttttttttaaatgctctggtayccaaggtcaatcatcagcctgactggagatcttcccagagcaggaggtttgtggcagctgactgtcataaagttctgctctagtcagrtaagggaagttcagataagatgtctttctgcatttgctgtaattctgttaacaggtttctctgggatccccaaagggggtccattgagtctgttgaggggcttaggattttatttttagtactcttggggtactaatttactgtattagtctgttctcacgctgctaataaacacatacctgagactgggtaatttataaaggaaaaagatttaatggactcacagttccacatggctggggagccctcactatcatggtggaaggcaaaggagaagcaaagtcacatcttacatggcggcacacaggagagcttgtgcagtggaactcccatttataaaaccaccagatcttgtgagacttactaccatgagaaacagtatgggggaaactgtccccatgattcagttatctgtacctggccccacttttgacacatggggatcattacaattcaagatgagatttaggtggggacacagccaaatcataacacgacaactatttttttatcttccagtttttatggttatactttgtattttctcttgccttattgttttaacttgcacttccagaatagtgttaataacagtgatgctagtgaatatcctatctctgtctagtattttactgctatgttttgctttggtttgattactggtttgaagcaggtataaacttgatcatcctaagggaatgtcctgtattcctatttcactaggggttttattattgggactacatgttgaattttactaactttgtaagcccctcttttatcctcactattgatgcagctgatatgtttgctcctgaaataaaacctatttggtgatattatgttagcctttcattatgttccctagatttcattttttattgggatgaaatatatataacataaaacttaccattttaaccattttgaggtgtataatttagtggcattaaatactttcacattgttgtgcaaacatcaccaccattcatttccagaacttttcaccatcccaaatagaaactctgaaaccgttaagcaatacctccccattttccccttcccacaactcctggtaagcactgttagactttctgtctgtatgaatttgcctattctaggtacatcacataaatggaatcatataatatttatcctttgtgtctggcttatttcacttagcataatgttttaaaagttcatccatgttgtagcatgcatccaaatttcattctttttatggctacataatactccattgcatgtgtatccattcatctgttcatttgtcaatttattcatctgctgatggacacttgggttacttccaccttttgactattatgaataatgctgctatgaacattggtctacaagtatctatttcagtccttgatatcagttctttggagtatatatcgaggagtggaattgctagattatatagtaattctaggcttaactttttgaggaatggccaaactgttttccatagcagctggactattttatattcctacctgattcgtttttatactcccagcatgtgtgtatctcttcatatttgaaactcttggtagtttgctttgtggtgctatattgattccattttcacattatactaaagccagctttgatttttaatgtgctctcttattttccccgttttgccagattgtatgatacaatatctgtttctttttttcttttttttttttttttgagacggagtctcgctctgttgcccaggctggagtgcagtggcgcgatctcggctcactgcaagctccgcctcccaggatcacaccattctcctgcctcagcctcccgagtggctgggactacaggcgcctgccaccatgcccggctaattttttttgtatttttagtagagacggggtttcaccgtgttagccagggtggtctcaatctcctgacctcgtgatccgcccatctcggcctcccaaagtgctgggattacagacgtgagccaccgcaaccgccaatatctatttgttagaatttagggggaaatgcttgtcagtccttctgggattagtggctttcagggatgtaattctttgatagctttgtctaatacctcctttggagaaaggtttaattagtttttttccgcacaatttgagtgagttgtcgctacttgcttatttattgagatggagccttgctttgttgcccagactggagtgtcatggctagtcacaggctcagtcacagctcattgcagcctcaacctcccaggctcaagtaatcctcccatctcagcctcccgggtagctgggaccacaggctcaagtcagcacacccagcgcatttgttttttttttttttttttttaccaaatggtttgtgtcattgaattatcaaaattgtattggcttagcaaagtacatagtattctttattaaaaataaaaatctcttctatggccatctgacctttttgatccctgattttgtatattcatattctctttctagcccaaaacttattagtctatttcttgccttttctcgaagaactagctcttgtatttgttgtttttatctgtgaacttttttcctttttttttttgagacagagtcttgctctgttgcccatgctggagtgcagtggcgccatctcggcttactgcaacctctgcctcccagattcaagcgattctcctgcctcagcctcccgagtagctgggactacaggcgtgtgccaccacgcccagctaatttttgtatttttgatagagacgggttttcaccacgttggccaggatgatcttgatctcctgacctcgtgatctgcccacctaggcctcccaaagtgctgggattccaggcgtgagaccctgcgcccaggcttttttcctttttttttttttttctaaacccacagccaacatcatatgtgaactttttttaaaaacatgaaaacatttttatttttctgatatgcctttcaagtataatatagacttacagaatttgcctttccaagagattttcagacttgctgaagagatttatctttccttctgggctcaagtgatcctccaatcttagcctcctaagtagctgggaccacaggcatgcacactgtgcccagctaatttttaatttttttttttatagagacagagtctccctgttttgcccaggccagtttcaaactcaaggtgctcaaggcgtcctgctgccttggccactcaaagtgctgggattacaggtgtgaaccaccacacctggccaagatttatccttgaccataacactgactgaaatggaatctagaaaaaataaattttattatgggaactatactcttaggtattaaaataatatagttagtagttcataattaaatgaagaaaaaactcacaggatgagagagaaagaaagaagcataccccaatcacacatcctggtacagttttaaagacagataatggttgcagtccaggagagagaagggtgctggggagtaccctgctgaaaacagcatgctggcagtatttccagatgacaaactcctgtcccttatgagactcttgcaaaacttaattatttacaggaatatatgtctgtctggtaaaaataatgatataaaacttctaatatgtaagctgtgaaggtttcaaaattaggtagttttctctttctggttctgtggatttcttcgtgtaatatttacttttgtttccatctcaagtctctgaacactaactgccattctcgtaccaccctcatctctcatcctgtgcttcaggttttctgtggagtccaaagacacttgacagctatgagtaacattttattgttgttgactttttaaaaaattaataaacttggccgggcgcagtggcttacacctgtaatcccagcactttgggaggccgaggcgggtggatcacaaggtcaggagatcgagaccatcctggctaacatagtgaaacttgtctctactaaaaacacaaaaaattagctgggcttggtggcaggcgcctgtagtcccagctgctcgggaggctgagggcaggagaatggtgtgaacccaggaggcagagcttacagtgagccgagatcacgccactgcactctagcctgggcgacagagcaaggctccgtctcaaaataaataaataaactttattttttagagcagttttaggtctgcagcagaattgagtggaaagtacagaatttcccatacactcctgccccgcccctaccacacatggtatgccacactatccacatcctgcactgcaatggcatrtttgctagaatcagtgaacctgcattgacacatcatcaccccaaatccatagtttgcattaagtagggttcactcttgatgttgtgcattttatgagatttcgacaaatgtataatacttatttaccattgtagtatcatacacaatagtttcactgccctagaaatctgtgttcttcctgatcatccctccctaccccatccctggatgaccactaatctttttgccatctccatagtttgaccttttacagaatgtcatatagttggagtcatatagtatgtagccttttgagatgagcttctttcacttagtaataagcttcactaaataatattaagtttctgccatgttcttttcatggcttgattgctgatttctgtttagcactgaataatattccattgtccggatgtaccagtttatttattcactcacctatcaaaggacrtcttaccttggttatcttatatttattaataactgccagactcttggcagttattaataaagctgctgtaaatgtctgtttacaagtttttgtgtggacatatatttttcatttatttgagtaagtaccaaggagcctgactgctggatcatatagtaagaatatgtgtagttttgtgaggagttgccaaactgtcttcccaagtgtctgtgtaccatgtttgcattcccactgggaatgaatgagaattcctgttgctccacattctcctagcatttagtgttatcagtgttttgcattttggccattctaatagtgtgtagtggtatattgttttaatttgcctttctctgattacatatgtgaacaccttttcatatgcttacttgccatctgtgtatcttctttggagaggtgtctgttcaggtcctttgctccttttaaaatccagttatttattttcttatcaagttttaagagttctttgtatattttgtataactgtctttcatcagatatacttttgttaatatgtttttccgagtctgtggcttatcttctcattctkttgacattgtcttttacagagcagaagatttcaattttaatgaaacctagcttgttaatatttctttcatggatcataccttggtggttttgtatctaagaagtcttcatcggccaggcgcggtggctcaagcctgtaatcccagcactttgggaggctgaggtgggcggatcatgagatcaggagatcaagaccatcctagctaacacggtgaaaccccgtctctactaaaaatacaaaaaatcagctggatgtggtggcgctcacctgtagtctcagctgctcaggaggctgaggcaggagaatagcttgaacctgggaggcaaaggttgcagtgagctgagatggcaccactgcacttcagcctgggtgacagagcgagactccatctccagaaaaaaaaaaaaaagtcttcgtcatacccaagttcacctaaatttttttctctgttatctcctaggagttttatagttttctgtttttacatttaggtctatgactcattttgagttttatttttgtgaagggtatcaggtctactttcatttttttccatacgaatgtacagttgttacagcaccatttgtggaaaagatcatctttgctccattgtattgcccttgctcctttgtcacagatgagtcgactatagttatgtgggtctatttctaggctctttggtctgttggtatttttgacagtacaccactgtcttgattactgtggctttattgtaagtattcaagccagcttgtgtcagtcctccaagtttgttcttctcctttaatgctgtctatcctgagtcttttgcctttccatataaactttaggatcagtttgtcaatatccgggaaataacttgctgggatctgattgggattatattgaatctataaagttgggaagaactgacatattgacaatattgggccttcctgtccatgaagatggaatatctatttagttcttcctttatacgtttcatcagagtttatcgttttcctcattagatcttgtacatattttgttagatttgtatctaagtagttcattttgggggttgctaatgtaaatggcaatatgttttggattcacattgctggtatatatgaaaactattggcttatgtatattaacctcgtatcctggaaccttgctataatcactaattagttccaagttttagatcttctacatacatagacagtcatgtgatctgcaaagttttatttttccttcccgggtctctatacctgttatctccttttcttatcttattgtgtaatcttgctttgttcctaatcttagcaggaaagcttcaagcttttcatcattaagtaagatgttaactgttttttgtagatattatcaagttgaggaagttcccctttattcctagtgtgctgaggctttttaatcatgaatggttgttgattttgtcacatgctttttgtgcatctatttatatgatcatgtgatttttcttttttagcctgttgatgtgatgtattacattaattgattttcatatgttgaactagccttgcatacctgggacaaatcccacttggccgtagtgtataattctttttatacattgttggatttgctttgctaatattttttagaggatttttgcatttatgttcatgagaatatgggtctttagttttctttattttttaattaattttattttttgacacagagtcttcctttgttgctcaggctggagtgcagtggtgcgatctcagctcactgcaacctccgcctcccaggttctcctgcttcagcttcccaagtagctgggattacagatgcctgccaccacacccagctaattgctgtattttcagtagagacaggatttccccatgttggccaggtggtcttgaactcctgaccttaggtcatccacccgtcttggcctcccaaagtgctggaattacaggcgtgagccaccacgcctggcctcattcttttttttgaagatgttgcccaggctggccttgaactcctaggctggagccatcctgctgcctcagcctcccaagaagctgtgatcacaggcacataccactaggctcagcttagtcttcttttttgtaatgtctttgtctgatttagggtaatgctgagcttataggataagttaaaaagagattgtttctatcttttggaagagattgcggataattggtgtaatttcttccttaaatgtttggtagaattccccagtgaacccatctgggcccagtgatttctgttttggaaggttgttaattattgattgaatgtatttaatagaaacaggcatgttcagattgtctatttcttacgtgagttttggcaggttttgtctaagacaacagtgtacataccttaatttaaaaatactttaggccaggtgtggtggctcatgcctgtaatcccagcactttgggaggccaaggtaggtggattgccctagcccaggagtttgagaccagcctgggcaacatagggagacactgtccctacgaaaaatttaaaaattagctgggcatagtggcacatgcctataacagccccagctactcaggggactcaggtgggaggatcacttgagtctgggaggttgtggctcacacctataaccccaaccctttggaaggccaagatggtaggatcacttgagcccaggagttcaagaccagcctgggcaatatagggagacctcgtatctacaaaataaaaaataaacctggctgggtatggtggtctgagctacttgggaggccaaggtgggaggatggcttggacctgggaggttgaggctgcagtgagctataattgtgccaccgcactccagcttgggtgacagaacgagacctcatctcaaagcaaacaacaacaacaaaaaaactttaccggtaaaaaatactgacccaaagatacaaagtgagcacatgctgttggaatgttggaaaaatggcactgacagacttgctcagtgcagagttgccacaaaccttgaatttgtaaaaaaaaaaaaaaaaaaatgtggtatctgcaaagtgcagtaaagtgaagtgcaataaaatgtggtgtgtctgtactggttttgctaatgaatagagataccttttgggtgaaatcatgtatcagtgaaaatctgccagtgacctggccatctttcaggtggtttctattgcttagtgaattattttgagattcatctacgtggttgcatgtatcaatagtttattccattttattgctgcattgtattccattctaagggcataccatggtttgtttatccattcactcattgatggccatttgggttgtttctgtttttggctactgtgagtaaagctgtgaacttttttttttttttttttttttttgagacagagtttcactgttgttgcccaggctgaagctgtgaacatttttgaacaagtctttctgtggacataggctttcctttctcttgaggcacaaaattgcaaaccacttgatgccttacagtaaggcagagatctgtgcaggtgctgaaggatgagtaagtagattgtgggagggacacagaagtaactgcaggtgccagagcagatgatccaagcataggcgccaggcattgaagtggtggcacacttgattgcaggcttttttctttttaatgggcttttcgttttctctcaggataacgtcctgagtctttctggtcctcttcccgcctctcacattatacccagtttctccctgccagggccgttagctgtgtcagaccctgctcttttctctaacaagaataaagagttggtgatggaagctaagatgtgttgcaggtttggtgcaaggactcacatgtgcagtctacatgtgttactgtgtgtaatccttccaggaacctacacaaaggaggtaccattatcatccccaccaagcattaaggagaacaaggctcagagaggttaaataactcattcaagattgcacagctagtaagtgatgggttagatgttgaaccagacttcagaggtggcactttgaacctcaatattgtgattaatgtaccctcattgaaaagctagatcatgtatggcgtttaagatgacattttaaactgttttccccatcatctagttaactcttgtattcctgacttactgtgtcagtccaatggccttgtccctggtagcccagctagctcagatcaccctgggcagtaaccccagcagcagtatccccagcagcaggtacctctcaccaagcctgccatggcccttgtgcttgattaacgcccactgggctgtgagcacagcacaagtgcgggcgccatcctttgctgccctgactgtccaccacttcagagtgccaggcgctcgatgatgatctctgaatgaaccaggaaaatgagtgaatgagttacattatcggatgtgcatatttgtcatcagctttattgaggtgtttgtcagctttattaacttatttacatcagttttattgagattatttacatatagcaaagttcatggattctaagtatacagttcagtgagtcttgataaatgtgtgccatcatgtgaccacagccacatcaaggtaaagtatgttccatcactccaagaccctctcctggcccttgcagtcaatctcctgctccacccccagcctcagcaacctctgttctgtttttctgtccttagagttctgccttttctagaattttagacgtggaattatatagtatacagtcttttgtggatgtcttatttaacataacagtccttttgagattcatctgtattgttgcttgtatcagcakttcaatatgtggttttaagactgtttggaaattgtccagagatagcttgtcccactaggtttagagtcatatggcaagttagagcagtggtcctgcaggtgtgcccctggcactctttctgttcccagatccttgcagagggtcagtaaggtcagactgatttccataataatgccaaggtgtgatttgccttttttcacactcctctcatgggtgtgcagtgaggttttccagatgacacatgatatgtggattcacagcagattgcatgcagaagcagataggagagtcaatctttctgttaaactctctggcttaaagaaatttataaaaatgttaatgtcactcctcactaaaattttttttcttctcactaaaattttttgtattggaaaattatttttcataacaaatattgtttatagyaacatgtaatggattgttattattagatgaattaatagacatttttaaatatctttgatttctcatatgacagatcatcataaatataaactgtttatgactgtctgtcaaataagaagtaaagaagctctttgagcagaagctctgtagggtcctcaattttgtactgtagagaagtcctgagaccaaggaatttgagaatcaccgggttagagatagttttgaaagggggtttgggaacaagataagaactctggagctggagaggaattagaagagggtcawgagaccctgggctggcgacctggcttgacgggcctggaaaagggtcctctgttgggtgggtacagaggggctcgcccacgcgtaaatgcaaggacacaccgtgccagttcttagcctcctgctctctgaggacctggtcaggcaggttctgttgatgtccttggtctacgtgcttcctaccaggagctaataagtaacctacgcctgcctgcagttgtctcacagaagacggatcgggaggcctgaggaggccgctctttcctgatacgaggttacagctggggtctgatgtcaggtggggggcatggtggggtctgctttctctgctgtattcttctgcaagggtgagtgtaagaaatcattagctatttctttgtctttcaagaaaaaaagttcctcttacccccagtagagttctaagcccaaattaaaagactatgtaaaataattacttgagtgaaggcaggtgggaggctacttttattattggcagtatccttgtggaaaaaaaaatatgtgtggctcttgtttagggattttgataacactattmacaaactacagcaaaatggcacctactgccttctgacctattcattgcttttctcttgcaggcgaaagggcgtgtggttgcgcctgaggaagatacttttctgtgttttggggttgtacattgccattccatttctcatcaaactatgtcctggaatmcaggccaaactgattttcttgaatttcggtaagtggtatgtgtccatttttcctttaattttagtaagggttcattttcatggtgatgtctgattttaggggtagtctttttactttaatggagatttagtttacatmcagtgaagggtacatatcttaagtgtacagtttatatacctatatctttagagatagataggtagagctaccacccagattgagaactagaatgcttttattacccaaaaaggtccctgtgccccttcccagctggaggactttctgtgctagtgttgctccccagcactggatttctgtccacagaagactacactgccctgggggaccagcgtatctgtcttcagctgaggtgagtaaaaatgttgacaacatgagaagtcagctgaagccatcatgttggagatgccttgtcagttgtgcattccaggagcctagctgcccttggaaaagatgaccactgaaaaatatagtacctttaaaaaaaaatgaggccttttttcttttttaaaacaaattagttttttatacccttaaaaaaatccagatacacagtactttggtttctgtggaattttgtgctggccttgtaggtattgtagtctccttgagtgaacttggaccttgtgtgttttttcacgctgtgtatttacttttggaratgtgggaggagaaaggtgcagaagtatcaagcccatgaggtcaaaggcagaggctctgggcacatggccctgggaacagtcctacaagcgaggctccaaggaaagggccgcatctgtgggttcgaggtttgagaacaacggggctcgcacacggtgggtgttctgtgaaggacagcctgagaggcaggtgctgacagcattagaacaggatgaggcaggggctctggggtcactctgtggctagattggtttgcacatagtgagtctggccttatgcgtttgggagtttgaggcttggaaagctgggcctgatattgctgaggcagcaggtragctggtggagtgggaggaggaggaaaggaggaggccgcagaggaacacaggaggtactgagaggtgccggactccctctgcaggcatctgggcttatgagtttgggtgttcagtctataatagacttaatcacagaaacttaggagatgactggctaaaaaaggaatttctgtttctttgtttttgttttttttaatgccggtaagaagaacataaattataaggctatttaatactttgtaaatctgagtttttatttgggtgtcttaaaataactgtaaaacacatgtagtatactaagaggcatttgatttttctaatggaaaagtagaacttctaggaatttttcatctctaagttttgtcacttgtgagaagcacaaactcaaaaagaaactaacagtataccaaaatgatgggagttttgtttttctgactttaatgttccttaaatgtacacagtacagcccagaaagcatttggggcttaggtataaacacgaagctacaagggctgcagattcaccatcagcagacctcagacttgaccctcatggcttttctacctttgctggcccccttgggcaggtgcctttgctgccaggcacatgagctggttcttgaagggagggtgtggggtgcattgccctgcgtggcctggtacattgtgggctcccagcaaatgtttgaattgaatagattttctttagcttgattgtttgggctactgtagacacacagcctacagattttgttctgtgggtttcctaaggaggtggtagactgctctgagggaggagaactttgggttctcctggtccagccccatggcatgggagaggagggctgggcttgggcaaggggaggctgagcctsccaaggtgttgccyatccttaacgatttccttccacctgtttgccacactggagttaggtgagcctacagtggcattttgttttgttgttttgttttgttctgagacagggcgtggctctgttgccccagctggactgcaggggtatgatcacggctcactgcagcctcgacctcccaggttcaggtgatcctcccaccttagcctcctgagttgctgggactccaggcacccaccaccacaacgtctggctaattttttatatttttagtagagatggggttttgccatgttgcccaggctggcctcaaactcctgggctcaaacaatcctcctgccttggcctcccaacgtgctgggattacaggcgtgagccattgcacccagccctgtggtgtttctgaaagagatttttagttgccaaaggtctagcaccaagaaacagtgtccctgggagcagcgattggacattcctttcgcctcacccccctgggcatctgcctggcccccacrccccactcctcctgcctctccatgatgagcgaccctcatctccaggccccgctgtcctccccgggaagccacagtgttttatcagcacatgaggcccttccaagtgtggttctctgtctccccctttgggaggaaaggcagtcttcagaggagcagcatggagcttgttggttttccagttgtaatgtgcgtccaaggtttacaggtctgtgcctgtctgcgtcgccgaggaggtggggtctgtggcgtggccctgcagtgatttggaattttgttggggaggtgcctctgctcttgtgcccagacaagaagcctgacctgggcatccattcaacattacaggaaaagtagcaatctcttgggccccagaatgtggttaaaatattcttcacagcaawtctatctgaaaccaaatttataaattagataaayaagcttttaaagaaacatagcacctacaatgtaaggcattattctactttaaatacattttcataagcaaaacatcatgattattctaaaaacaaagaattagctaaaaaaaaaaagaaccctgaatagtataaataagaaaatgaacattactctgagaaaatgcttgttaacaccgtagtttatttcctactgaccttttttatatgtgtctgtttacatgcacataaatatatgtgcttttcaatacttgtatgcacagtctgattccatccaaaagatgtttggatgagactcagcatttatgaagcctagaatatcttcccagccgttatttgccttcagatcaagaaggtatctcttagtgaaagtcatgtcttggttcagaggctagggagggcttttttggaaataggtcagatctatcatcatgcatttgttttttgktttttttttatttattattattatactttaaattctagggtacatgtgcacaatgtgcaggttagttacatatgtatacatgtgccatgctggtgtgctgcacccactaactcgtcatctagcattaggtatatctcccaatgctatccctcccccctccccccaccccacaacagttcccagagtgtgatgttccccttcctgtgtccatgtgttctcattgttcgattcccacctatgagtgagaatatgcggtgtttggttttttgatcttgcaatagtttactgagaatgatgatttccaatttcatccatgtccctacaaaggacatgaactcatcattttttatggctgcatagtattccatggtgtatatgtgccacattttcttaatccagtctatcattgttggacatttgggttggttccaagtctttgctattgtgaataatgccgcaataaacatacgtgtgcatgtgtctttatagcagcatgatttatagtcctttgggtatatacccagtaatgggatggctgggtcaaatggtatttctagttctagatccctgaggaatccccacactgacttccacaatggttgaactagtttacagtcccaccaacagtgtaaaagtgttcctatttctccacatcctctccagcacctgttgtttcctgactttttaatgattgccattctaactggtgtgaaatggtatctcattgtggttttgatttgcatttctccaatggccagtgatggtgagcattttttcatgtgtttttttggctacataactgtcttcttttgagaagtgtctgttcatgtccttcgcccactttttgatggggttgtttgtttttttcttgtaaatttgtttgagttcattgtagattctggatattagccctttgtcagatgagtaggttgtgaaaattttctcccattttgtaggttgcctattcactctgatggtagtttcttttgctgtgcagaagctctttagttaaattagatcccatttgtcaattttggcttttgttgccattgcttttggtgttttagacatgaagtccttgcccatgcctatgtcctgaatggtaatgcctaggttttcttctagggtttttatggttttaggtctaacgtttaagtctttaatccatcttgaattgatttttgtataaggtgtaaggaagggatccagtttcagctttctacatatggctagccagttttcccagcaccatttattaaatagggaatcctttccccattgcttgtttttctcaggtttgtcaaagatcagatagttgcagatatgcggtgttatttctgagggctctgttctgttccattgatctatatctctgttttggtaccagtaccatgctgttttggttactgtagccttgtagtatagtttgaaaccaggtagtgtgatgcctccagctttgttcttttggcttaggattgacttggcgatgcaggctcttttttggttccgtatgaactttaaagtagttttttccaattctgtgaagaaagtcattggtagcttgatggggatggcattgaatctgtaaattaccttgggcagtatggccattttcacgatattgattcttcctacccatgagcatggaatgttcttccatttgtttgtatcctcttttatttccttgagtagtggtttgtagttctccttgaagaggtccttcacatcccttgtaagttggattcctamgtattttattctctttgaagcaattgtgaatgggagttcactcatgatttggctctctgtctgttgttggtgtataagaatgcttgtgatttttgtacattgattttgtatcctgagactttgctgaagttgcttatcagcttaaggagattttgggctgagacaatggggttttctagatataccatcatgtcatctgcaaacagggacaatttgacttcctcttttcctaattgaataccctttatttccttctcctgcctaattgccccggccagcacttccaacactgtgttgaatatgagtggtgagagagggcatccctgtcttctgccagttttcaaagggaatgcttccagtttttgcccattcagtatgatattggctgtgggtttgtcatagatagctcttattattttgagatatgtcccatcaataccgaatttattgagagtttttagcatgaagggttgttgaattttgtcagaggccttttctgcatctattgagataatcatgtggtttttgtctttggttctgtttatatgctggattacatttattgatttgcgtatattgaaccaaccttgcatcccagggatgaaacccacttgatcatggtggatatgctttttgatgtgctgctggattaggtttgccagtattttattgaggatttttgcatcaatgttcatcaaggatattggtctaaaattctcttttttggttgtgtctctgcccggctttggtatcaggatgatgctggcctcataaaatgagttagggaggattccctctttttctgttgattggaatagtttcagaaggaatggtaccagttcctccttgtacctctggtagaattcagctgtgaatccatctggtcctggactctttttggttggtaaactattgattattgccacaatttcagctcctgttattggtctattcagagattcaacttcttcctggtttagtcttgggagagtgtatgtgtcgaggaatttatccatttcttctagattttctagtttatttgcgtagaggtgtttgtagtattctctgatggtagtttgcatttctgtgggatcagtggtgatatcccctttatcattttttattgcatctatttgattcttctctctttttttctttgtcttgctagcggtctatcaattttgttgatcctttcgaaaaccagctcctggattcgttaattttttgaagggtttttttgtgtctctatttccttcagttctgctctgattttagttatttcttgccttctgctagcttttgaatgtgtttgctcttgcttttctagttcttttaattgtgatgttagggtgtcagtcttagatctttcctgctttctcttgtgggcatttagtgctataaatttccctctacacactgctttggatgtgtcccagagattctgatatgttgtgtctttgttctcgttggtttcaaagaacgtctttatttctgccttcattttgttatgtacccagtagtcattcaggagcaggttgttcagtttccatgtagttgagctgttttgagtgagtttcttaatcctgagttctagtttgattgcactgtggtctgagagatagtttattataatttctgttcttttacatttgctgaggagagctttacttccaaggatgtggtcaattttggaataggtgtggtgtggtgctgaaaaaaatgtatattctgttgatttggggtggagagttctgtagatgtctattaggtcttcttggtgcagagctgagttcaattcctgggtatccttgttgactttctgtctcgttgatctgtctaatgttgacagtgggttgttaaagtctcccattattaatgtgtgggagtctaagtctctttgtaggtcactcaggacttgctttatgaatctgggtgctcctgtattgggtgcatatatatttaggatagttagctcttcttgttgaattgatccctttaccattaagtaatggccttctttgtctcttttgatctttgttggtttaaagtctgttttatcagagactaggattgcaacccctgcctttttttgttttccatttgcttggtagatcttcctccatccttttattttgaacctatgtgtgtctctgcacgtgagatgggtttcctgaatacagcacactgatgggtcttgactctttatccaatttgccagtctgtgtcttttaattggagcatttagtccatttacattcaaagttaatattgttatatgtgaatttgatcctgtcattatgatgttagctggttattttgctcattagttgatgcagtttcttcctagtctcgatggtctttacattttggcatgattttgcagtggctggtaccggtttttcctttccatgtttagcgcatccttcaggaggtcttttagggcaggcctggtggtgacacaatctctcascatttgcttgtctgtaaagtattttatttttccttcacttatgaagcttagtttggctggatgtgaaattctgggttgaaaattcttttctttaagaatgttgaatattggcccccactctcttctggcttgtagagtttctgccgagagrtctgcttttagtctgatgggcttccctttgagggtaacctgacctttctctcttgctgcccttaacattttttccttcatttcaactttcgtgaatctgacaattatgtgtcttggtgttgctcttctcgaggagtatctttgtggcgttctctgtatttcctgaatctgaatgttggcctgccttgctagattggggaagttctcctgggtaatatcctgcagagtgttttccaacttggttccattctccccgtcactttcaggtacaccaatcagacgtagatttggtcttttcacatagtcccatatttcttggaggctttactcgtttctttttattcttttttctctaaacttcccttcttgcttcatttcatcttccatcactgataccctttcttccagttgatcgcattggctcctgaggtttctgcattcttcacgtagttctcgagccttggttttcagctccatcagctcctttaagcacttctctgtattggttattctagttatacattcttctaaatttttttccaagttttcaacttctttgcctttggtttgaatgtcctcccgtagcttggagtaatttgatcgtctgaagccttcttctctcagctagtcaaagtcattctccgtccagctttgttccgttgctggtgaggaactgcgttcctttggaggaggagwggcgctctgctttatagagtttccagtttttctgctcttttttttccccatctttgtggttttatctacttttggtctttgatgatggtgatgtacagatgggtttttggtgtggatgtcctttctgtttgttagttttccttctaacagacaggaccctcagctgcaggtctgttggagtacccagccgtgtgaggtgtcagtctgcccttgctgggggttgcctcccagttaggctgctcgggggtcaggggtcagggacccgcttgaggaggcattctgcccgttctcagatctccaggtgcgtgctgggagaaccaccgctctcttcagagctgtcagacagggacatttaagtctgcagaggttactgctgtctttttctttgtctgtgccctgcccccagaggtggagcctacagaggcaggcagacctccttgagctgtggtgggctccacccagtttgagcttcctggctgctttgtttacctaagcaagcctgggcaatggcgggcgcccctccccaagcctcgctgctgccttgcagtttgatctcagactgctgtgctagcaatcagcgagactccgtgggcgtaggaccctccgagccatgtgcgggatataatctcctgttgtgccgttttttaagccagtcggaaaagcacagtattcgggtgggagtgacccgattttccaggtgccgtctgtcaccactttctttgactaggaaagggaactccctgaccccttgcgcttcccgagtgaggcaatgccttgccctgctttggcttgcgcacggtgcgcgtacccactgacctgcgcccactgtctggcactccctagtgagatgaacctggtacctcagatggaaatgcagaaatcacccgtcttctgtgtcgctcacgctgggagctgtagactggagctgttcctatttggccatcttggctcctccctcaacacaattccatgcatttgtttttaaagcaaagggccagcttcctctttttccttcccctgagcagtccctgttgactcctgttacctttcttttcttatccccttttttcatacggaaggtcctgtaagcctgcatcaggtaattggaatttgataaaacccaaataaccaacccaggctttcccttgacaccacacctcttatggctgccggtatcaaggctgctctgttactcacagtgattggaatgagacttagccccctgttcagaccctcagcactcaaagaccatcacagctcagtaagtttcagcctttcccgcaacaaatattttgcaggtgagctaaaagaagtatgacagagcaggtcgttttccattcactcacattctcacttcttcaccctccacggcacccatgtgtgcaggatccattctccatcctgcccgttgatgtttgtggttgctggtacatgatgacgtgactggagggtggacaatgaaaactggggggtggacagtgaaaactgggggaagcaggagcagccagaggcctcagtcccagcagccctgtgggccttgtttgcccatggtgcgggggcctgtatgaggagctcccggttcagaagagcctgcgagagggagccatgagagagttggacctcaatggtggagcatgaaggggcgcaccgcccaggccactcctgtggggctgccacagggcttagcactctgtccccaccccaggcctgtggatgaagcaggggcctgggcagggtggactccagccagcatgctggagtcacgggggccacaaagagtcagtggccaagggtgatctgaccacgtgggaggccagagggtcctggcactcgcctggcactggcctgcaggagtgagccagcagtgcttctggccctgggtggatcctgtgaccctgcgcacgccaacccgtctcaccactcatctcactttgaggcatttctgctcatttagagtaatactggccacggggttcctacagccaccccgctctggggctgtgtgatccctgggaccaaccaagctccatgcctcccatgccacttgatgctggttggaggtgctgctgtggaagagaaggtgccaggcagcatctgggggatgcttttcatggagagtagtcactgtgcctccttttcatggttgtttctaaaatgagtaaaagtgaactggaagactggcttcctggaatgaggccatcctggagtagaatttgggttcctagttcttagatttcttgggcttggaagttttctggattagctgctaatccttgtaaaatacttttcagtggccagggaatgctctcagaactcttggacagtttgtgttccaagagcttggcattctwctgcagacacagaactgagtgaggcctgaagcggagccagtggaagcccagtgtcctcggccctcagtggtgcccactccccatctgtcagagtcagggctggttccagcgtcagaggcaggatttggctgagtgggtctagatgtgggatgggcactgggccccaggtgtggatattcagagttgtattgaggaggctacccccgctcccrgctgtcagattatagacttgcaccctgggctgcagctctcaggctcccaaagtgtgtggtgaattcccaggatgaggtggcaggagtgggccctagagtctgaagtggactcactttcccactccagatcctgaagtggacccactttccaggcattcctctggtcgggagccttctccgggtcccawtgccaggataaaatctaaattcttgtatggctgtgttcttttttttttttttccaggagactggcgttttgttattactcaaatcactctcccgtagcattcagggatcagagtttttaaggacaacttggtgggtgtggggaagccagtgagctggaagtgctgatggtcaggtcagagatgaaatcatagggagtcaaagctgtcttcttgcgctgagtcggttcttgggtgggggccacaagatcagatgagctagtttatcaatctggatggtgccagctggtccatcaagttgagggtctgcaaaatatctcaagcactggtcttaggttttacaatagtgattttatcaccaggagcaatttggggagggtcagaatcttgtagcctccagcttcatgactcctaaaccacaacaatttccaatcttgtggccaaaatgttagtcctataaaggcagtctagtccccaggcaaggaggtttgtttccagaaaagggtatcatcttcgctttaaactataaactaagttcctcccaaaattagtttagcctatgcccaggagtaaacaaggacagcatggaggttagaagctagatggagtcagttaggtcagatctctttcactgtctcagttatagttttgcaatggtagtttcaatccctccctttctttttttttttttttgagacggagtcttgttctgtcgcccggactgaagtgcaatggcgtgatctcagctcactgcaatctctgactcccgggttcaagcaattctcttgcctcaggctcccgagtagctgggactacaggcactcaccaccatgcccggctaatttttgtatttttagtagagacagggtttcactatgttggccaggctggtctcaaactcctgacctcgtgatctgcccacctcggcctcccaaagtgctgggattataggcatgcgccaccgcgcctggcacccctttgggtttcataacaccttaatcttaaggcattagctaatgaagatggagaaagggcaaagacagctctaacttcttcctgctggccaggggtgtagtgggggtaggtgtttaccccaaggtgaaaggaatggaaccactttgcaacattctgggcatactcacacaggcatggctggggatccacggcttgcatggcaaaggcattactattgtcatctatagttttagcactgcatttaagrgaacagtgtactataaggttaataatggggactaaggtaaggagtgcaattcccaattttaaaagtaaaaattggaatgcattagtttggtgacttgtagcccacaaagaatttaagatttagtccttccaaactgcaggaaaaatacaagaacagctaacaacaggtataccatagttgttgttgttgtttttttttgaagcataatttttctctctccagtccccatgtttattaaaaaacaaatcattataggactgatttgtttgcaaaataaactttagtcttattatatacttggcctgattatttgcataaagtgcaacacaagtaattattttttacataggcttctagaattggctttgatagaactctgttccataaggaatctcagataagactttttaaaagctgagtccagccatgggtttctatcctcaaatacctatgagtttggtaaattcctctcctcttgaggtcctaaaataacttgggcctcctgggcctattagaaagtgacattctttaccacaggtcaggagccctgtatggggactgtatagacaagttatgaggccagttttacccacggggcttttattggcgctataagtcctttgaatccttaaaggaaagcaggccattccagtcaaagccttggtaaaataaccagtttcttcaattgtttcctgttgcagaagagccttccttgctttcctttctttcctttctttccctccccccactccctccctacctctctcccttccttccttcctctctcttctctttcttcccttcccttccctcccctcccctccccttcacttctttcctttcttttttcttttctttttttttttttggacagagtctcactctttcatcaaggctggagtgaagtggcatgatctcagctcactgcaacctcctcttcccgggttcaagccattctcctgcctcaggctcccaagtagctgggattataggtgcacaccaccacgcctggctaatttttatatttttagtagagacggggttttgccatgttggccaggctggtctcgaactcctgacctcaggtgatccacctgcctcggcctcccaaagtgctaggtttacaggcatgagtcaccacgcctggctggctgcatttatttcttagggccgctcaaacaaacctgcaaactgagwggcttaaaataaatgtatcctctcatggttgtggaggcygggagtctgaggtcgaggtgtgggtgggcccagctcctcctgagatgctgaggtggacccttcttgcctgtctgtctggcagcattcccggcttggagaagcttccctcaaatctctgcctccatcttctccatcttcttggtcatcttctcatggtcttccctctgtctctgtgtctaaatgtccccattttataaggataccagtcatgttgggttagtatccacccagtgacctcatttgagcttgattacctccataaagacactgtttccaagtaaggtcacactcttaggtactgggggtgaggccttgaacatagtcttttttggggagcacaactcagcccataacagggcaggcgggcctcccaggcctctcaggggccaggctcattacctccctgacttcctgtccagccagccaggaggcagggctgtgcagccgggctgccgggttcaaagccagttcyttttttttttttttttttttttttttgaaacagggtctctctgtcactcaggctggagtacagtggtacaaccttggcttactgcagccttgacctcctgggctcaagtgattctccctcctcagcctcacaagtggctgggatcacaggtgcatgtcaccttacctgggtaatttttatattttttgtagaggtggggttttgccgtgttgcccaggctggtatcaaaaaatccagctccgtcatgtgagctggcaatctaataggagccatcagatggtgatggtggtggcttgcctcagagactgtgcagcctggctcagctggagctaatggggatgtggatcatctcctttgccattttttattttgagagaaacttcttactaaaattttgaagatgtatctgcttcctgggaaagagatggagtaagaaggtggggtatgaacagcagccctggtggtaggaactgtctccccacatggtctgggacagacgctcagggagtttctgggaaggagtgtgtatgtccccatgtcctcgtgagtccagcctggtgacatttgaggaagtgaggctagatgtgcaatgtgccacatggacatgggagtcacrcaacccctgtcttcaccagagacagctgtcagcagcagagcttccccrggggcaggacccaccagagggaagccaggcccacactgctctctgtcattgcctcttttgggagttgccattttataaagcaggcaaatcccacctcagggttcatgcgtttattttaaattttttgtttttcagttaaacttattttaaagttgtgttcaccaaaagcagtaagactacaatggtatataaggaaaaaattgcccccattctccccacacacacactttgaagctgtgtgagcagcctggcttctgtctttctgtatatcctcccagccacatgtggaggtcgtgtttcatttgcatgtttttacaataacaaagtggggctaccgcacccgcacccacagtcaccttgctcctctcatctgcccgcaggtcctggaggttcctccaggtctaagggccccatggtcttccacagtgtgaggtgctggttaattcactcgctgtcctgctggcagatgacctggtagatgcaggacttctgctgggccattgcactgacttcattctgctctgcatgggtcctatggattcatccccctcgctgccccacacctcaccttctgctgtcttttctgtgttaggcagcagtcctggaaactttggaatcccctttaccttgtttgccacccaacgttccgttggtcatcaggtcctgcagcgccatcccctttcctgctgtccttyccactccaccaggcacctgagttattcgcaggctcagcctccccagcctccctcctggctggcccatccttcagacctgttggggatctttccttccctcatttgcatcttctcacacctagaatgaccttagaccttagcgttccagtctctacacagaccttgccctcactgcagtctctgtccctgcccatgctggctggcctcagcccataccytgcctgaggctgggcctgcaggtctggcaccattgtaagattgcacaggaaaaggacttggtgctttctgagagcttctgcagtgtgtgcatgtgggtgtgcatgtgtgtgtgtgcacgtgtggatgcatatctgtgcacgtgtgtgagtatgcatrtttgtgtgtacatgtgtgtaytcatccaccagtaatcctaatttccatctctttatttcctacagtaagagttccctatttcattgatttgaaaaaaccacaggatcaaggtttgaatcacacgtgtaactactacctgcagccagaggaagacgtgaccattggagtctggtgagtgccagtgagctctgcagcccctycagcagcaggaaaggaccctacatgactgagctggtgctgtctttgacattggcctctgaaatgttgttcatttttatcttcacctcttcctttcctaaaggaaagatctcagtacatttgatccatcctaatgttgagggattcaatggctttaaactctattcccagcctttcaaaacagcaaaggctttgtgaacagattattatttttagagagacttgtttctaggaaaaacgaaaagcaaacaaagaagctagaaacaggatataagtggccggcacagtggctcacacctgtaatcccagcactttgggaggctgaggcaagtggatcacttgagtccaggagtttgagaccagccttggcgacaaggtgaaaccccatctctactaaaaatacaaaaattagccaggcatggtggtgcacacctgtaatcccagctacttgggaggctgaggcaggaggatcacttgactccaggaggcagaagttgcagtgagctgagttcacgccactgcactccagcctggatgacagagcaagactctgtgtccaaaaaaaagagaatataagggaagaatcacaaacactggtttgaatatatcttccatccaggcgcggtggctcacgcctgtaatcccagcactttgggaggccgagacgggtggatcacttgagatcaggagttcgagaccaccctaaacaacatggtgaaaccccgtctctactgaaaaaaaaatacaaaaattagctgggcatggtggcacgcgcctgtagtcccagctacccgggagtttgaggcaagagaattgcttgaacgcaggaggcagaggctgcagtgagctgagattatgccactgcactccagcctgggcaacagagcgagactcttgtctcaaaaaaaaaaaaaaatatatatatatatatatatatatatatatcttttccaagaggtgaacatctagatactgaaaacagcttgatttcttttcacatatagcttcgcaccagctgatgatgatggtgttggctgtcttctgagtatttacttttttaagccataagtttacactggacataagccttgtgacttctctgtgtctccttggaatacattttaatgttttcttctgtacacaagtggtgcttctgaacagctgaattaaaattgaccaacctcactgtagcatttccgtttttctctgagaagtgagcctgaatcacagcccttttatctagctgaatttatttttcagtagccataacgtcgctttccactgtctcagaaaaccactgtgtatgtgagaagcttctaaatgaaatgctgtgagtagcttcccagtgtggatgagagaacattcagacatttctaacagtggtccttggtaaagaacataaaacaagaagggagatttttgttcttagtagttggtgctgggattaaagtcttttgtcacttcctgatttgatttaatctagcatttactgaccaatgtgtgactgtgggactcctcaggtttctgtctgaagcatgacttgttttgcacagagctgctgagtgggacttrgtcagccctcttcttggttaacatgagtctgtcctattgcaggagggtgtttatggtggtgagacttaggctggaagtactaacaactcctgcatacattatcagctaccagaaaaggttttgtttagtgatgtcagtggcaagtgtcaaggcagtgacagccacgctgtgtgttgctgtgtgttggtgggtgcgtgttggtgagtgcggctgctgcccactctcatgccctaggcagtcacaatgacattgggccctcaggcagcagcaggcccagctcaccaactgcccccaccatcgcttcatcagaccctcccaccagcttcctgaaaggagggcctcaaggcctagagtggagcctgggggccattcctggccatgcctggccatcgcctgtctgctgagaggagaggcccaggaatgggtttctctgctggctaggagttccctggctctttgtcaggagcccaggtttggggcggctggctactggaagcacatctgctcccagcaccttcaaaatgtgmcgtcctatccctcaaatttataactgtatgggagtgatgatcatagtgactagaaccatcccaaaagtgatccttttgaacggatcagagagagacgttagaaatgagatgctgaagcttaagatctagaaaataagaagttggccattaaatttttttaaagattcttgtcactggtatccagaatgaatttgaataagctttacagaaaagtgattaatttggaccctccccagtgattaacagtattcgatgtggcytgagttaaaattaacctcagtatctctctgaaggagggtttggctagatagaccagcagcttcagagtgcccagccaggtgtggaccatgagcagactgggaaggtggtgcatacttgacattagaaatggcgtcagcgatggcccggtttctagtctggctcacaaacattggtgttgctgaattagcaaatgtgacagcatgtactgtttaaaatccattgtgagttaaactgtggacaatttaagcatggggttaactgggatgtggggcacgtatgaggaaaatgctattactcaagatggactaagtgctgcttctctgccaggccccagtggtaactggcacattgcaagcctttgtggcccagaggaggctggcctgccagtcagggaaygctcctgctgaagctgtcagtgccatccacacagcctgcagttccgtggttattgattctagtgatggggatagttttctaccacccacccccatctgttcccctgtagttagatggggtctgcagctccctgctgtctggacttgagctgattaagtaacaccaygtgcagtcgccaggatgaggacagaagggacatctgatcctgcgctcccctctgcttctgtctgcaggcacaccgtccctgcagtctggtggaagaacgcccaaggcaaagaccagatgtggtatgaggatgccttggcttccagccaccctatcattctgtacctgcatgggaacgcaggtaccaggtgagggagaggagcccatcatctttgctgtggagcatggctcctttttggggtgggaatgtcctggcccggtctgccggaaaccagcaggagcaacctgcggtcccacaaaattgggtgtactgacccactgcaatgagggagagcctcccaagaacgaagggaaaggcagagttctgaaggggttgagggaaggcggagtttaggtgacgtttacatgaagcagggttcccacaggctgaggccagcacggctgtgttccgtggggaccaagtgtgggaagctgtgtgcagaccgtcccctatctggagctgcagcctggattgggatgaaggaggctgagtctcagtcaggagctgagctccccagccagaggggcatgtttttttctccttgttgtaatctcaaaggtcacagcatctgctggtatgtgatttggggagcagggtttcttggagagtgagggctttggggtccctccgaggaggggtcatagtggcacttggctgtgggtgcctcgcgctcttgggaatgggcggcttcagctcactggcagcttgttttctctatatctgtcatgctgcctgaagtggcaggcagatctttgttacctgtaagatagctccaggtggcagacaggtgaagccggagccagggcagccctggaggaggtggcacacttcctggaaaaaagtggcaggtgctgagaaggggcaggaggragaggctgaaagcaccaggtgctggggtctttgcaggccaccctacagtgtgagctctctgctcaccctaacgggctgttgctgaagttcatgcactctttggttaatcagccctgcccagttttatctcagatgcttttcctgagtgggtctaatggcttgtcctttccactggctgccctggagttggcctccctgccttaaaagggtgctccttccacaccatgtgattgctgttcagaagagcctctgtgggagaacccagggtgggtgcggaggggatacattttctgaacaaagcattgtttgaaaaccaccaaggtcttcgtgtgtgagagaggcagccaggagccagcrcagaggcagacccagcacggagacagggctgctgcggggccagggccgaggtcccgtgtggcaccagggtatgtcagggctgggggcaaacattttataggcagagccagcaaggagagctgtgctgggcccttctggaagggaaagcaggcctaggtggggtctgcatggtggaaccctgcagagagcattgctgaaagagcctggcggcatggcccgtgaagcggtttctgtgtcagggatggcgtgtctagctacagaatcatgcatgtgctgcacagtttcctttcttctttgtctgggacaagctgcagagggtttctcttctgcttttcaaagagcaagtggctacaaacagctcttgcagcatctttttataaatgacagaactgtggttggctgtgaataaggttcagttctgcagtgcccatcacatggttaaaaaaaaaaaaaaaagatcctgcctataactttaggttagaaagggatgccgtgactttcagtgtttgctgccccctcccaatcctgcagagactgcctggctgcagtcctcgccacccccacgttgcctgctttctttgtcctgtgcatcccactggggtttcgctggtctgcgggatccaccacccgggtccccctgaggtccagaccccctggattcccagcaactgttccttttttgcttaatgtaggaaattttagaaacttagagccactgtgaactcttacaatgataactgaaaatattttgcagtgtttcctccttgycttgaaactcattcctttattttttattttaatttttgagacagagtctcactctgttgcccaggctggagtgcagtggcacaatcctgactcactgcaacctcagcctcctgagttcaagtgactctcctgcctcggtctcccgagtagctgggattacagtcacccaccaccatggccagctaatttttgtatttttagtagagacgggtttcaccatttgaccaggctggtctcaaactcctgagctcaagtgatctgctcacctcggcctcccaaagtgctgggattacaggtgtgaaccaccgcacctgaccctttatatttttgtttctgtactttattggcttcctcctccatctcatcctggtgtccaaccagcaacactcccgcccccatacctgaaatgttgagaccgctcctgaggaaggaggagcacggctagggagtgtggagagtgtggacccgccctcctcccaggtggcccatgtccctgctgtggggtcggtccaggttaacagctggccaacaactggaaagaaagagggaagggagcctagacaggcctcagacaaggaagtacaaatgggagggtgtgtgccgagcccacttagtctcagtagcgacatgcacggtgaagctgtagttggctgtgaggggcgggaggcagccgttccggcacttcagggcctccctggggagattctaggagcatatcccatgtgcagagcacacacatgtgaagggctgtaaggcagggtggccacagcagcaaacagaagttagtgccaggtgggaaacagtcaagatgaccatgagaggccagggtggtgtggctaagcagagttctgaaggtcggctgagacgtgcggagcaagaagtgagggcagaagtcgcccayacgggtcctgttggagcacagcctctgtctacacagggtgtccttggcacagggaagctgggagggtctggggtgtggtggatgaggccttgctgtgtttcctttagtgtctttctagtttggggctgtaggtgtgcattacctactgaaaaataaaagcagtcattaagaaatctcycccaaagtgctaagaccatctcccccttggcacagcactgccagaggcgagtgtggggctacttagggggacccaaggaagaggttctgccctctttcattggcctccccctggtttggggtatggaggacaagttgacctggggcccaactctgagaagatgtgctcacaccatgtcctgttttcttctccagaggaggcgaccaccgcgtggagctttacaaggtgagtgcaggcagcacccacacctgttccctgggctgttctttccagggcaggaagtgaagggagtcaccagactcacagcttgagagttaactattgctgggctgtttgtgtgtgtgagacagggtcctcctcctctgttgcccaggctggagtgcagtggtacagtcacagcgcactgcagcgtcgacctcctgggctcaaactatcctcctgcttcagcctcctgagactgcaggtgcatgccgccaccacgcccagctaatttttgtttgtttttttgtagaaatgaggtctccctatgttgctcaggctggtctcgaactcctgggcctcccaccttggcctcccaaagtgttgggatgacaggcgtgttgagctttttaacactgcctttggatgggcgtgctggaaggtagggccttggctgcctctgctgtgactgcccatcacactgcttctaggcctgggccccaacatcagaatgtatgggctttgtagaccaagtgcagatattggcagactacataagcagcactggaaattgtttttcaatgttacgttacttgtgtataaaatgaaaagagacggctgggtgtggtggctcacgcctgtaatcccagcactttgggaggccaagatgggtggatcacaaggtcaggagttcaagaccagccggccaggatggtgaaaccccgtctctactaaaaatacaaaaaaaattagccaggcgtggtggcgggcgcctgtaatcccagctactcaggaggctgaggcagagaattgcttaaacctgggaggcggaggttgcagtgagccaagatggcaccactgcactctagcctgggcaacagagcaagactccgtctcaaaaaacaaaaaaaaaaagaaaagagaaaccaggtgctccaggtgctacactgactgccaggtcgtaggctcaccccagcaagggctgcaggtgggacttgaatcagcttccaggcacacagtgggagcgcctgcaggtctccccacatgcagggggtgcctagggcagggcgtgcagaccttcacttgtgcttggttgcttggttttgttcttcatctggttgtctgggtcttggagcccaagagatactgttgaaacagcctcactctcctcccctcagagggccatctgcactggcccacagggcagaagggracacagacagaggcaggggcacagacagaggcgggggcacacccagctctgagctattggaggattttacccgtggagtacattgcattaagtcaggaaaggtggggagagtttgagaagtgattggtccttttttcagttttctgttaaaagaaatgattcaycctgctgaggtcaacagggctggagcaggttggctctggttatagcctctgcggtggctaggagctggcaaggaagtgcaggctgccctggggaagcacccaacaacccccccaaagaagggagctgtgattctgggtgacatgatggtgcggcagcctcccatgttgctctgggcacaccccagcaagggcacaggggtgggtgtttgaggagtgagctaaatgaaagaggtcagctagtctgtagggattaaaaaaaaataacagaaaaaaaaattgacaagagcttaaaatccaagaaatactgggttgcagcaagggtccccagatggggtctctgcacagtgtagccctcctcctgggggtctaccatcacactgcagcaccgagagctgtctgcctccagaggaggccgccccagaggctgccctgcagcacgagtggagctgcggccggacactgctcctggccccctagcgtctaagcaggaggaagggagagccttcctgcgctcccaggcagggatgtcagcaagtcctgcagtggcrgttggcatcttggtttcataaaacccagccaggagtcaggcagcatgtcacagtctttatgaagctgccactacgtacaaggcagaggagagaaagttggatgagtttagtaagcggcaagctgccctcaatacagatgcttggatttgttgccaaagatgtttatttttcactttacaggtgctgagttcccttggttaccatgtggtcacctttgactacagaggtgagatttcttttgcaagagcatctgagcacaattccactgcttgctggcggtatcccatgggcaggcctcactcgaagaggctcggagcaaggccagcgcctgctttgcctgtgctgtgatggtgtcctgggtcctgacaaagaccctgatggagctgtcaggagagccccttctggtaggggaggctcagcacctggagcccccagcagatgccctgtcagcaacttttttttttttttttttaagataggatctcactttgtcacccaacctggagtacagtagcatgattgtagctcactgcagccttgaactccttggctcaagggatccttctgccttaggctctcgagtagctgtgactgcaggaatgcgacaccacacccgctgttttgtttttgtttttagtagaaatggggtatcgctgtgttgcctaggctagtctcagactcctggcctcaagcgatcctcctgcctcagccttccagagtgttgggattacaggcaggagtcactgcacccaacctgcagcattttaaattagaagatactgtcttttttagactgcagagctggacgtcagacatggtttatgctcatcaaagcttgtcttgttaaagttacgaagacagtaagaagtgttaagagaggctgagcatggtggttcacacctgtaatcccagcactttgggaggctgaggcaggcggatcacttgaggtcaggagttcgtgaccagcctggccaacatggtgaaaccccatctctactgaaaatacaaaaattaaccgggcgtaatggctcgcacctgtagtcccagctattcgagaggctgaggcaggagaagcgcttgaacctgggaggcagagcttgcagtgagccgagactgcaccactgtactccagccttggcgacaagcaagactccatgtcaaaaaaaaaaaaagaactgttaagagagaagatagattcttctgcacctcagcatttctgcttttttgaatgaaccagggcttgccactgaacaaatcaagaatccatagtttgatatataccaaggacactgtggcttaataggcaacagaaatacttggtgttaacaatgagcgactggtttgttttggttttggttttggttttgctttgagacagggtctcactctgtcacccagctggattgcagtgatgtgatctcagctcactgcaacctctgcctcccgggttcaagtgatcttcccaactcagcctccctagtagctgggaccacaggcacacaccactacacctggctaatgttattttattttattttattttattttattttattttattttattttattttattttatttttattgatcattcttgggtgttcctctgagggggatttggcagggtcataggacaatagtggagggaaggtcagcagataaacaagtgaacaaaggtctctggttttcctaggcagaggaccctgcggccttccgcagtgtttgtgtccctgggtacttgagattagggagtggtgatgactcttaatgagcatgctgccttcaagcatctgtttaacaaagcacatcttgcaccgcccttaatccatttaaccctgagtggacacagcacatgtttcagagagcaccaggttgggggtaaggacatagatcaacagcatcccaaggcagaagaatttttcttagtacagaacaaaatggagtctcctatgtctacttctttctacacagacacagcaacaatctgatttctctatcttttccccacatttcccccttttctattcgacaaaaccgccatcgtcatcatggcccgttctcaatgagctgttgggtacacctcccagacggggtggcagccgggcagaggggctcctcacttcccagaaggggcagccgggcagaggcgccccccacctcccagacggggtggctggccggtcgggggctggcccccacctccctcccggatggggcgggtggagacgctcctcacttcccagatggggcggctgccgggcggaggggctccgcacttctcagacggggcggctgccgggcggagacgctcctcacctcccagacggggtcgcggccgggcagaggcgctcctcacatcccagacggggcggcggggcagaggcgctccccacatctcagacgatgggcggccgggcagagacgcttctcacttcctagatgggatggcggccgggaagaggcgctcctcacttcccagactgggcagccaggcagaggggctcctcacatcccagacgatgggcggccaggcggagacgctcctcacttcccagacggggtggcggccgggcagaggctgcaatctcggcactttgggaggccaaagcaggcggctgggaggtggaggttgtagtgagccgagatcacgccactgcactccagcctgggcaacattgagcactgagtgaacgagactccgtctgcaatcccggcacctgtggaggccgatgctggcagatcactcgcggttaggagctgaagaccagcctggccaacacagcgaaaccccgtctccaccaaaaaaatacgaaaaccagtcaggcatggcagcgcgctgctgcaatcacaggcactcggcaggctgaggcaggagaatcaggcagggaggttgcagtgagccgagatggcggcagtacagtccagcttcggcttggcatcagagagagaccgtggaaagagagggagagggagaccgtggggagagggagagctattttattttttttaagagagggtttcgccatgttgcccaggctggtcttgaactactgggttcaagcagtctgcccaccttggcctcccraagtgttgggattacaggtgtgagtgagccattgcaactgactgcgagactgttttaaagtgtattctggctgggcacggtggctcacgcctgtaatcccagcactttgggaggctgaggtgggcagattgcttgaaaccaggagttcgagataagcctgggcagcgtggcaaaaccccgcctctactaaaaatacaaaaaaaagtagctgagcctggtggcaggtgcctgtaatcccagctactcaggaggctgaggtgggaggaaagcttgagcccaggaggcggaggttgcagtgagccaagatcatgccaccgcactccagcctgagtgacagagcgagaccctgtctcaaaaatttcaaaaagtgtattccaccatgtagtcctcagctggagagattaaagagttgatggcaacgtggctggctgccttcaccttcttgtgggggcaggtggcgtgtctatcctcagaccaagaggagatatgggagggacaaaggagagaggctgtcacctggatgtgggggttgtgttaattctctcttgctgctataacatgttaccacaaacagtgctttaaaccagcacacatgtagcgtcttgcagttctggaggtcagaaattcagaatctgcagcccccaggctggaatcagggtgggagcagggctctcagggagaatgcctggctgccctttccagccacctgtgttccttggctcacagcccttctgtgattgagtcccaggtcatctggctctgaccctgactcctctccctttttctctgatgaggacccttgtggttattttgggcccacccagcttgtccaggatcacccccatctcaaggcaagcagttagyagctttcattccttccataccyttcattccccagccatgtgacccaacgcgttcacaagttccagggattaggtcatggacacttttgggggccaccatgctgccaaccacagggaagaaagttccatcaggatgacagttgtgggctgggaaaaactccagaatgaggagcaaggaagtggtttgccctctccttctctccatgttgacactggttctcttctgctgcatgctagagaccttaggagagggagaatgagtggcttcttcccattcatctccccgcacttctgtcaggaaatgaaatcccacgcagcactttctgtttcagttctcgtggagtctacgtttctaattggcaccaagactgccagctccatctccgactgtccctctgtctctctcactgcatctgcctctttgtccgcatccttctgcctcctgtccctgtctctgtgcctgtctgtctgtccctgtcagtcttcttgcctgtctctgtgcctctctgttcctgtctctcagtcttcctgtctgtctctgtctcctgtccctgtctctgttcttttctttctgtctcatgtccccatacccctgcctcccagcctggccctagccctctgcatggcctcctccctcctctagtgtctgagtcgggaaacagcaagttctgcactaactgtttgcttacactgcacaacctgctctttctgacctttgtggtgctttcagatcatctgatgatgactcactgctgggctgctggaaagataattgcactccacctttgctggagactgggggagggacccttgggaggttgtaattttggggggcagagatggtagtgttttctgttatggaaacaagatgctaattagaccctaaggggaaacagcccctttccccttcctgggtcatggttgccttgaacccagaaatgccctccctgttctgggagcctccggactccactccctgtcctgcccctgaccaagccttcggcgttgaggaggttggtgtccagccagcggccccgggggctgctcatctgaccacgccatctgcactgctgctcgtcagggctcggagtgggacacatggatgctgctgggggatgggggagaagtgtagagctgaggatggtggtggcagaggctttcactgccttagacctcactagcttgcctgttaagaaagagagagggagaagtgagctcactcccctgcccaagagggtggggcaagtcccagccctggcctgaggatgccggtgccagctctgaagctctgtgatctgttctgttractcagcttgctgttagttgccattcaaatktgcagctcaccaacttagagtgaccctgtgaggggatgtctggtttgtgcagtcagcaggggcagggcagggttgctgctgggctgccttccccagggctggtggggatgtggggttgtgcccgttctccccactgcttgctctgcccagtggcctgggtgggtctgtggactctggaagggtgggccaagcgggcccctccctgtctcctcctggccctgggcccccttggggaggtgtgtttgtccaggttttgtgagctgcctttgacctccccgtcctgccgtttctccctcccaggttggggtgactcagtgggaacgccatctgagcggggcatgacctatgacgcactccacgtttttgactggatcaaagcaagaagtggtgacaaccccgtgtacatctggggccactctctgggcactgggtaagggaccccagcaggaggcagcctttagtgggagtcagtattcctggtgactcccatgcctggatctagagagtccaccatccctgcaaaccctgtggcaccattagtcccgaccagcctcgctcccatccccatggcagaggcaggaggggaagttacaaagagactccaaaggatctgagctcctcgtccaggaagtggctcaggacagacataggcagtggaggtcgaggggtctccctagggagacttggctctgaggaagaagcgtcttcagagctgagggagggcacagtgggtggtttgcttctcacagaggccaggacaggaggtacttccacactccctttgtgggcagcctgagtcatctctgctgatgcgaggtccacgtctctgcgggaacctctgctctcagggccccagtccccagaccttcactgccattccctttctgctgcctttcccttcggggcagcccttctcccaacacctgaatggcctcttgtaggctgggaagcatcaggagaggagtgggtggggggcaccagccatccctttggccgtctgcgtggtccaccaggtgtggtcctgggatggcaagaggccctgggtgtggtgggctccaggagaggtgcaggcagacgctggccacccccagccgacaggcggcccggccaatgggagtgtacgggcagtgagaggcagcaggacacacctcggggacaagctgactggctgtgggtacagccctcattgcaggggtcagctgatggtggggcagccaggtcacccccagtgctagagggatctccatttcccccactctgtcctgaaactccagtagcttcacagaccccatggctcctctgagcactttccagcataaggcccatatcatctcaaacaattttatcataactcaactaagctgtttttcttttttcctagcgtggcgacaaatctggtgcggcgcctctgtgagcgaggtgagtgccttgttgggccccagccgtggcagtgagcattcagggtgctccccagtcccggccctgctgcaagtgctcagcgtcctcatggagcagcatgagctgcacattctggggggcccggggctgaccagccacccttcccatgatacacctgaggagctggggagcctcacacacacaggtctggccccagagccgcatcagcaagtctgctttttaggagtgaccagagccatctctgttcccctggcgggcacccctggtgctatctgaggcctgccgaggtggttgcctggtgggaggcgctgtggtctccttgtgctttctgggggcccctcagagccccacaggccacatgtatgtcgctggcttcctgcctacctctcagttccctgtttgtttatctagagacgcctccagatgcccttatattggaatctccattcactaatatccgygaagaagctaagagccatccattttcagtggcaagtacagattttattaaaaattaacttttcattattaagataaattatagaaataactaattacaggatacattataataattattaaaaattrttatttaaatattctaatgaatacagatttcattaaaaattaatactagttttggccacagagctgcccaagaagtataacctgcagccaggtgaaatgacaggtcataattgggtcatttgagggcagctggacacagtggaggccgggctcacgtggtgtcatcgactgcattgtattgacagccctgccttcctgttcaggagtggagctgggggtgcccccctctctgtgtatgagacagtgcttggggggctggactgtgtggaccagggagtctggccttccagttttatcttggggaaaggcccaggtgaaccccagtgggaattctgggtaagccaggccccacccaacctgtgccctccccagctgggaatggaaccttggaccttcccttaaaacctagccagttattttcccctccttctcactctggtttgtgatccctgtgctccccactggccatggattctcgggcctgtgtcagcccatgctggcctcatgctgttctgttaccaaccagaagagccttttatcttatcttactttttggtgctgcttttcttaaattgtgtgaggaaactgtccatagaccccactttctcaggggtggcggccctggtgtctgcgggaagaytggtttctggggtggattctggcctggctgggaggtgcgggagccccatttgcagggcagcccctgccatgccagtctgtggggcctggcgggtgattcttctgttcctagcagcaaagccaggacacggccagggcagaaggtgccagggcacagctctggtggccccttggcaatgtcacccctgctcccttaggtagggtagttatgggcaacgccttatagatwtctgaacttaaactgtctgcacccttgacctgtgcctggatatcttaaccaacgcttctgaaaatggtttccatcttgtctccagatatatcgatacttccctgggtttgactggttcttccttgatcctattacaagtagtggaattaaatttgcaaatgatgaaaagtgagtattatgggacaggaactaattttcctatttagaaaaactctgagaacctctggatgagcctctttagtcacagtaatcaaataggatggaattcagtgtatttagggtcattctctagcaaacaggtctttaaaaagggaaagcctgctagggaccgtggttcacacctgtaatcccagcactttgggaagctgaggaaggcagatcgcttgatcctaggagtttgagaccagcctgggcaacatagcagggccctgtctctacaaaaaatccaaaaattgaccaggtatggtggcatcgtgtacctgtggtcccagctacatgggaggctgagttaggaggatcacctgagcctggggaggtcaagactgcagtgaaccgtgattgcaccactgcactccagcctgggtgacagagtgagaccttgtctcaaaacaaaacaaaaaaaattgtgggccagggggcaagtaaagaactgtaacagaaagaaataagaaatctgaaaagattatagaagtaaagcaatattaaaataacatagtttttgtccatagagttgttttatttcaaaatggtttgtgaaaaccaaaacacatattaaaacagtgatattaactggttgatttttcttcttttttttttttttgtttttgtttttttgagacggagtcttgctctgtcacccaggttgtagtgcagtggcgtgatctcagctcactgcaacctctgcctcctggattcaagtgattatcccacctcagcctcccgagtacctgggattacaggtacccgccatcatgccccactaatttttttgtatttttgtagagacggggtttcaccatgttggccgggctggtctcgaactcctgatctcgggtgatctgctcgccttggcctcccaaagtgctgggattacaggcgtgagccactgagccctgctgatactgacttaatcagaaaatgactttgcctcagccatttgatttgtgtttggttatagaaatatattacaaagtttattgttaaaaatctattaggtaaaccaaaagttaagtattctagttaagggttctttttttaaacctttttcagattgtattgatattgtctttgtgacatttttatatcatgaattttgatttctttaaaaaaagagggaagtaggctgggcgtggtggctcatgcctgtaatcccagcactttgggaagttgaggtgggcagatcacatggtcaggagatcgagaccatcctggctaacacagtgaaaccctgtctctactaaaaatacaaaaattagcygggtgtggtggctcgtgcctgtagtcccagctaatcaggaggctgaggcaggagaatcgcttgaacccgggaggcagaggttgtagtgggccgagatcgcrccactgcactccagcctgggcgacagagcgagactccgtctcaaaaaaaaaaaaagagggaaagtaaaacaccctataaatatttaatttaatttgaaacagaatatgaaaaaaaatggagtattttttcccatcaagtatgttttggttctaaaaataaaaatagaacaaattaaaagttgaacaaatattttaagcaacaaaccctgcttgtttgtaaataytactgttttggaacttgaaaaagaattatctgggctgggtgcagtggctcacgcctgtaatcccagcactttgagaggctgaggcaggtggattacctgaggtcaggagttcaagatcaccctaacatggtgaaccccgtctcaactgaaaatgcaaaattagccaggtgtggtggcacatgcctgtaatcccagctactcgggaggctgaggcaggaggcggaggttgcagtgagccaagatcatgccattgcactccagcctgggcaacaaagaaaagaaaaaaagaattatctgaatgaactggattccttcttaaaaagcaagkttgtgactgggtgtggtggctcaccactgtaatcccaacattttgggaggctgaggcaggcagatcacgaggtcaggagtttgagaccatcctggccaatatggtgaaaccctgtctctactaaaatacaaaacaattagccaggcgtggtggtgcacgcctgtagtcccagctactcgggaggctgaagcaggagaatcacttgaacccaggaggcagaggttgcagtgagctgagatcgcaccactgcactccagcctggtgaaagagcaagactcatctcaaaataaaaaataaaaacaaacaaaaaaagcaagtttgagtaccgtgcccctgaagctgcctttggccttgaccctcccagctgagccagatggagtacaggtgaccctgggtgagacccccaccctcagctcattggaagtcaggggcacagctctgagggcaggaggggctttcctgagctcaggtgggccgtggtctgggaaatcccaagtactgccgcttcctccagagcctctggtgagagggactcrcacatcagacaagccttactgggaagcaagagtgtgtgcctcctgccagcagcacagacagggcgggggctccccaccgggtcctgctccaggtgccaggagtgcaccagcgctgccctcacggagcacacagccctgttggggataaaggagacttgggtcaggcaccacctcagtgagggccgcacaggagagcccaggctccgccggtcctggcagcccatgcttctgttatgtggtttgctgaaggatttggatctatcaaacctactgaaaatcctaaatcacttctaagtgtttagagttggagtgaccataaatgtcacytacacagataaattagagaacattgactttttttaccaacagattcctagtaacattcatttacactaagtttcttggcccacctgaattattccgcttaaaaatatatatatctggtggaaaaatmatcattttcaattttcagaagacattccgagggccagttatatagctgtgattgacacctgtcatctagctgtaatagatgttcatagagataatgaagagttaactttcagttgtctagtaaaaagaaatccagcagaaatcaggctgtttcccaaaacacaccctgaacccrgatccctgccatggacagagggtctgggcaactctgccctttccctggtcttggtctagccccttctccctcctacagcgtgaagcacatctcctgtcccctgctcatcctgcacgctgaggacgacccggtggtgcccttccagcttggcagaaaggtgggtcctggcctctgcctctggtgtagctggcatcttgcacactcagccagtgtgggtgkaccaggctgggagtgggcaggcgggaaggcagcccctgcatgctgcatcacgggctgcgcaccagccacgtcaggctcaggaggccacctcatcctccctgcgtcacctccaggctgcttcggaaggacatgggaggtctggtgtaaaggttggggcaggggcccactgatgctgtctccaagaactatgaaaaataagcagatagttcccagtcctcacacaggggttatcagagtgsgctgcctatgttatcagagcccaggccaacctgggaactcagctggaagggctcatcagttatgggctgaaggcaaagaaccccttgatgaggatctcccaagcccattgcaggggtcacagtcaaaattgatagagaaacttctagcctgtttccttgcctttggaattgcgctgataccagaaccagaccatgctgtctgtggggcctcagtgtttgcttttgctgaatttgctttgactgtcagcaagttggattggatttgtggctcagagtagggtaagagaaggcagcctgggtcttggtaatggcagggcaaactagttgggtgtgtgcaggcctcgtccacggattcagcccagggctgggagcacttcctgctctgacagcccccatgcagtcaggctccataaggcacacagatgacggagccacrcagggcaggggcagaatgcagagccgcccagcagcgcacagctcaggcccacctacccttgccgaaatgagagggggagggggctgagatgggtacatcaagcccatcttagctaagcctgaggcacataccttttgtcccagctccccaagactgtgccatccctgccatcagagcctcccaggcacctggtctggctcatccacctagccactccccagaggaagggtagtctataaggtgtgaggacagtatcttgagtggtgtgtgcccaggagccaagcctggggcctggctcctcccagcccacccccgggcctcctggtcgtgaccggctgtggcaacaagcagtgtatgtgggactctggactggtttctattgaaggggaggctgccaagctggtgttcctcaggctgggacccccatgccaggccactgcctcaggctctgacccctctctccccagctctatagcatcgccrcaccagctcgaagcttccgagayttcaaagttcagtttgtgccctttcattcagaccttggctacaggcacaaatacatttacaagagccctgagctgccacggatactgaggtgagacattctcttcccacccaggggcttcgtctgggcagcactggctcacacctaacgtgcagcaggtggcagctgctgaagctgctcagggggcctcagtggggccaagagtcacagtgatttgggagccttccatttccttggcagaggggtttgagggagtgcctctctcctgctccagractgttcacatgatcatgcagggtgagccgcctccatgttgtamaggatgtacagacccacrcgggggggcacacacgctcacaggtggccatgtttgggaacactcagacacagacaccccagccacttgcaggcctcggrtctcttccacacacctctcaagacgtacacagctcctcaaaagcctctttgtccccagctgcttcttgaagggacgtggtgctcctgactgcccygcactggcaggacatgggcgccagcccagagagccatgagtacccacctgggcctgagtgcagagcccaagcctgagggtgaggccttggcagtagtgacaagggcagtgtgtggaatggaccaacccccggcctcctctgtactkccctgggccctatgcaggttgctgcccagactcgcctacctgcctgtcagaggacacaggcccccaccccactgcctggctgtgtggccttgggcaagatgctaaccctccctgtgcatggracaaggcttctgagccgaggagggcatgtggtacttcgaccctaagcactggacccacggaggggctgctgctaatggtgatagagttttttgttgtgttgtgccagtcagctccaaaaagtaggtcaaggtgccagtttctccctgcaggggactgaaattggtggcctgaattgcctcccagtgctgtatatcccgtgagtaattctactgcaaacttctgcttttctccagttgcctttggaagttccagaggcaaaactgtgtccctttagcacaggtacctgggttgctaagggggcagtgggctcagagtatgggtttgctttgsggttataattttccccattataaaaggaagatatgtgtagaaaatttagaccagagaatagctctgaagttgagggtcaagaatcagagaccttgtctccrtgcctgtgtgttgggctttgacttggcaccacactgcttgttccctgcctaactcactgagtgctgctctgggctacagcgcatcctcatggggctcttggctgcctcctctctgcacagcctctgcttccttagatagcagtgtgaggactgtggagaaggatctttggtctgagctcaaatgattggctcctgattgtcctgtggtctagggaattcctggggaagtcggagcctgagcaccagcactgagcctggccgtgggaaggaagcatgaagacctctgccctcctcccgttttcctccagtcagcagcccggtatcctgaagccccrgggggccggcacctgcaatgctcaggagcccagctcgcacctggagagcacctcagatcccaggyggggaggcccctgcaggcctgcagtgcccggaggcctgagcatggctgtgtggaaagcgtgggtggcaggcatgtggctctccttgccgcccctcaacctgagatyttgttgggagacttaatggcagcaggcagccatcactgcctgsttgatgctgcactgagctggacagggggagtccgggcaggggactcttggggctcgggaccatgctgagctttttggcaccacccacagagaacgtggggtccaggttctttytgcaccttcccagcacatgcagaatgactccagtggttccatcgtcccctcctgccctgtgtacctgcttgcctttytcagctgccccacctcccctgggctggcccactcacccacagtggaagtgcccgggatytgcacttcctcccctttcacctacctgtacacctaacctggccttagactgagctttatttaagaataaaatcgtggtggtggtccttttgtctctctgcagcgcgagaagggtcaatgttgcctcctccatgccccagagccgcccacagccyagcctctagccgctttggagccactccatgactcagcctcagactatgaaattttctagtcccagcagctcagaaatttgccaggagtaggaagttttgttcacctgctcgcccctttctccaagttgcagtcccagcatcagcagctgtgggctggcagggagcccagaggtcctcgcggttacactccttcactggggtaccctgagctacctatagcggttctcagatctacaaaacacttttcctacgcaggggagcagctgagtagacattacttctgaggtcagttcatgagaacactggtccccctcctggccagggtgtgccccagctcctggtccctaattagggtgtcatttctgttccacccacccacggccccagagacaycacctgccccagggttgggatctccttgcatggccatctgagccggggacccacgtggcatcctagaatgtctttgtgaggctataggaacccctaggggagccaggcagccccttctttaggacataggtttactccagcacagagcccaaggctggtctcctggcctcgtcgcacacttcrgctcctgaccacgaagcagaggtgacccactctacctgggctggccttcatcttttcctcattttttttttttttggtctatgtaagctacttgggatacttggctgggggactgaggcaagatagatacaaactaaaaatacaagctcctggtgggttttttgtttttttgagacagtctcactctgttgcccaggctggagtgcagtggcacaatcatagctcacagcaacttcacctcctgggctcaagcagttctcccacctcagcctgcctcccaagtaggtgggactacaggcacgtgccaccacgcccagctaattcttgtatgttttgtaaagatggggttttgccatgttgcccaggctggtctcgaactcctgagcaatcctcctgccttggcctctcaaagtgctgggattataggcatgagccattgcactcagccaagctactagtgtcttttttacaaaactgacagatgatgcagataagagcgagaagggtgcactgtgtggcagctgctccaccatcacctgtcagctcattacatccaagtgccctacccagggtgctgagctcagttgtccaagcaactaatccctgggagggcaccccacagacctggggaggcagagactcccagggcaccaccttggtgccgcccrcccagatgcatggtgggtgtggggatgaggacaacctggcagcaccaacccctgcacgaccaggtctgaggccaaggaggcccatggcactccagcatcccagttcttgggtcttcagggtagcacagagccctaggctcatttctcctgatttcttaatctgcaactgtacaattgatgggcgatgctttggtccccagggccaggagtgggagacaaaagtygcaggtgcaaagggaccagcacaagtcacaccagaaaggtgtgtgtgtttcttatccccagatagcatgtttagtaatggctggatttgattgattgatagratttttagaaaatagctagcttggccaggaacagtggttcacaactgtaatctcagcactttcggaggctgaggcgggcggatcacctgaggtcaggagtttgagaccagcctggccaacatggcaaaactaaaaatacacaaattagccgggtgtggtggtgggcgcctgtaatgccagctactcgggaggctgaggcaggagaattgcttgaacccaggaggcggaggttgcagcgagccaagaccgygccactgcactccagcctgggcaacaaaagcaaaactccatctcaaaaacaaaaaaaaaaactagccgttcaggcacacatgaccccgggttccacacctagtggagatgcaaacttttctgccctcaatcccagaatgatggggtgtaattcagccccggctctagtttcagacgggggacctgtggcccacttgcaggtctcatccctgcactggcaccaccctgggcctcaggcctgtgttctctgcttcccacagtctcataccaccacctgcdgttagttagttagtgaaacacagaccccatgtcagccaaccacagccacaaaggtttaatcagtttttatctcacaaggyagtaacaatgaggggcacagtggtggtcagggtggtggccccagtggccaactaggggagtatggcctcctccacagagccgctgcctggggaagatgctgtcagggcacgaccacagcccagcacttgmcccactcaataaaaggctgtagtgctctggtgggctgtgcaccgtgcgcagatcctcctggtgggcactggaggccagggagaaaaagagcctccccgcagcccaratccagcatgcaaggtgctagatttctcggcaattccacagrgaaggacagtagcctgttccctgccctctctyttgggcaatggraggcaggttgccagccytggggaggggcaaggctgtgaggggctcacccccacctcccagtgccaggcctgctgtccaagcagagcacaaatgggttcctccgggacccctggtcctttttccagacgaggctgtggcactggtggaaagggagggagaatggagcctggcccttgtgtgtacaacaggaaatgcacctcaggacacagcaggagtcagcgggagggcacagacctgccccctgccaggcagaaaatgggcctcctcaagcacaaaagtgaccaagtacaattttcagttgmtaaaacaagaaaaggcttcagctagtttcatttccatgtgtagttattttctcttttgaataagcaaaaccaagctaagctgtgtcagccaacttcatcctgaccaaggcctctgagacagcagacacaagcacccactccagtgtccccctcagtcatcccgggttccaagcacccacacaatgcccattggatggctacaaagggaaagccccatctgggtccatgacccatataccaggtgcagagccaggacagagggcagggggcagggggctgtgaaggcgatgcctagaggatccgacccctcccggcatggccaggaggcagggctgggcaggatgactggggctacatggggcttggcccttccctgtggctggcagcccagatgctgcagtaacactcattcccaggcttcactatggccactggcccagaccccagaatccagaggctcaacactaaagacatcggctaatacatagcaagatgtgtgcaaagttctgggggagcccagcaggtggctccacctgactcccactctgggtggggcaggtgctgaagctgcagggctggccacgaccctttgtactgtcaactctggcttcctttacaagaaactaggagcacttctagcacattccttccttaccctgctctctcaaaaccaccctgacccccatggcccctcctggaaacatggtactcagaaaagcagggaccaccagyggctggcaaagtgtttggggaaaaaaggaggtgcaaagtcagcaagaaaacaaatgcccgctggtcccgccaaggcagggtgtgcctagtcccgggggatgttggggggcgggatctgcaggtcggagggctccacaccccagatctcccgtgcatactccgtgatggtccggtcactggagaacttgcccgagcaggcgatgttcctgatgaccttcttggtccactccttggggttctgcagggaaggagatgaaattagtctctggcgtcacagggcttggggctgctaaaaacatgggattccagaactttaggactgtttccaaatgagctccgagccttggggccatccgctggaagaggaggacattacaatcacttgttcgttgaaaaggggaccccacggaccaggaaagctaccgcattctagatctarggagcaaggagctggagagaaggtcccagcctcgaaaattcctgctagggcatggcccccaggacgacgatagggatagcaccaggtaagaactgcccaggcagatccagtgccaggggacatgsccaggcagtctccttccaccagggagcctcacagctgccacaagctgcaggtcacaccaggccagcctttcctcgaggccagccctgactgagggaagagaaggtccctcccagggccctgcccgtcactcagtttccaggccgcacattcctttcttggccattaggagctgtttttttcaacggagggagtgacattgacagtgacagcttccctaaaggcaggcacagccgactgatgacagatcagaatcacaaacccctctggcccaggccaagaatctactcagcttgggaaataaacaatctgacccaacacgtctacatggacccaccyagctgctcccctagcctctggacccaggagcctcacccggtacagytggtccacctgtgcctggcactgcatgtaggcttcatagtctgcaaacaccttgaacctggaatgggagaaaggaggctgggccagggcagcagggagccctgcccacactgtcccgaggggagagtcccagggcaggaggccaggcaccatccacctggtcctgtctggagcgaaggggcccacccaygcagctggtcagagccaggctgcaccaggcccatttggccacagggcttctctgtgagcaacacttatgtcctgggacaatattttagaaaaaccttatttcaacccaacactcctttaaataaactggcatttaaaacgtgtcttccacacgcagggcagttagagctgcacatgggagaggcctcctgggcagacagtggagagcccatggcgcckcctcagggcagggggcactygctggggaacggcatctccatttgccrtcttaagtctaactgggatttgcctacacaggaaatactgacttgcasttcctgatgtgctgaacaaaaatgccagatttatgaatctacaaatgcatttctgttcactatcgagtcagaagcacacttcacgaaatgcagagttcacaattttaaaagcacttcctttatcacagacctcagcagggcccaggttccagcccagatcccagcatgtggtcrgagytggtgtgactgaagccaacaggtgacacggtcatcgaagagcagcrgacaaaactaaaactaacccaaaggcagctgaaagtggagggcaggtgaattcccagccctcgccggattcaacttttgccaacggtgaagaactgccctgagctgcaaaccttacaaagtctgtaactctagataaaccataccatgtgctaactgcactgaaataaaacactaactacattataatgtcacatcgttgcaagtgaaatccattttcaccactgcctgtcactggcactgacgcctgccgcggttccgcagcccttgtgcgccccctaccccaccccagggagttttgggcccatgctccctctactggcctgctgggacacggctgcccctgggacctccaaccagcagaggacaccccctcctgctcagcacattggtccacaaggcctgggggctggactgtgctgctgtgtctcgctgcccagggccccctggcattgccagaggccatcgcaaactcccagctggggtctaaggctctgcccagtaaggtctcatgggcacagtggagaagacgtcctgaaagcacgggttttgctctccaaacaaggtggaatatccaacccacgaagaggacccctccctccctccctccctcccagccacccaaccagggaagtcggtcccacctgtcatggtgcatcagcatgttcacgatgtccttgaagcagtctggctccttgggagaaaaaaagccactgctgatctggtccacggcctgcttcagctcgggcaggtggtcgtagtactccctggcattgtacctgtgaggcgatgggccaggagtcagcagccagcgccccaggtgggccaccttggagaacaagccatgttggtgcctggcacagcccctgccccaggatggccctgggagctcaaggcctgcacggtccagggcagcagccagtggccatgggtggttacgaggcccttgagcagggacctgctcgagcagagatgtgaagtcagtctaaagccaatcccacctgctcctttgactgttaaagaaatgtcatcactagcagatctgctaggacatagtggctgatgccacattcctagtggagagggccactcagaacttggctcactgtgaaatcctgggcagagcttttgaaaaacagacggccggaggggcaggaagtgaaatggagcaccttggctgggacctcgaagatggaaaaggaaaaacgcaagcaagaccagacaggacaaggcagagctaagtgggagagggacagacgggcagacatgggcatcccaggacggggcccgggcagaagaagctgtgtgagggcgcagaaagggagcacaggcctctgtgctcgggccagcaaggcacagctctgacttcagatggcatgtgtggtttcacctgaccctacttaaggcctcacaggctccccagtgcttcaaggcaatcaggcaacactgccttttctttgtaattatcgcttggaatcaggcccgtgctggattcctcatgaacgtccagatcatgaagaacaaggaaaaactgagaagctgtcacagaccaaatgacactggggagacctgacggccacacacagtggagtgccctgatgggatcctgggatgggaaagacagtaacagaaccccggtggagtcggaatggagtgtgggctgcaggagggccagtgctctgagctcagtgcagccaacggaggggcgcggggataaggtggatgaagctctgggtgctgtcttcaggattccctcctcccctctgccaccccccaacccccccatcccccccactcccccacccccccgaccctggcctacacatttaaaatgtttccaaaatactatttttaaacaattttaacagttacaacttagaccagggaacctcaacagcaggcaagccccaaatcagcagagtgctcccggcagagcgcccctggcagtggggtcctgcccagccccagcccatttctgtggggctgcctgtgcccagggggtgtccctctaggagaccctccccaggggaaaaggcctttcctggaggaggagcccctggtctggactccgcagattcagcctcagagccgagacaggagcagcccagcacccccacgtgggcctcgcccgcagcccagaccccgtccattccatgcacctggaaatggtcacccctgcaggcaggcacacagccctgggtgggcactgaccctagcacacagtggcctggccccaagagcccagtccagccaatgcccccagcccaacacccttcattctccatcctcacggtgccaggtgcccaggggcacaggctcgcaccctttccggtccaaggcctcgacatcctccacccgcaggccgaagatgaagaggttctcggccccggcctcctcggccatctccacgttggcgccgtccatggtgccgatggtgagggccccgttgagcatgaacttcatgttgcctgtgcctgaggcctcggtgcctgcagtggagatctgctgcgacagatcagcggccgggatcactgtggaggggagcccgtggaggggatcactgtgaggaccccaatgtcctcagccgcaaggctcactgcaggacaagccggcccatccacccggggctgggtcgtggagggaccaatgctgtggccccgctccagcccccactccctgctcccactcccgctcccacaggggcccaggctggacacggccacccgcctctgcagggctccccttcgtgactggggcatccttgaggcagaaggtccaagatgggggctcctcaggagccaggtggcataggatctgtgcaccaaaaccttccccaaaaccaggcctagccaaggagccagtcctggctcgctgacaatgtcgttccctggatcaccgcgaccttgatcagccccagcggctccctggatcctttcaggaggaatgtagaccggaatagagccagaaggctggagcggctgaggggtggcgacctcctgggcgccagcagctgccagatgccacggccctgcgctttctctgtgcctgtccctcaggactggtcaccgctcccagacacgctgtgagtgcacacagtgactatacaacctgctctccaccctcacctcaggctgcagcccagtcagccacagcaacactgccggggagaacggggccctgacgccagcaccgagactccagaccaggtgcctgaaggcctgctctaaagatgagcaggagtcagctggccccaaaacacatatgaggaggggagcctcaggcagcacgggggagaggagatgcttcggtcagaggagcagggaaggacgagccacagttcctggccaagccggaggcaagccggcccgtgagtgcctcaagggacctcgcctgccaggcaccactaaagagggggagcgacatggacaccaaggcagcagccaggccacagggacggtgcccagggatccccccctgcaccacggagcttgcagaacaacagcagatcagccctctcacctgcggcagcctgggaagcccaggcggcctgaactagggggggcccttggccctcggcggcaggaggggagcacgagaaggccaggctcagatctcccaccatctggtgggcaaatcactttcctgcccagtagagcccacaggggtgggaactgatgggctccagggcacatggcagcacatcccagggtctccccaggactggcccaggctgccctcaggaagcacagatgaggcaggtgctgccacctgagatcactggtgggcccaagagcaggcaggcagtgaggagcaaggatgtgggcggaggaggggcagtggagttgggggaagctgggggcccacaaccccactggcctggtgcatgtcctgccagcagaggggcccagggcagaagacacggctgaggggcaggaggagagggcaggggagggagggtacagagggcaggccaggcaggtcctgccagcagaggggcccagggcagaaggcacggctgaggggcaggaggagagggcaggggagggaggatacagagggcaggccaggcaggcgcggcagtaagggtgccctgttgggggatgacactgcctgtgacatgcaaggcgccccgggacgcactgtgagtcctccgcactgcacggggagcactccctaaagccgttccctgctcgcctgcagcccggctggctaggtctgggtgtccaggcagagctgaactggctgaggatgaaaggcccagggccagtacaacgcccgttccccggcaggagtgagttttctgtccaacacaggcttccagggttacctttctcagccaaggacacacggtagttctccaggaagatcactttcaacctgtcacccacaactgggtcatgattgacgacgtcgccgatggaggtgaccaacttgatgatcagcttggccatgtggtaaccgggcgctgcctggaaggagagggtgaaggtttttagcacgaaaatgccttgttcaggcccttggaggcgctcctggttcctggggtctgtaggggggtgaggctagagccacaggaacctgccgtcgggacggtcagtagaggagctagggaggctccccggccccaaggccccagctctgctgcgcactcacgatggtggccacctcgccacatccagaaacgtgtccgcctcaagtctggttttctggttgttgttaggttttcagaaattacaaggtaaaagagaccaggatttctagagctgccgactgacaggaaacagagaactgtccctagggacatactgggacacactggagggacacattcggaaagagccaggctacggcggacagacaacccgatgtctgtaacagacagactgtggggaaaacctacagagaactgagacaccacggccagtccaaggtgaggactcactgggccctcactcagaccaacttttagaaatgtctgttactttacaaagacaactgggcaggggacccatgaagtacccgagtgaacatttcaggacacggaggactcctgtccaatgctttaggtgtgacggatggtggtactgtgtggtgatgtttcagtctactcccattgtggttctggtggaaaacatcattttatgaaaaggaatgctgacgtatgtaagagtgaagagctagagtgtctgcagtttactgtgaaatgcttcagctagtctgggtgacaggtttatggttttgctacaattcttcctgcttttctccaggttcaaatgtttccttcttttttttttcttttttttgctgagacagggtctggctctgctgcccacactggagtgcagtagtgcaatcacagctcactatagcctcaatcacccaggacaatcgatcctcctactcagcctcccaagtaactgggactacagacatgaaccaccacgcccagctaatttttgcatttttttgtagagatggggtttcaccacactgctcaggctggtctcgaactcctgggctcatgcgatccacccgccttggctcccaaagtgctgggattacagacgtgagacaccgtgcccggcctaaaattttcataataacatttaaaactttttcgaactccgtatctctatggactttacatactgaaatactgacaaataaaatgacacaattccaaaatttgcttcaaaaacagcaggtgacaggagtggacagagaccaaatggggtgtgccaggaggtggcggagcccagaggagtgcccacccctctgaccagcttcccactcgctgaaggcagcaagagggcagccttcaggctgcacacaggcaccagcaaccccaggccccggccttgccgtggagggctggggtgcctcacacagtccagactcacttagggccactgctccagcaggaccctcctaaggacgctgcaccccacagcagccccacagttctggataaagaccaagctactagggaaacatggcaggaggtggggacactggccgcagagggctgatgagtgtgacgatgtgacctgggactcgatgacagcacatctaggactctgaaagtatgtgtcatagtaaataaagtgaactgaaaccaggcaatgctcagggcatgtgcaggtgatgaagcagccacaacgccctgtgcccactgggcacaaagagaaaggacactgccc

SEQ ID NO: 96485 - DNA, 19106 bp, Homo sapiens
tcttccctcaggttcatctacgagacggagcatcacaacgggattgctgagctcctggagatcctgggcaggtgagaggccgggtgggggcacagatgcctgaaaaaggttggcaggattggtgtactgaacttggatctgaccctctggtcctaacaaatgtcccttaattcctagcatcatcaatggctttgccctgccccttaaagaagagcacaagatgttcctcatccgtgtcctacttccccttcacaaggtcaagtccctgagtgtctaccaccctcaggtgagctgccttcctccttataatgtccaactcaggcagcagagaaaagagccggcaggaaagtgttccagctgggataggggaagcatagggagcaggtgggataattccttccctccatctccccttcccttctgggatcttgtttctatcactgacttctctgagagcttctaggacctacacctcacctcccttctacctcacacctttgcagctggcatactgtgtggtacaattcctggagaaggagagcagtctgactgagccggtaattccccttccgggccccaaggcccacctcttactgtcagcatcacttgccagtctgtacctactgggggtgccataagggggaactcaggagggctgtgacctgaccggtaacatggtttcctctctgaaggggaagcaaaacctatatacacctaggaaacagatccaaggcaaagaaacgggtagctggctgagatcacccaaactgtgcccaccagggtgggggagagagcaggtaggaaaacttcctggtgacctaggcaggtgcaaagaattttcatccccatgccctccttgtctcccaggtaattgtgggacttctcaagttttggcccaagacccacagccccaaggaggtgatgttcttgaatgagctggaggagattctggacgtcattgaaccttctgagttcagcaaagtgatggaacccctcttccgccagctggccaagtgtgtctctagcccccatttccaggtgagactccaacctagcatatcctagcccctgccagaaactgaggtcttgagtgaaatgagcagcacccaccgagtctgcctctccccaccaggtggcagagcgtgctctctattactggaacaatgagtacatcatgagcctgataagtgacaatgctgcccgagtcctccccatcatgttccctgcactctacaggaactccaagagccactggaacaagtaaggcgctggggtggggctgggtggtggggatccagtttgggaaactttgagggtatggaagaactaaagagccaggggtctcacctagtcacccagcaagtggggctgatgtcccctgcatgttgataggaccttgaggggctgactggagcgaaaagatgcctgtgtgcaagatctctgtgataccaaacagcagggcagcggcctgttacaccgctccttgggttcagctattctacaggtcctatcacagctttggagatgtaattctatgcagtgagaagctgatgtgaccttctttgagagtatgtgtaaagaatcccagggttttaggccgggcacggtgtctcacgcctgtaatcctagcactttgggaggctggcaaggcgggtggatcacgaggtcaggagtttgagaccagcctgcccaacatagtgaaacccccatctctactaaaaatacaaaaattagctgggtgtagtggtggatgcctgtagtcccagctacttgggaggctgaggcaggagaatcacttgaacctgggaggtgacggttgcagtgagccgagatcgtgccactgcactccagcctgggcaacagagtgagactccgtcttaaaaaaaaaactcagggttttgaaaagacttttctgctaaaagcaagcacactgtggtgtagatgcagtctgtcatgctgcatctacatgcccatcatgctgctgggaggccattagtgtgggttagagtgggaaaggatgggaggtaggcaggccttggagcatggggtgagggaaggatggacaggtggaccgatatttgtgaaaaccatgaaatgccagtctcaaaccaggtgatttggccagagctctcttctgatactgcacagaggtttgtgaactggaagtagtaaatgacaaagctcttagcagagatacccctgtgagagaacaaattgggttcctcacgctaagggcaggctctggcctcctacacctcatctttcttcttggtggcaggacaatccatggactgatctataatgccctgaagttgtttatggaaatgaatcagaagctgtttgatgactgcacacaacaatacaaggcagagaagcagaagtgagtatctctctccccgggagactttcatcttctaccaccagctcactgtgtttctctcaagcccaaccccaatcctacttttgctcctcaggggccggttccgaatgaaggaaagggaagagatgtggcaaaaaatcgaggagctggcccggcttaatccccaggtgaggttttcctgccactgttgtgaactgaggggccagcccatcttgagctgggggagagtttgttgggggaggaatatggggcacacaggcccccaagcctctgaagtggctcttaacgcttgtccatgtctcctcactcagtatcccatgttccgagcccctccaccactgccccctgtgtactcgatggagacagagacccccacagctgaggacatccagcttctgaagaggactgtggagactgaggctgttcaggtgggagggcaatgtagggggatggagcagaaataatagctctggaagggagaggagacagaaacagcagagccaaagaataaggggacggaacaatagaattcactgggaattggtcaccattcctcaccttgtccctattcacacacagatgctaaaagacatcaagaaggagaaagtgctgctgcggaggaagtcggagctgccccaggacgtgtacaccatcaaggcactggaggcgcacaagcgggcggaagagttcctaactgccagccaggaggctctctgacccctcacgttcctaccacagggccacagcccacacagccctgggacactgccctggccctccatactctgctccctactggctgtcttgggggaaggcagcgcctctctagctactcaagggagggggatgtgggcacttgaagcagggacacccacagaatggtccctcttctccccaaaaggtgttcatgcctccctgtggctagtacaggctgagcactaagatgcttagtgctcagacaacctggggatgcctgtcccctacctgctcctcacccacagctacctgaggctgctctgagaagtacacacaggaatacatacgctcctctattcttcccttcatcctcatttgaacgccaggtatctcccctcctctctctcccctgcagaggcatgtagggaacagcaggagattattctcaccaaagttatgtcaagccccattggtcccagagtagctgaagggaagccaacccccctgcagcacaaataggccccccagtcccagccgtgtgctggcagatagggttgtattatttcttcttaccccatgcctgaccaagggaggtcaaaaggagaaaagtataggctgtggacaataactgatgaatatagggcccagatggaccaagtggggccggggagggatgaataaacaccctaccccgtgccctgtctttggtgagcagcagccctggggtcacagacatggaagggaccaccctggggctgactgcttttctgtgctgttggttcccaaaactagaaagaaggaagcagggagcggtgccccaagcatggctcctgccaacacctatttatttccttgtttgtgctatgctgggcaggccttctcttgtcccttataggtaccttggaggggccaggggctgaggaaggccggacccaggttccaggggcgcaggcagtgcggcttttggctgtgtacatagggtgctttattctccacagagtgatacatgctaaggtgggttgggcttggaccgatgtccccatatgtacagaactgaataaagtgggtctctgagaagtctgatgtgccttgatgtggaaagggagacggggaagatggaaatggacattacaaccagggatgtgttcagtcctgtgctggttctggcctggaatgtaggaatataaggcagctctcactgtggtcacttccaggcaggggatgcctgccgggcttggagggctttctgtaccacatcttcccactgggcatccgatatctcccgagcccaggcaggaacccctggcgcaggcaggcttactccagccattgtccttttcaccagctctacatgttctgaaatcagagccagaggccattcaggcatagaaataatgggaccagctcccctccccaatccccgaatcaacccagagcccttgggctgctagggtcaccaaatccaccttgttactttaaggcaagcctgcccatccccaaagctagcaaaagagcatttcacttggactctgaagtctacaaaatcttagtttacaaactatctttttaggatagggtcttcctctgaaacttccttctactgactcatgccagttcatttccttagtaattattccagaatgaaagaatgatcttttacctgggtccatgggaatagagctgtggttgttcaacgctgtagctccctcctcatcttcatcttcactctctaatggtgggtctggcaaatgaagccccagggcctgcagagccacagaagaccgtttgggtctaggctttcagggagcccagcttcacctgttcaggaaccatccctcctccaccctacctggattcgatcctggatgtcagcaactacatctccatcccccactggtgccagttccacctcctcttgttcaggatcttggttcaggggctggtaggagtagccagctgggcccgaccccgtttcctcctgctcttcctcaggctcctcactgctccaatccccagtgccttctgaagggccctgatgtcccagttcctcagtctgattggggaagatacgctcagggcccatggtgtctcctcctagaactactgttgccatccgggcaggggctgcaagaacagggaggcggtaggacagggatcggatgaaaccaggcccatcttcatcctctcatcatctccttgtagtctcctgcgtgcaaaaaaccagctcctccccgaggctcctgcatcctccacccctccgccccaattccagcctctcgttcctccccctcctaagtcggggttcttatcttgaaccaggccccaccaacttgctccgccacttcctagttaaacgcccaaccggaggccctgccacctcctaaaagacaccccttccagaaccccggctccccgcgccacgcctcccccgcgacttgggaactctgggtcatcagactcccctaaacaggtcggcgtacccgcccccttctcccctctcctagaggaccccctctgtaccgcctgacagatgcctttcaggccccatgggctcccctcaaatggccccagctgcagcgtcccccacccgcccccatccgaatcccggcgccggtgttcccgcgcgcctcacccgctcagagcccgcggcctccacttccggcggggcaggacgtgcagaggtgcctagtcctccagccccgccccatatccatgattgacgctggcgaggacgaggagtccgccccttgccccgcctccgtcattcccagcccaaaaaacaaaggactgcattacccagtggcctcctcggtctcgacacatatttgcacatgcgcagaatctctcctacgcccctgcccactcctcagccctctcgtccctcaggaaacgtatggactacaagtcccgaaatgcctccggcacttagctacgactgcacgtgcgcgcacagctgcccgccggaagaaccgagcttggctgtgtttatctcgttggggactaaggcgtcggttggcgcgcaacgggttctaggctgcaggcagctcgaggacccgcggccccgccccggctcggcctggcaggtagcctgggatgggtagaagggcaagggagaattagggggcttaggacgtgctgtctggagctggagtggcgggggaggggcctgagagtgatgaggtgggggtggggagggagctagggggatgatgggaaaggagagtgttaatggggaaagcagggctaggggaggatggcgaggagatgggtaggagagacctggtgtctggaggaagcaatgaaggaaatgggaaggaagactgggccatgaaaacagggaagctgagcataatggaaggggaggggtgtctggcgtggtgggctaggggaggccggaatgtctggaagaagacagggatagagtcatatgcagagaggggtatcgtggtcagtgcatgctaatttttctttccttagtggaggtgggaaaatggagggctgttgggtggagcttggaatggtaggagaaggaaaaatgagaaaactgcaaagctctcacgagatcaagaagggcgagaaatggggaataaaaaatgcaagagaccaggcgggtagatacattaagggaatagaagaagtttgaaaatgcttggtggtgatggaggactggggagacccagggataagaggagcccctgagcgcctgggggcttgttctccttgaatttgagttgtttatatggcagagaaactaaaattttttttctccacctttggctggaattgcttatctcctctcctgtgcatattttactttaccttgacatatctgaagggaagaatagagaatataagggaggatggaagacttccattcttaagcccatcgacctcctaacagtctccacaagcccagacccaagatattttggagagcgggagtaatgaagtgagagtagcttcctgctggggctatttcaggatgggtcccatggctatttaaagcttagggtgtggagttgggggaggttgggtgggtgggactagcaagccagctgaaagccatgtctctttcctgcaaggggcctcccttatttgagctgttttagtgcctgaggttttgcctggccctttcctctgccagggcttcttaaacagggagcagatgatgatacacccaaactcaggagatgcttgccagcaaaagcattgtcagttgcaaggatttgcctgaaaaaacctcagatgtacccaggtgtacgtgccactaggttgacaggttgtgtttaagagaccatgaccagctgggcatggtggctcacgcctgtaatcccagcacttcaggagaccgaggacggtggatcacctgaggtcaggagtttgagaccagcctggccaacatagtgagaccccatctctactaaaaatacaaaaattagctgggcatggtggcaggcgcctgtaatcccagctacttgggaggctgaggcaggagaatcgcttgaacccgggagggaggcagagtttgcagtgagctgagattgcaccattgcgctccagcctgggggcaagagcgagacttcatctaaaaaaaaaaaaaaaaaaaaagaccatgacttctcatgctggatctttctcttgtcctgcccaagggcattttttgcctcccttcccctttttttttgttttgagacagagtctcgctctgtcgccagactggagtgcagtggtgtgatctcggctcactccaacctccgccacccgagtgcaagcaattctcctgcctcagcctcctgagtagctgggactacaggtgcgcgccaccgtgcccagctaatttttgtatttttagtagagacgggtttcaccatgttggccaggatggtctccgtctcttgatctcgtgatccacctgcctcggcctctcagggtgctgggattacaggtgtgagccactgtgcccagccccttcccctttgcattgcacactcccacctctatccgcctttcaggaacccaagttgtggaagagcttgttctctcttttctactggaaatggcttgttctctaccacagtagcagggatggggaagtggcaggaggagaaaacccctccctctatcaccatcccccaagcctaagcatacacatacctttctggcttaagtcctggcagcataccaggcacagctgtcaaaggaactccttgtgcctgtggggggccctgggtgaccccaatgacaacaactcagcttgacaggagctccctgtgaggggctaaccaaccgcggtaacatggaggtccctgtcctggatcagtcccgccctatcttgggtagggggattgttccactctaaaagcctgaaagcttttctgctttgaggcactcatgccagctttcaatggactgtttgaggctggctgggctattaatagctgtgagtattttgagatccctttccccacctcaaagaacacagattcttagagaggtggcagtaagcagagcagagacaagagaatataccgtttgggaagggggcttcaagtttgtgccaagccagggacagagtggagcctccacgagtaggttgtgaccatgatatgcagattctgagctggcaatcaggtgggggtggccccacccttcactgttggagaacactgggcccaggctgctccctgacctcggcagctcccttrgggcagggccagccacctgagctgagactagtgcccctgtggaggggtagtgtgggagggcccccagggtgacacttggaggcaaaggctggttctgggcagagtcacagtgagctgggcagaagcctygcctgaggatcccgtggccccaatttgtgtgcagatagcagaggcagcaggccgtgccgggggggcatgttgctgtaaccagtggcccaggggatgttacggtggacagtgcacctggagggcgggccccgcagggtgaaccatgctgcagtggctgtcgggcatcgggtatactccttcgggggttactgctctggtgaagactatgagacactgcgtcagatagatgtgcacattttcaatgcaggtaagccaatgctggggctgtccctgggtccccacatcagggtgggaacgggctgctgatgaggtttggctgtggtctctgggaccaaggggattggggacaaacatctggtttgggaaaagtggacagcctggagggaggttcccagggctgagcagagctgtgcccacagtgtccttgcgttggacaaagctgcccccggtgaagtctgccatccgtgggcaagctcctgtggtaccctacatgcgctatggacactcaaccgtcctcatcgacgacacagtcctcctttggggcgggcggaatgacaccgaaggggcctgcaatgtgctctatgcctttgacgtcagtgagtatggatctcagagaggctatgtccttccagatgttgcctcagttgcccaagaaaggtttgggttgggggtcttggggagtagagtaccccagagctgaggagggactgtcatagagggtgcttagttgagccattttctcatctccttcagatacgcacaagtggttcacaccccgagtgtcagggacagttcctggggcccgggatggacattcagcctgtgtcctaggcaagatcatgtacatttttgggggctacgagcagcaggtaggtctgggaataaaataagaggtttagggtgggactgagaaagaggggaagggcaatttaggatggtgaaatgggaggctttggcttgtttgcaggttttgaggggagggatggagggtcagagagtgaccattggctccctcttttcttcctccttttctcttcctactcaggcggactgtttttccaatgacattcacaagctagataccagcaccatgacatggactcttatctgtacaaaggtctgctctttcttttttytcccaaatccccaccctctgttgaagcaatgataggaagctcagtcagaggagatcctcttccagtctttgtgctgacccctccaccatctctctgcctctgcccagggcagccctgcacgctggagggacttccactcagccacaatgctgggaagtcacatgtatgtctttgggggccgtgccgaccgctttgggccattccattccaacaatgagatttactgcaaccgcattcgagtctttgacaccagaactgaggcttggctggactgtcccccgactccagtgctgcctgaggggcgccggagccactcggcctgtgagtgtttgttacttccctgtggagttcccttcctgccctcttcacactcctgacacttcctctctycttccagttggctacaatggggagctgtacatctttggtggttataatgcaaggctgaaccggcacttccatgacctctggaagtttaatcctggtaaagagcactgcatttagggcaggaacaaggagcaattgaggtgggaggaaaagaaaataatcctgaggcggtgagggatgggggtggggaagatacctggactaggcaggtattgaacttccatataaatttctcttcagtgtcctttacctggaaaaagattgaacckaaggggaaggggccatgtccccgccggcgccagtgctgctgtattgttggtgacaagattgtcctctttgggggtaccaggttagaaggagagagggaaggggctcagggaagtcactaatgggagagtgggaggtatttgaaaagggggtttcgtgggtagtttttgtcctactttcatctctcttttgatcccgacagtccatctcctgaggaaggcctgggagatgaatttgaccttatagatcattctgacttacacattttggactttagtaagtatagttattcctgaattgctcctgccatcaaggtccctgtctttgggtggtgatatccaggactggatcctttcctcacctttgaccatctcctttccacaacttctcccttaaaggccctagtctgaagactctgtgcaaactggccgtgattcagtataayctagaccagtcctgtttgcctcatgatatcaggtacagcgagtggttggaagggagggattgagtgagggtgagtgagcagcacaggtgtgacctgattagcttggtttcagtatggaggagacagacatttttgttctgctggagatgtagtgtacttgtgggaaatgagatggaaggaggtgaattgacagccatcatataaaactgtcagcagaataaattatatgaaaaaaaaatacagctcggcagcatcactttctgagacctaagcttatacagttatttttgtgaccatgctgagaacaactgattaaatcttagaacctagctgcaaagtaaagacaagtttaggagcctctggatcacattggttccagaagatctggctgcttccctttgaatttcgttcttaggttccaattaaccaccagatgttactttatgtataatttttcaggttcaaattaaccaccagatgttactttgtatataatttttcctgtctgggtcaytctgagatacttcgtctctttgtatcagttcagtttaactcttgctggctgggcatggtggctcatacctgtaatcccatcacttcgggaggttgaggtgggcaaatcagttgaggtcaggagttcgagaccatcctggccacatggtgaagccctgtctatactaaaaatacaaaaattagctgggcatagtggcagccaccagtagtcccagctacttgggaggttgaggcaagagaattgcttgaacccgggaggcgggggtttcagtgagtcaagattgtgccactgcaccactgtactccagcctaggtgacagaacaagactcaaaaaaaaaattaatatggttgggtgggtggggaaggcctcaggaaggataggagtgctgagtcagagccttaaaaggatggragttaagagcaaaaatgggtattcctggtggggtgaggcattcctggtgagggtaaggtggaggggctgcctggttggctctaagcaaagcaggaaaggcaggttgggatgttgactgacatgtatacacagatctcaggtgcctggacactgcaatatacwtacatacataaacataaaccggaaatccatatgagcttggaggtagaggagtgggtggtgttggatttggtggtgggtgggttctgattgttcaacctagtaggtctcttaagtaagaggtggctgtgggtggttgacctttaggaagttggagagactggtgtgtttttagcttggttcaaacatcccttagcttgggctgagggccccctcttctttctgtctcttattgttggccttccaggtgggagctgaatgccatgaccaccaacagcaatatcagtcgccccatcgtctcctcccatgggtaggaggaagtttctgccacctcccctcctragcctgctgtcatcttcactgcccctgcccatctgtcacccacctgctcctttgacccctggacttggtatacctccatgtggagttgttgggcgagaggtgttctctgtgctgtgaattcagtggggagctgtagcggggtgggggctaggttcctccccccttgggccgagggcccyttccccttggtgctctgtccccatccacctcctttcagctgctcctgggcctcagctctgcccagggccagccaggttctgctgggaagggaagggaatggggagaagggagaagcaagcagtgtctgagcctcaggagcttccccctccccctttgcctatyccctcccctctgcttgagccttgagccttgactgggagctgaaaggagttgcagctgttggcatgagacctccttctccccgtcttggggaggtggggaccagcagataaatcccacccttccttgagctgtcgctgtactcygaagttcagccagctcagattttataaaaattaattaaaatctccaaacgtgttgtgtgtttttgtggaatacggtggagaaggctggagtttgcagtgggggcagggtgccgaggacaagcaccctgaggttctggcttctcagccaagggtattaggaaaccaaatgccaccaaggcctggtccaagcttctcgggcgtggaacccagcaccctgcgactcgggcagaaggttgcgacaatgtctccagagcgggttatcctttgggcccggctccctggccctcgaccgcgcagttttctgcccattcgtcaccacgttgagaccgggaacgccggaagaggcggggcaggggctgccgtgagcggaagcggcgccattcgtcttccgagcgctactgccagctgatgccgggagctaactaccgcgccggggccggggccggggccggggcccgacgtccccgcggggcccgggaccgcgaggaggacggcgggggcctggagcccgcggccgtggcccgcgacctattgaggggtgagggcatggggcagggcgggctggggaggggaaggagattcccaggcggggccctgagcctgcagagacggtgccggtaagactgccaagttctctaagaggcagacgctacactaggggtgcccccagtgcagtggaaagtggggggtgagagtagatgcttccgggattaggacatcctgagaagtttcttcacggcaggatgagggttttcggcgatggggaacgtatgtgcaatagcatggaggcaggaaaaggcatgcatggctgctgaaggcttagtagatcagaattcagcagattccgtagactttgtttttttaattttttttttttgagacggagtctctctctgtcgccaaggctggagtgcagtggcgcgatgtcggcaagctccgcctcccgggttcacgccattctgctgcctcagcctccagagcagctgggactacaggcgcccgccaccacgcccggctaattttttgtatttttagtagagacggggtctcaccttgttagccaggatggtctcgatctcctgacctcgtgatccgcccgcctcagcctcccaaagtgctgggattccaggcgtgagccactgcgcccagcctgttttttaaattttttatattttttatttttttgagacaaagtctcgccctgtagcccaggctggagtgtagttgcaccatgacggctcactgcggcctcgaactcccgggcccaagagatcctcctacctcagcctttcgagtagctgggactgcaggcgcgtcaccacgcctgcacggatgggtttgtttatttatttatttatttatttaatgtagaaacaaggtctcaccttttttttttttttttttttgacggcgtctcgctctgttgcccatgctggagtgcagtagcgcgatctcagctcactgcaagctccgcctcccgtgtttacgccattctcctgcctcagcctcccgagtagtgggactacaggcgcccgccaccacgcccggctaattttttgtatttttagtagagatggggtttcaccgtgttagccaggatggtctctatctcctgacctcgtgatccgcccgcctcggcctcccaaagtgctgggattacaggcgtgagccacctcgcccagccaggtctcatcatgttaccaggtgccagggctggtctccagttcctgggctcaagtgatccacccgcctcagcctcccaaggattacaggattactgtgcccagcaaatgctgcaggctttttgttaaggcacagttctagctgctggagatagttgtgaataaagtagtcaaacactcctatcctggccgggtgtggtggatcacacctgtaatcccagcaccaggggagactgaagcaggaggatcgcttgagcccaggagttcaagaccagcctggtaaacataatgagacccgcttttctactaaaaataaaaaaatttagccagggtggtggcccacgtctgtattcccagccactgaggaggctgaggcatgaggatagtttgagcccaggaggtcgaggctgcagtgagcagtgattaggccactgcactccagcctgggcaacagagcaagaccttttttcaaaataaataaaatttaagtccaggtgtggctcatgcctgtaatcccagcactttgggaggccgaggtgggcggatcacaaggtcaggagatcaagaccatctgggccaacatggtgaaactcgtccttattaaaaatacaataatcagctggacttggtggtgcgtgccttagtcccagctactgaggaggctgaggcaggagaatcgcttgaacctgggaggcggaggttgcagtgagccgagatcgcgccactgcactccagcctcgtgacagagtgagtccagctcaaaataaataagtaaaatttaagggagacaagtaaattattacattaaaaggcaataaaacactgaattgtagactagagaactggattttgtggaatatgaattatagctcaattttttttaaggtgatagaggatatggagaaaaaataaagcttaggagaggttgcattttttttttttttccgagatggagtctcgctctgtcacccaggctggagtgcagtgacgtgatctcggctcactgcatcctctgcctcccaggttcaagctcttctcccgcctcagcctcccgagtagctgggattacaggcacctgccatcatgcccagctaatttttgtatttttgtagagacggtttcaccatgttgaccgggctggtcttaaactcctgacctcaggtgattgatctgcctcagcctcccaaagtgctgggattacaggcgtgagccaccacacctggacgaggggtcgcaattttaaataacttagagaagacctctttgggaaggtgattttgaataaaggcttgaaggaactgagggaggagctgtacctatgtacagtttctgggggaagtgtaccaagcagaggcaacatgtgcagaggaactgaggtgggaatatgctgctaggagacacattgagaggagtgagaaggagatgagtagagtagagatatgacaggggccaggtcacttgggggcttgcaggccattattaaggtacatggcttttactgtgagcaagatggaagccattggggacttttgcctgtaggagtaacatgatctgaagtttatgtgtgggagtgataagatctgattttattttcgatgcctctctcaggctgaattgaggcgcatagctttgagaggagtgaggctggtggttgggagactaggaggctagagcactgattgaggtgagagatgctgagcatgtggaccaggacactggcaatggtaactgagcaagggaggcagatgcccttctggggaaacctgtgaatgagtaaaagagagagtaaaagaatgagtaaaagagaaaaagaagggactatggtttggtgcacctttgaccttacatatacaccttccttagcaagatgaggccccaggttgctgaaatagttggagagtttaacactatcacagcctctgctgcctaggacttctaataatgattggtctgatggggtattaggattagctagctaaggaatggggatgggaagatgtcttttctgcagtgggacatgctgagctgagttgtatgtccctccccacttccacaggcacatctaacatgtcatttgaggagctgttggaattgcagagccaagtggggactaagacgtacaaacaattggtagctggaaatagtcctaagaaacaagcttctagaccacctatccaaaatgcatgtgttgcagataagcacaggtaagcaaggcttgccctagaagttggaagataactgggaccttgaataggtatgttgtcttgggtgacaggtgggaagcctttgaccaacactggagtcctcttgacttggcttttaatttctccataggcctctggaaatgtcagccaagatccgagtaccatttttacgtcaggttgttcccattagtaaaaaggtaaggaagaaggccaggcactgtggctcacgcctgtaatcccagcactttgggagcccgaggtgggcgatcacctgagatcaggagttccaagaccagcatggccaacatggtgaaaccctgtctctactaaaaatacaaaaattagctgggcatggtggtgtgtgcctgtagtcccagctgcttggaaaactgaggcacaagaatcgcttgaacctgggaggtgaaggttgcagtgagccaggatcatgccactgccctacagcctgtgggacagagtaagactctgtctcaaaaaaaaaaaaaaaaaaaaaaatagaggccgggcgcagtggctcatgtctgtaatcccagcactttggaaggccaaggtgggcgaatcacgaggtcaggagattgagaccatcctagctaacacagtgaaaccccgtctctactaaaaatacaaaaaaaaatagccgggcgtggtggcgggtgcctgtagtcctagctactcaggaggctgaggcaggagaatggtgtgaacttgggaggcacagcttgcagtgagccgagattgcaccactgcactccagcctgggcgacagagcgagactgtgtctcaaaaagcaaaaaaaaagaaagatgaggaagagacaggaagcactttttctcagtgaaaggagattgaacagttgtgttttatattctctctcttctctccaaaggtagcccgggaccctcgctttgatgatctgtcaggggaatataatcctgaggtgtttgacaaaacataccaattcttgaatgacatccgagcgaaagagaaagaggtatacagcttgagactggtttatggggaattttgtggggtggaaaatgagggcacaggttagagagttgggcagggggagtgggaagtatagtggtgggcagatttaactctctccaattcagttcatattcaaatcctggctcatcagtttactagctgtgtgattattggcatgttacttaatctctctatgctttagttttctaatcataaaaaaataaaataataattactgtcttggaggccgggtgtggtggctcacgcctgtaagtaatcccagcacttggggagactgaggtgagcacatcatttgaggccagcagttccaagaccagcctggccaacatggtgaaaccccatctctactaaaaatagaaaaattagccaagtgtggtgttgcatgcctatagtcccagctactcaagaggctgaggcatgggaattgctggtgccctggagacaaaggttgcagtgagacaagatcgtgtcactgcactccaacctgggcagcagggcaagactgtctccaaacaaacagttactgtcttggtgttatcaagttaatatatgtgaacttctggccgggtgcggtggctcatgcctgttatcccaccactttgggaggccgaggcaggtggatcacgaggtcaggagattgggaccatcctggccaacatggtgaaattagtctctactaaaatacaaaaggaggagatcaagatcatcctggccaacatggtgaaatttagtctctactaaaataaaaaaaaaaattagccgggcgtggtggcacgtgcctgtagtcccagctacttgggaggctgaggcaggggaattgcttgaacccaggaggcggaggttgcagtgagccaagatcacaccactgcactcaagcctgtgacagagcaagactgcatctcaaaaaaaaatgtgtgtgtgtgtatgtgtgtgaacttcttaggataatgctttacataaaatttcagctaacatttgcagaatgctaaccatgatactcattttccaatgtggagcttgtgaaaaaacagttgaagaagcacctttcaggagaggagcatgagaaactgcagcaactgcttcagcgaatggtgagtgggtaataattgtggtgggtaatgaaagcaattaaag

SEQ ID NO: 96486 - DNA, 25599 bp, Homo sapiens
gagttgtcaactgccaggctgactgtggaaggcacaccccaacatgcacccagagcccctgggcaaaggctgtgaggcttgctggttccaggcagtgacagaaatctgtgtcatcattggctgaccactaagctaaccaagaaaagacttcagtagccatatacaacacagaatatagacttcacagaattaagtcagaaaagtcactaagcaaacaacagtaattacaacaaatcctggggagggagaagaatctatttctagagctgccacatcttgttattcaaaatgtccatttttcaaaaaaattatgagacatgaaaaggaaaaagaaagtatggacccatacacaggaaaaaaagcaaccagtaaaaactgttcctgaggaaatccaaacaatgaacccacttgaaaaaaatacttaatcagctatttcaaatatgtttagccaggcactgtggtgggcacttgtagtcccagctactcaggaggctgaagtgggaggattgcaggagtttgagaccaacctgggcaaaatagtgagacctccatttcaaaaaaagtttaaaaaacttaagaaaaccgtgtctaaagaattaaatgaaagtataagaataacttaccaaacagaatatcaacaaagataggaattataataaagaaccaagtagaaattctggagttgaaaagcacaataactgaaatgaaaaattcactagaggggctcaacaacagatttgagcaggcaaagaatgagtgaccttgaagataggttagctgagatgatctagtttgaggaagggggaaaggagagaatgaagaaaaaggaacagactaagatctgtaggacatcatcaaacataccagcatacacaaaatgggagtccccaaaggagagagacagagaaaggtgaggaaaaaatttgaagaaaaaagtggccaaaagtgtctcacattttattaaaaacattaatagtttacttcaagcagaataaactcaaagacattcacacctagacacattataatcaaatgattgaaagtcaaagccaaagagacttttgatggctggttgctgtggctgatgcctgtaatcccagcactttgggagcccaagtccagtggatcacctgaggtcaggagttctagaccagcctgggcaatatagtgagatcccatctctattaaaaatacaaaaattggctgggtgtggtggctcacacctgtaaatccagcactttgggaggccaaggtgggtggatcacaaggtcaggagttcaagaccagcctggccaagatggtgaaaccctgtctctactaaaaatacaaaaattagccgggcgtggtggtgggtacctgtaaccccagctgcttgggaggctgaggcagggaattgcttgaacccaggaggtggaggttgtagtgagccgagatcgtgccactgcactccagcctgggtgacagagtgagactccatctccaaaaaaaaaaaaaaaaattatccatctcaaaaaaaaaaattatccgggtatgatagtgggcgcctgtagtcccagctacttgggaggctgaggcaggagaattgcttgaacctatgaggtggaggttgcagtgagctaagattgcgccactgcactccagactggacgacagagtgagactgtcttaaaaaaaaatcaaaattttgaaagtagcaagaagtagcaagagagaaactactcattgcagacagccatcctcagtaagattcacaggtaattccccatcagaatctatggcagccagagggcagagggaagatggagaaattaagacattcccagataaacatatatcgtctctacaaaaaaaaaaaaaaaaaaaaaaaaaaaagccaggcatggtggtgtacacctctaatcccagctacccaggagtctgaggcaggaggatcacttgatcctgggagtctgaggctgcaggatgctatgatcatgctgctgtacctcagtccaggtgatggagtgagaccctgcctctaaaaaatttttttaaaataaagatctgagcaggggtagtagtgtgcacctgtagacccagctgctccggaccctgaggcaggaggatcacttagcccaggagtctgaggctgtatgtgcgatgatcatgcctgtgaataaccactgtactccagccttagcgacatagtgagaccgtgtctctgagagaaaaaaaaaaaaggaaaaaaaagaaaagaaatacttcagatcaataacttaagcttccatcttaagaaactagaaaaagaagatcaaactaaaccagaagcaagtagagggaataagatcataaaaattagagtacagataaataaaatagagaatagaaaaacaatagagtaaatcagtgaaaccaagaattgggtttttaaaagattaacaaaattgacaatgcaaagctactcttctcccatcacacagtctgatttctgcaaatacggtatttcagttatctgttgctgtatgacaaatcaccccaaaacgtagtggcttaagacagcagcaaccatttaaataaaaattctgtattttaggcaggctctgtgggtatgactcaactctgcctccacatggtggtggctggaattgcatgcatccagaagctcaactgggctgtaacttccaagatgttccactcacagctggtagctggtgctgttagctgaggctacagttctgggcttttccttgttctatcttgggcttccttacagcatggcaactgcattccaagaaggagtgtttcaagtattgagagtggaagctgccgatgtcctggagaccaaccttgaaagtcacacaacatcacttctgacaccttctattggtcaaagcgtgacacagcctgtccaaattcaaggggaggggaaacagactccacttcttcatgggaggagtggcaaagaaattgcagccatctttattccatcacatatggcttgcctgcatgattcctcaattggccgcttttgctttgttccttgggagcaaagcagacccaggggtgttcttgcagctgctgttgatctgctccagttgctgcaaataagattttatttatttacttatttatttgagatggagtttctctcttgttgcccaagctggagtgcaatggcgcaatcttagctcactgcaatctctgccttctgggttcaagcaattctcctgcctcagcctcccgagtagctgaggttacaggcatgcgccaccatgcctggctagttttgtatttttaatacagacggggtttctccatgttggtcaggctggtctcgaactcccaacctcaggtgatccacccacctgggcctcccaaagtgttgggattacaggcgtgagccaacgtgcccagccaagattttatttttatacactagggtgtgcccctcgccctcaaggcatgcactttgctgcttctcacatttgggtgtgtgtagggggatgggaaaccaggcagagaggtcatgggcacagactctggggccagatggcccgggtttgaattctgcccgtgtcacctgcttactgtgtgactgtgcgcagtcacgtcatctttctgagcctcagcgtcattgcaaatgctgtgcaagtgtttgcttctgcagttgctactgctctatctgcagccacaggcaccctctgtgatcttcctcctgtccctctgctggatccctgctgccttcagcactctggcctattttagtactcaggatctcgggtagctcctaggtttactggaaatggattttatgtttctgtatctcattctccatgttgcttctcatgatttttgagaggagggaggaaaatgctaattttattctaccatacacaaaccagaagtccaaaaaaaacaatttttttctttttttgagacagggtcttgctctgtcgcccaagctggagtgcagtggtatgctctgggctcactgtaacctctgcctcccaagttcaagcgattcttgtgcctcagcctccgaagtagctgggattacaagcacaggccaccataccgggctatttttgtatttttagcagagacggggtttcatcatgttggccaggctggtcttgaactcctgacctcaggtgatccacccacctcagcctcccaaggtgttgggattacaggcgtgagccactgtgcctgacccaacaaaaacaattttgaagaggaacaagaataagctttcaccaccagctatcatgattaaaactatggtcttggcacatggatagctgtgtgtctttgtccctctttatccatcctaatggaacagaattggcagcctagaaagaaatccaacgggtgcaggagtttggctctgacagaggtggcataacaaaccatgaaggaaagaatggactaagcggtacgtggtgctgaaaaagctaatattagatccttaccttccaccatacaaagtacattctagactaaatacctacacagtgtccgtttaaatatagaggccctggccgggtgcagtggctcacacctataatcccagcactttgggaagccgaggcgggcgaatcacttgaggtcaggagtttgagaccagcctggtcaacatggtgaaaccctgtctctactacagatacaaaaattagccaggtgtggtggcacacacctgtaatcccagctacttgggaggctgaggcagaagaattgcttgaacccaggaagcagaggttgcagtaagctgagatcacaccattgcactccagcctgggcaacagagtgagactccatctcaaaataaataagtaaaaataaataaaaaataaaaatggtgggcctaacatacactcttctccccatggaagcccctttcctctgaaaagacagtaaaggaatttaagaagtatcaagccaaaaggacaaagggaatgaacaggacaggagagagcagcacacagcgctggcagaattttagaagctggaaaggggatggctggagggtgacagagtcagcagcagggagaaggtggcaccaagtatgcagaggacctggccagccaaaaggaagtgggtttgtaacgcagagcctgcgcaaggcagtaggtgcttctgaaggggggtgttcagcatggggctgaaagagaggagaagctgaaagtcttccagagaccactcccattacatgcagccaggcagctgcccctccctgctccaagcggaacactggcctcttctctggcaaggctgtgccatatacatgctcaacttggtgaccttggcaaccccagactcagctgaggatggagggaggtaacagcctggaaagagcatgggtgagtggatgctgacttccaggaaaattcctctctggggaaatggaccagctcaagaggaaaaagccacagagacttccattctggggcttcccaataacctttcttttcttttttctttttttattaatagagacaggttctcgctgtgttgcctagactggccttgaactcctgggctcaagcgatccccctgcctttgcctcctaaagtgctgggatcacaggtgtgagccaccttgcccagcccccaataacctttcatatgacaagttgctaagcctcacctagaatcaaggacatagaaatcaaagcaacagtgagatataatgtcccataaaattggaaaaagttaatggattttctaaaaccaaatggtggtaaatatgtgggaaacctgaactcatactcacgctgatggtttttggtaaactagtacaactacttgggagtttgtcaatacctagtgaagttgcagatgcttagaccctatgtcgactttcatacatggacacaaggagacaggtgtacaaggatatgtgtcgtagcactgttcacaatagtaaaaatgtgggaacaacctaactgtgccccaagaatggaatgaatatagttgataagttgtctcttaaaaaaaaaaagcttttccgccatcttcccacgacgccaccatggtgtgcgtgaacgtcctggccgaygctctcaagagcatcaacaatgccgaaaagagaggcaaaygcccagtgcttattaggccgtgctccaaactcatcgtccggtttctcactgtgatgatgaagcatggttacattggyraatttgaaatcattgatgatcgcagagctgggaaaattgttgcgaacctcacaggcaggctaaacaagtgtggagtgatcagccccagattcggtgtgcaactcaaagatctagaaaatggcagaataatctgcttccatcccaccagtttggtttcattgtactgacaacctcagctggcatcatggaccatgaagaagcaagacgaaaacacacaggagggaaaatcctgggattctttttctagggatgtaatacatatatttacaaataaaatgtctcatggaaaaaaaagaaaaaagacagggtcttgctctgtcacccaggctggagtgcagtggcacaatcatggctcactgcagcctagaactcctgggctcaagcgatcctcccacctcaacctccccagtagctgggactacagaggcatgccaccctaaccgcctaatttttaaattttttgtagagatgaggtttcactatgtttcccaagctggtctcaaactcctggactcaagtgatcctcccacctcagctctctagtagctggtactataggcatatgccaccacacgggctaattttattttattttatttwatttatttatttactgtttatttattgagacagagtctcgctctgccacccaggctggagtgcagtggtgcaatctcggttcaccgcaagctctgccttctgggttgatgccattctcctgcctcagcctcccgagtaactgggactataggcgcccgccaccacacctggctaatgtttttttttcttttttgtatttttagtagagacggggtttcactgtattaaccaggatggtctcgatctcctgacctcgtgatcygcccacctcggactcccaaagtgctgggattacaggcgtgagccaccgtggctggccttatttatttatgtttttaaagagacgagggtctcactgtgctgcccaggctggtcgtgaattcctggcttcaaaggatccttccacttcagccttccaaagtgttgggattacaggcataagctatgatacctggctgatcctgtctctaaaataaaaaraawttttaaaaagtgagttgcaaaagcatcaccctttttaaccagatccttaactgtaagcaacagaaaatccttctgactttaagcaggaaaaggattcattggaaggatattgggtagttcacaaaatcactgagagggctgaggaaccaagatccaagactaaaccatttctgcagttaagccccagcccttcggctggcacagccatcgcctgccagctctgggcaggtacaagggaagctgcctctgatactactgcctctgctaccctggaaattttccacaattgcttctgcctcgtgcagcctctgcaactctagtgctgaatgccaagttaggggaagtgggtctggccggcagagcctaggtcacatgcctacccctattgcaagggcaggcgggcagctggcctttcagcctttatggtggaagtgggctcagcctcctacataggagggggtctcaaacactgagcagctaaaagaatgataaatggggctgggctcggtggctcacatctgtaatcccagcactttgggaggccgagatgggtggatcacctgaggtcaggagttcgagacgagcctggccaacatggtgaaaccccatctctaccaaaaatacaaaaattagctggatgtggtggcaggtgcttataatcccagttacttgggaggctgaggcaggagaatcgcttgaacccaggaggtggaggttgcagtgagccaagatcacgccattgcactccagcgtgagtgacaagagtgaaactctgtctcaaaaaaataaataaaaattaaaattaaaaaaaataataagtgggtacattgctatcatttatgtaaaactgatgaacacccaaagcaatggactggattgtgaatacagagatgggtagttaaagtataaatcactaataggaatgatatacactaactccaggagtgtaggtacctctgagaagggacggtaaaaggaaggatgtgggactctagttgtatctgtaacatttcttttcttaaaaataaaacctctgggctgggcgtggtggctcacgcctgtaatcccagcactttgggaggccaagatgggaggattgcttgaggccaggagttcragactagcccgggcaacatagtgagacccccatctctmcaaaaaaacctaaaaagtagccagggatggtggtacatacctgtagtcccagctactagggaagctgaggcgggaggatcacttgagccaggaggtgaaggctgcagtgagccatgatcaagccactgcactccagcctgggtgacagagtgagaccctgtctcaaaaaaataaaagaataaaacctctcaaagatggcaaaaatgttcatatctgtttatgctggtggcgggtacatgggtatcactatattctatacttaactgtaggaaatatttcctaatttcaaatggaaaaaaattacttcaatgaatcagaaatatgtgccaagcagctcgggtcccttcaggtgtttccttatgtaaccatttacttgtgaattagccctgtgcccaccaaaggaagtagaaagctttgcttgctcacacctgcctgtctttccacgtgtcgcattctccgtgagaatggcagggcactcggctgaaactgtgaggctgatgaatacgtgacctagtgctggttactggaaaggagtgatttatttcattactgaaattctaagtccctaggctgggcgcrgtggctcacacctgtaattccagcactttcggaggctgaggcaggtggatcgatcacttgaggtcaggagttcgagaccagcctggtcaacatgctgaaaccccgtctctactaaaactacaaaaattatctgggtgtggtggcacatgcctgtaatcccagctattcgggaagctgatgcaagagaattgcttgaacctaggaggtggaagttgcagtgagccgagatcataccactgcactccagcmtgggcaacagagtgactctgtcttaaaaaaaaaaaaaaaaaaaaaaaaatctaagccccttaacaagccttctgagaagttatcgagtttggaaaatcagagacaagaagagaagagagaataagaatctcagaaaagtgggaaagattttgtcaaaaaaagcttttgtttagacattgactctactgcatccagtagaaatgaattagtgtgtttctatatgatcttttcttttcttttcgtttgagtcagggtcttgctctgtcacccaggctggagtgagtgacaccaccatagctcactgcaccctctaactcctgggctcaagtgatcctcccactttagccttccaagtagctggaactacaggcgtgcaccaccactctcggctaattttaaaattttttgtagagacgaggtctcagtatgttgcccagggtggtctcaaactcctgggctcaagcaatcttcccacctcagcctcccaaagtgctgggattacagacgtgagccactgtgcccagcctatatatgatttttaataacaggatatcagtttctccctgtccagcttcccacccctaccccataaatgtttagcaaatatttaaagactatagctttgaaaggttacctgcagggtccagccccacaggctcagtgggtctctccccgtgtgcggagacgagagagtgtggaaataaagacacaagacaaagagataaaagaaaagacagctgggcccgggggaccactaccaccaatgcgcggagaccggtagtggccccaaatgtctggctgttatttattggatacaaagcaaacggggcagggtaaagagtgtgagtcatcttcattgataggtaaggtcacgtgggtcacgtgtccactggacagggggcccttccctgcctggcagctgaggcagagagaggagacaaagagaaagacagcttacgccattatttctgcatatcagagacttttagtactttcgctaatttactactgctatctagaaggcagagccaggtgtacaggatggaacatraaggcggactaggagcgtgaccactgaagcacagcatcacagggagatggttaggcctccggataactgcgggcaagcctgactgatgtcaggccctccacaagaggtggaggagcagagtcttctctaaactcccccggggaaagggagactccctttccmggtctgctaagtagcaggtgttttcccctgacacttacgctaccgctagacttcggtctgcctggcaacgggtatcttcccagaagctggcgttacygctagaccaaggagcccwtctgctggctctgtctgggcataacagaaggctcgcactcttgtcttctggtcacacctcactatgtcccctcagctcctatctctgtatggcctggtttttcctaggttatgattgtagagcgaggattattataatattggaataaagagtaattgctacaaactaatgattaatgatattcatatayaatcatatctaagatctacatctagtataactattcttgttttatattttattatactggaacagctcgtgtcctcggtctcttgcctcggcgcctgggtggcttgctgcccacagttaccaaattgtgactgtcagggttgccacatctcagcttggccctgagtatactttctggaacataatgtgagcgtaatatatgttagctattattactcaatgaccaaaaaaaaaggaaaaacaacaacaacaacaaacaaataaaaaatgggcaaatgcccagtgtggtggctcatgcctgtattcccagcactttgggaggccaaggtgggagcatcacatgaatccaggaattcaagaccagtctgggcaacagtgagactcggttgctaaaaacaaaaagctaggtgtggtggtacatgcctgtaaccctagctactcaggaggctgaagtgtagagatcacttgagcccaggagttcgaggctacagtgagctatgatcgcatcactgtattcaagcctgggtgccgcagcaagaccttgtctctaaaaaacagaaggaaaaaaggggggaaagacttgaatagacatttctctggaggtgatacacaaatgctcaataagcatatgaagagatgctccacgtygctaacttccaggcaaatgcaaatcagaaccacaaagggataacacctcacactcaccagaatggctgctctaaaaacaaaacagaaaataacaagtgttggtgaggacgtgggcaattgggacctttgtgcactgttagtgggagtgtaaaatggtgcatctgctgtggaaactgtatgacaattcctcaaaaaattaaaaatagagttaccctttgatccagcaattctacttgtgggcgcagaaccaaaagaattaaaagcaaggtctccaggagatatttgtatagccatgttcatgagagctattttaataagcctttgcattaatcctcgggcacagggtatgatacagcatcctacaagaataaggaaccctattttgatggtaggagaggtgaggattgaggacataagtcccttccgtttgccgaaccaatttcccattaaatttgtgaaagggccgtttagtctagaatttttgctaacttgttggataaggaggttaggccttgcaaagcctttgttattgttttgtcgggggctgtgttattagggataaaagtataacattggactttaatcatgacacagactccggcctctttcgctagtattatgtttaatgctattctgttttcccaggccatttgactggtgggtcctgattgtccagctatccctttaatagtgtctctagtatacttaacaaatcgttgttggttgtaataaacgtaatttgtctaatctacatttttgtttatagttgaccaccaaaacagcacagattaaaaccctgcagctatttgattctgggctttaaagttatctggtactctttgtggaattctaatagcgtctatataaatgtgagggttagaagatccagtggagtgctttttatttttttttttaactcggttctgactttcttgcttactgtgttggcggaatgccagggtgacagggatggccaattgaacgagagcacaagtgccactccagtgactcggcagagaacttcatagtagtttcccgcaataccaccatacgtctgctcgggagtgagtaagggcagcttgactggtaagttcttggaaaggcttagtctcactgcaccattttaggtctttgagagacattaatttctccccctgccgtgagagacccgaggtaaaattaacatctgaggctggaggccgggtggcccctgggggctgatccacagagcctttgactttggggaatagcaatgagagtcttgtgtggcttgctgccccaggttgtggagttttggaagaaacttaccatgcagcttatgcccagttcgttagaagaccatccaagagggaaagggactatttgagcctctggcctgtctgttgcaccagtgtaacagttgtttttatttagtgtgcaaacagaatatttaacccattccaaccaggcatttgcattttggtatcctgtctcgactgctaaagtttgttttaaatctctaatatttgtaatgtcgactatggctttgttattggaaaaaataacagtctgaatgaaagaaggctctggagaaggagaaagggaagggggtgggggatcaatgaagcacatttcaaaagatcctattgggtctgtcccagaatgaaaattagcttctaggccacagaaatggcttagagtggggttagcatcastggaggtggggacagtgatgaagatttgtatagggttacactgctgaggctgacaattagggggagttatgcctttggtaaggtggatatcgggctttagattaatgcagcttcctcctggggaggtctagccttgatatttcgtggtccagagttcatctccctaaccataacagaacctccaccccgcgctttgtgcacatctggtacaagttttattattataggcagttttgtttattttggaggggcaaaggtacttattgatagaggctaactttctttggttttggagatccttcagggtctcctcttcatgaggagggttgggtttttcttagctttagttaggtagcactttcccctggaacagtagcccgtgactccggaggtggtgatgttttttcactcgagtatgatgagttcatcctttttttgctgttcggatgcagtttcagtggccaggagcactagataaggtccttcccaagctggttcaagctttccttttttccaccctttgatgaggacgggagctgatgttgatgttctgggaattccaggggcagcacctgtgctaagagacctttggttttaagagaagagaaagtggaagatagaccaagtatatcatttttgaggaactgacattttgttttaaatgtaggaatgtcagtagtggaatgtacataaggtagcccatatagcgttttataaggggataagctgatatctttccaagggatggttctgattcttaataaggcaatggggagacatttagtccagggtagctgggtttctaggattaatttggtgaggtggttttttaagagtctggttcattctttttacccttcctgccaagggatatggcattcctgttttatgtctagcacctgggctagctttttaatgacacgtgcagtgaaatgggttccattgtctgaatccatgttttctattagtccaaacctgggtataatgtttttaactaatgctttaactacattactggtggttgcacttgagaagggggtggctcctacccagcgagtaaagtggtctgctattaccaacaagtacttcaggcaaacgactgggggcatctcagtgtaattaatttgagcactttggaatggtcttagccctggatttctgcccccagtaggttgcctttttaggatttgtttattagtttttctgcacactctgtaactgcttgcttagcaagagtgtatatgcttatacacctgtaaactctaaggactgcaccacacatggcttggggtccccagtgagatccttgatggagctgcgacaatatttccctcatgagaggtttagacaacattttctcccatctggtagtacccaccttccctctgagcttttcttggctcctatttcttttaacatttttttggtctttatgggagaagatggggaccgcagctggaggggaaggcaaggggctgaatggaaaatgggtactgcttgggaaaaggcagcttgcttggctatttggtcagctagattatttgcccggctttcaaaggaagggttttctttttactattttcctgggagtttttaatttgacctcgattggaggaactggtaatttctctcgatgtcctttttttgaccatgtatcaggatggatacacttttcataatctgtggtggtaagttcagggaggtgagaagttttccctgattaatgtagaggcttaagccaaattttaacattagatctctccctaataggtttgttcttgcctctggaattaacagaaatttaatattagctgatctgcttttatatatgacttttgtttctttttcccatttgggacattctcttttgaagtgacctattcttttacatttgaaacatttgttttgtcttctttctctctctctctgcctctctttctctccctctccctctggctctctgtcttttcctccctctctctctctgtctttctctttctgcctctctttgtctctctgtctctccttgcctctccatcttctctctttgcctctctttctctctctccctgactccctccattccctctataggctgatctttccagttctctgtttttgtaatttctttgtgatatttggctactagtaacaaaatggagctttaacatcccctgtccaaggggatcctttatgtttaagcctgtatattttcttacctgttccttgagtctgtttaaaaactccgtgggccctttgttttttccttgctgcatattaaatgctcgggaaatattttgggtttgaggcactgattcccgaatccctttaactatcattttcctaaggcctttcatgttttcttggtgggctgcattgttattatcccattgggggttttgggccggcgatttttgttctgctgcagggatattttgactgggarggtgtttgcgctctcagactatcatagcagccctgcggatcatggttctttcctctcccraaaagagaatacttaagatggacrttagctcagcccaagtgtatacttgtggtcctaaaaatcggttaatttgatccacaaccctaaaaagatcatctaatagtggtttaagtttcttccttaggtttctgacctctgaactagttaaggggcatttacaaagccaatttcccctcctcctagaggcacttcccttaagggaaaaagggttggggtagacttttttgaggaggaggggaaagggaaattttgaatcccatgtgctagtggactgtttggggttagggattttactttctttaggggaggtattttctggctttttttcctgcagtttttagggggtagaggacaggcccctgccgccagtgcagggcatagtctatttcttcctgggagacaggacttttgttatttacatactttattaaaagttgacaaatctaatccttatttgacccaaaacttggccagaaaactaaaggtttaagaatagtttctttggttcaaaaaaaacaacaatattttatcatctgttgctttttcttatgtttggtcctttgtagttcttgttttactaggggtatttcccatcctggaagttaatgggggctcagtctctcctattagagatttcttgcacccttttccctgaaggctcaacctgagtgtgtgtggggctcaacctctttttttttttttttttttttgacacagagtctcgctttgtcacccaggctggagtgcagtggcacgatcttggctcactgcaagctccacctcccaggttcacgccattccctggcgtcagcctcccgagtagctgggactacaggcgcccgccatcacgcccggctaattttttttttttttttgtatttttagtagagatggggtttcgctgtgttagccaggacggtctcgatctcctgacctcgtgattcacccgcctcggcctcctggctcaacctcttttactagagattgttttttttttgctccctttccctggaggctcagctcccccactggagatttcttgcactcctttactttactccacactcgctttgcacttaattgtgcatcttatttacacacttttaacctccaaactgtccctaccaccaaggaagtacttcaccacccccacagtttttcttaccttggtctgtgcatagcgttacctgctcaccacagtaactgtaggccttttcttcctgtgttgctaagagtctgggtttattggttgcactgggtgggtcccgattctttacccttgaggccactgcaatgagttagcgggatgcgtctcctcatgagaagtgatcagagaccctttcccggaggagaatgaggtccccatatgggccaccaaatttgttggaaacaaatgctcagtgctgcaaagaagaaccagcactgagacaaaggatctctcagcaaggcaaatttgcttctgcagaagggtgcttcttgtaggtctggtcgccacgagagcaccccaaacaaaggagggaaggggtttttattcctaacacagcttgtgcccgctactgtgtcctgtctccattggctggagctggaccaatccaagctgaacccggttggctaacttgaaaagtgcaagaatgcggttacactggtggggggtgggaggaacagtttctgcggggagggtcgttgtgacgggaggggtaattcacagagtgggtagcagatgtggaatgtgggctgtatagataaggactggtgggaaggttgtttaccagggcagggggacacagagagtaaggaagtctggccttgaaaggagggaacagaggacaaggaaacttaaacaagctaaacctttgaagaagaacttcttactgtatttaacactagcctggccaacatggtgaaaccccgtctctactaaaaatacaaaaaagccgggcatgatggcccatgcccagttacttgggaggctgaggaacaagaattacttgaacccgggaggtggaggttgcagtgagccaagattgtgccactgcactccagcctgggcaacagaacgagagactctgtctcaaaaaagaaaaaaaaaacctgaaaaattgttaagatgatamatttcatggtatgtgttttctactataattaaaacagttgtataaatattagccattgttatttcacaggtgaggaaacaagagatcccaacacagagctggacccaaaccagtgctcttgccaaacattggaggcctctgtgttcctcagattgaggaggtcctgatgaggacattatgaggggccctgttttgcagttatcaccgcagaagtgggcagcactctctgtaggaagtctggtctcggcaatcatccagccaactggggttatctcaggttataacttggttctgaggccccgacttgcagcctgaaggtggcttggtttayttacctactgtcacatttggtaacggctgaagggtagaagggtgcaaacctcactgtattgtcttattacaatctgctccttgtcaaccagacagctgggttcagagaaagcttagaagcccatatagaaagccttgcgtgcccttgcgagagacagagtggagagagagaggagcatttaccaactcactcaagcagtgtagctttctctgcagggaaagtgtgttggtgacaaaggggtgagggttcccagaacagtcaggaagtttatttacttagttattattattttttgagacggagtctcactctatcgcccaggctggagtgcaatggcacaatctcagctcactgcaagttctgcctcccaggttcatgccattctcctgcctcagcctcccgagtgtctgggactacaggcagccaccaccacgcccggctaattttttgtatttttagtagagacggggtttcaccgtgttagccaggatggtctcaatctcctgacctcatgatccgcccccmtcggcctcccaaagtgttgggattacaggtgagagccaccgagcccagcctatttatttatttattttgagacagggtctcactctgtcacccaggctggagtgcagtggcatgatcacagctcactgcagcttcgacctcctgagctcaagcagtcgtcccacctcatccatctgagtagcagggactacaggcatgcgccatcacgcccggctgattttaaaattttttcgtagagacagggtcttgctttgtttcctaggctggtctcaaactcctggcttcaagtgatcctcctgccttggcctcccaaagtgctacgatgacaggtgtgagccactgcacctggcccaaatttcacctaaggggggtagtgctaattaaaatgtagcaaaaacatatttccttgaaactcagtacatcctagtgaccatgcagtaagcaaagttaggcatgstgtatctgtacagttgtctcgtaaataaaggacacagttttcttgcagctgtattccagtaggcaggtaactgaaaaacagacctaaggacatagctctctgctcctagacttctgcctggtgtgccaaagagattaacatcctgccaccaggagaaaccatcctggctgggcccagggcaagagggctggtatagctcagggtagggctgggcactttttgcagcccggatgcttggagagaagcacaggggtggaacagtggccagctgggggcagtgctgaggaagggcttgcccagtagcactgggctggatgtcagcagtggggtgggccctggcttgactcggtctccagtgtggctctgaatgagtggggagagctggagaggcaggcttgagtttcctgctgttccctattttgtagatgtcagtagcagatggcagatgctctgtgatgatgcagccatctgcatgcctcatttttcacttgtctgcgagtcgctcagcccagggggccccatccttcacctcagtggaacagtacccagttcacaacagatgggccgtaaatgtttgggggctggctgaccagggcaccagactgggcggggtggtcttagaatacttttaaggaaaatattttatatttgatcttcgtatttggtgaactctgagttatcaattgtgactaaaaatagatataagatcaatgtagcctgaagacgatggacccattttacagttatgggctctcaaaattcaagttgctgctggttcaccacttggaaaagaattcaagacacaaaatcaggctgcagggacaaccacagtatcatggggctttggcctccacatctcaggtaacaggagtgaagggccactgggatacagacaagaggctgccttcagaggagggacaaagccagcttaccgagtatctactatgttctagtttggggatgatggactgggtgctgaggatggtgatgagtaaggcagtgttcctgatccctcagtgggagaaggggaatcacattttgttaactacaggtaaaggctggtgtcatgttaggaagactctggtagccacagagggcaataggatacacatgggtttaagttttttatttttattttttgagacagagtctcgctctgtcgcccaggctggagtgcagtggcgcgatctcagctcactgcaagctccgcctcctgggttcgcgtcattctcttgcctcagcctcctgagtagctgggattatgggcgcccaccaccaagcctggcgaatttttcatattttcagtagagacggggtttcaccatgttagtcaggatggtcttgatctcctgacctcgtgatccgccctcctcggcctcccaaagtgctgggattacaggtgtgagccaggacacccagcgggtttaagtttttaagacaaaaaaattcaggagtccttagtgtggaaacacggttgtgagcagatacaatacaaactcatcaagtcattcactagaactagagtaactagaattagtcattgcatccccaaatactcatcaactgtttattcttaccacttatttccctagtcagaagctttaaggagataactttaagccaagaacaatgcctacaataaggagttatcttatgaaaacacattatcccagagcagacccaggctggaaatatttaatacctcaagaaaggcttagatacagaccggacccggtggctcacgcctgtaatcccagcattttgggaggctgacgcaagttgatcacctgaggtcaggagctcgagaccagcctggccaacatggtgaaaccccatctctactaaaaatacaaaaaattagctgggtgtggtggcagacacctgtaatcccagctactcaggaggctgaggcaggagaatcacttgaatactggaggcagaggttgcagtgagccgagattgtgccactgcactccagcctgggcaacaagaacaaaactccctctcaaaaacaaaaacaaaaaagaaagccttagccacatgttgtatttgcaatgtgtcaactaagccaagttggaaacacatgtcccagaattccttccctgcttagttctgggttagcaaggaccaatgaccttgtggagatttgagaggtggaaacaatgtagcagccacatttttttttctaattttagagacaaggtctcactctgttgcccaggctggagtgcagtggcgtgatcatagctcactgaagcctacgactcatggcttcaagtatcctctcacctcagcctctcaagtagctgggactataggcatgcaccaccatgtgtagctaattaatttgtgtgtgtgtgtgtggtagtgatggggtctcactatgttgcccaggctggtcttgaactcctggcctcaagcaatcctcctgcctcagcctctcaaagtgctgggattacaggtgtgagccaccatccctggcccctaaagtgtattttaaaaagatgcctctgcttaacacgttggcaagcttcccaccatagatttattccaaagtagactatgaggcccatggctctgctgccatttcagttccaccgaatgtgggaattctaaggaagtaccaacatctccttccatacaccaagagcatcactcatcatactagaaaaagacctattttaaaatggtgcaagggcatcaggtgacctgacggccatgggcaggctgcatcaccattctgggtcctccccatattcttgattctccaaggttccctcatctttagaagacaaagaatccctgccttataaactgtgctttaatttttctaactataggctgcagttacccaaacaagatgctgtcaaaaatcttaagagttgtatttaacgctgtctctttcttgccgtgtattattaaggtcacacgtggagattctgggcaattacagatagtgccttctcctcccacagaaatctccatgtcagacatgtagtagagaaaaatctgaagggaagtactgaaggtctaccaaaacttttcaagccatcagagaatgtccttttatgtactttcgtcagtcactgtcattcagatgcataagtagccagctgatggaaaaaatacacagctgggttggggaattctgagtttcaggattttgactaactggctcaaattcaatgcgttttgtcaccaatactggagatagtctccagccccagagaatacaggcttcacatgtaccatactaaaagtggagttcagtgtgctgctaaggccaagtaagtatagacaaagcccttcactggcagtcctcgttttggaggttgtgcaagctgcctctgaatttctgagatcacacatttacagccaggaatcttctctggctcatcctcaagatccctagggtgatcattattttcttacaaaaaaaaagcacgcaaataaagggaatttattatggttgagatagggtcttgctctgtcacccaggctggagtgcagtggcatgatcatggctcactgcagcctcaacctcccagggctcaagtgatcctcccacctcagcctgtaactgggcctaaaggtgcataccatcatgtctgtctaatttttgtactttttgtagagacagggtcttgccatgttgcccaggctggtctcgaactcctgggctcaagcaacctgcccacctcggcctcccaaagtgctggggttataagcataagcaaccgcacctagctaggaatttatttcattaccaaataatttaacagggaggagggagaaatataattcaaatccagagatgaagccaagaattcagagggaataaagggtgcctagaacctgcatcaacctgtctgtagacctcagaggtcctactaagtaccttccagcactgtgccaccttcttttgcagtgtgaaaatgaggatttgcagtatatgtgacatctccttaggccttgagagtctgtgatgatgagtattgatgatatatgctacttaagaaagaaaatgcatgctcaatatggaccaccaccttagatagccttacttatgtttcatatatttattaaagggcacaattaaattttattttgcaagtcgagcctaccttaaaatcagcttaaaaaggtgaaatatccgctggctaatgaaaaaacaaaacctttttatttttcccattacttggttctttttagcaacgatgcattgttctgccactttcaccccaatgttggtttcaggttcaccttagagcaaagtgtaggatgatactgtccattgccgattttctgattttttttttttttttttttttttgagaccaagtctcactgtcacccaggccagagtgcagtggcacaatcttggctcactgcaacttccacttcccaggttcaagtgattctcctgcctcagcctcctgagtagctgggattacaggtgtgcaccaccacacctggctaatttttgtatttttagtagagacagggttttaccacattggccaggctggtctcaaactcctgacctcaggtgatgcacctgccttggcctcccaaagtgctgggattacaggcatgagccactacgcctgacctctctgatgtctaatttcttcaagttggcccccaccatggttttttaaccaatatagctttccctgaaaatcacttaagcaaaaccaaaaacaatgggaagtcacattttttttggatttatttaaagaacacacaaaaaagtgcatctaaatgattttttttttttaaaaacaatgtctttaattcctcatatgctgacttggcaatccatatgcagcctaaaaggtggttgaaagatgtctgtggacttctacacaaattgtttaagattattgaatttgatacaagaatacgtgaagtgtcttcttgagtggtaatgggcaccctgtagttatttgctcagaaccactcacacacccttcccctccccacacacacttttgccagttccccctggtgaaccataatacacacgtgggagacagctggcatcatctgagtcttggaatagctttcttgtttgttatctgcaaaaagctaggtggcctttttagtatcaaatttcaatcttggcctcactggaaccatgctctacagagctttcccaacagtttagcaagtaagcaaaatcagcttttgctcttcatatttcgtaggtgagactggggcttttaaaagaaatatttcataaaaaagacaaaagcataaatgagaaattagagggattttagttatcattaaaggaaaaaactcacaaattgatcccatttgttccatggggaagaaaagtattataaaaggaaataacttgatttttaggtttgaagggggtcccaatctaataataaaagtcttttgataaaaccatcataaaaataaaaactaatttaaaatataactgccagtgttttttaggatttaaaaaggtgagatgttccaggtttaagcaaatggttccttgggttgccaaatgcattcccatgagtgtttcttaggctgagggaatagagagccatgctcaatctgtttacccgtaaggactgaaattcaactacatgtacacatttaagacttgccctagttcaatggtcagctcaagtactggagatttaggctactggctgtgtaccggcatgggaagctgtcttcaactctttcacaactcacgccagaacagagaagcttgacagggcaggaaaagcgagcaactgcgtgtcaaacctgcaggtgaaacccctagtgtagaagagcaactatttatttgtcaaccctacagattttgtttttaaaaattaagcttagtactaaaaagtcaaaatttttttgcatgatagaggagtgtaaataaagttccataaaccagtatacatatgcttatgagccaataatcttaaaaagacaaaaaaagctgcatggatcctaaatgactatgtaaatagatccactccaggtcaaaaatattgtaagcacaagtcttaaattcttaatagcaaggattagaatgaaagaagaagctgagcagtagcaatgctgggaggaagtactgtgtattgaatattattccctaaaaggaatagaggaggggagaaaaagcacaattctgattgctcttttcacatttcagtatctcagaacttcatcgaaaataggaaaagctaatccagaaactctcatctgctcattatcattgctgaagggtgttttaggaatgacagaattactcccccagggacaggctgtgtgtggtagaaagccactctcacaaggaggctggctgaggagggggactttgggaggaggctaagtcagcaagcaagtggcctctgaggttctggctttcacgtctgtgacactgctgtggaactggggagacatgagacccctctactgtgggttctgttggttaaaaatgcaacagactacatttatagcacttcagtcatttaaaaaacaaaagcttatcctccttcccctaccctacccaactgtaggaaaggagaaattcatgaagcattttttttttaaaggtttct

SEQ ID NO: 96487 - DNA, 18228 bp, Homo sapiens
cggggctgggggagggatagcattaggagaaatacctaatgtaaatgacgagttgatgggtgcagcaaaccaacatggcacaagtatacctatgtatcaaacttgcacgttgtgcacatgtactctagaacttaaggtataataaaaataaataaataagtaaaaatgccttcagcagcctgaagttctaagagctttccaagtttgggaaggtgtccgggttttctgcgattacttctctgagcatgaacggaagtcaccctttgtgccttatgcggtgattttaatgataggtgtcatatataggacggagtaatctgtttacattctgttcttctcgatgcactcacaagcgggtaactaggtgacaagaaaacaaagatcttattcaaaagaggtcttacagcaacccaacgtctcatcttcccatagtaaagatgacggcgccttgaggtaagctacaggcaacaccacttccgcgtttctcttgcgccctggtccaagatggcggatgaagccacgcgacgtgttgtgtctgagatcccggtgctgaagactaacgccggaccccgagatcgtgagttgtgggtgcagcgactgaaggaggaatatcagtcccttatccgggttagttgtgtttctacagtctaacgcgtagcataagggttgggagaaatcaggtgtcctcaataataggctccgtgtggaagccgcttccggtttttaagtttaacgcccaaattcatagaaatgggactattgtggggctcggggactaaggagggatggtggggagagggcaaaaaagactcgggtgaggtgcacagtggggccagaccttgcggctaaaagcagcagttattttagggatacgcttccccagaaggtgacgtgtctccctggctacaggtgtttgttcacctggatgtgaacaaaaatcctcagggcgccaactcccagtccgcatctctctgcccccttcttcactcttcactgttttgtttgtttgtttgacggagtctcgctctgttgctaggctggagtgcagtggcgcgatctcggctcactgcaacctccgactcccgggttcaagcgagtctcctgcctcagcctcctgagtagctgggactacaggcgcgcgccaccacacccagctaatttttgtattttcagtagagacggggtttcaccgtgttggccaggatggtctcgatcccctgacctcgtgatcctgatccacccgcctcggcctcccaaagtgctgagattacaggcgtgagccaccgcgcctggcctcactcttcactctttcaagccacattagggctgaaaattcaagtaggtgttaactacagagagttggggagtttagctcatagttagaaacgggctgtcttctcagttatctctactgtggaaggtgagaaaagtttgtcttccttgtagtttctgcctgcttcaaagaccagcagttctagttctcctacctcatgtattcattcactaaaaaaaaaaaattactgtgcatatagaacctagggaggagataccaagccgaataaggaggaacttactgaggtagacaaaaccagatcattataatacagtgtttaagtggagagagactgagacagatatggacagatataaagcgagaaatggctaggatgttttgagagcataagaggagacatccagtttgcattcggtcacggaaggtttcctggaagaggtaatgcttgagctgaaacttaaagagtaaacataagctagcctgataaaacataagagtagaaggacattcaagccaaaagggacagcatgagcaaaggcatagaatctagaaacggcacaggcaccagcatgatgtgtttgaagaaacaaagtagctcagagttgttagagcatcaaatgtgaggcagggaatggtagacaaagctaggagacatatttgagcacttgaattttctcttggaggctttgggataccgttaaaagttattaagctgaggaattacatggccgatttgggtttagatcagtcacattggcaataaggggaaaatacaattgacagggacaagactgaaggtaagagacaagttaggctgtcattaatctcagcgaaacaaaaggcaatctaaactaggcagttgtgaggatagagaggagaggtagatttgtagaatattcagaaggtaaaattagcataacatggattagtgtagtaagggatagggagggtcaaagatgattcccaggtttttgccttgggtgaatgctcatactgccacctgaaattgataattcaggaggataattcaggaagtgtatccaaaggaatataaaaaattccagatggaaatgctgagtttgaagtacctgtgaaatgaaggtcaaaacgtcaacatacagttggatactaaaggctgaagttctgaggaaagatctggaccaaagatgaaaatctgggagtcattagcctgtgggtgttagttgaaaccaggactatatgaggctagaagggagttacccagggaaggagtctatcattaaatgagttgtgggctgagggcagacactatcagagaagtgagaggagaatccagatggtatcttcaggtcttttgtgcttgctaaattgagtggagcccattctattctctgttctgggcagacccccacttaccagtatagccttgtcttcagctttgctaatgttagaaaaattaggtaaacatattaagaaaaagtaggctgggcgtggtggctcacgcctctaatcccagcactttgggaggccaaggtgggcggatcacgaggtcaggagatcgagaccatcctggctaatatggtgaaaccccatctctactaaaaaaaaaaaaaatacaaaaaattagccgggcatggtggcgggcacctgtagttccagctacttgagaggctgaggcaggagaatggcgtgaacccaggcaatggagcttgcagtgagccgagattgcgccactgcactccagtctgggtgacagagcgagactgtctcaaaaaaaaaaaaaaaaaaaaaccggctgggtgtagtggctcacgcctgtaatcctagcactttgggaggccaaggcaggttgatcacctggggtcaggagttcgagaccagcctggccaacatggcaaaaccccgtctctactaaaaatacaaaaattatccgggcatggtggtgcacgcctgtaatcccagctactcaggagactgaggaaggagaatcgcttgaacctgggaggtggaagttgcagtgaacccagattgcgccactgcactccagcctgtgcgacgggagcgagattccatctcaataaaaataaaaaataaaaaaaataaccacatacttttcttttgaggagagggggactgcccttggccccaactactctctcaaagacctcattctctgctttcagtatgtggagaacaacaagaatgctgacaacgattggttccgactggagtccaacaaggaaggaactcggtaggtagaccctcttgggaggtgtggggtgggagtcttatatgagttaggcaatttggtatcctagcgcccactaccaaagctgccctgtcacatgttagctgtctccactcccacagcgccagagttccccagttcccatcctatgagtctcccaggctggtggcctaagccaagatatcatttgagtactggaagaataggcaaattggactgaggtttggtctttgttacaggtggtttggaaaatgctggtatatccatgacctcctgaaatatgagtttgacatcgagtttgacgtgagtgtgatagagtgggaaatatgaaggttagtagaaggggagggattagatgatgggtaacaagctatcctttcttgaagggaccaaagaaaactttaaaaatgggagagaaaagctgaggtttgaggcaagcataagttatatttactcatctccacatccagaatcctggtatggatgtgctccttggggagttttacttaacatttcagtttaaccaagaaatatgtatgtctgattatattagttcctttctatcctgattctgttttattaaggttttataatttctccagattcctatcacatatcctactactgccccagaaattgcagttcctgagctggatggaaagacagcaaagatgtacaggtaggactgaataggagatggcaaagagtcaaagaaagccttaaggaagaacttcgtggcgggagggagagcatcaggaagaatagctaatggatgcttggcttgatgtctgggtgatgggatgatctatgtgtaaatcaccatggcacgtttacctatgtaacaaacctatacatcctgcatgtgtacctctgaacttaaaagatgtaaggaaaaaaaaaaaaaggaagaactttggaggcagagattttcccagggtctgctggcctagtggggtgccaggccctcctttgctgagcctaagcaaagtacttagctgaacttgttctcaattctgatcactagtagtcttcctatgcccccaagaggctgctgtgctttatggtaaactttgcatgtcaacaccttcttcatgtccctctcataggggtggcaaaatatgcctgacggatcatttcaaacctttgtgggccaggaatgtgcccaaatttggactagctcatctcatggctctgggggtaagttttgtgtatttggcataaaaggagaaagagggacttaggccctgagcagtacaagaaaagcagctaagaataaaaggaataacagtgatgtcccttaagcatgttcccccagaatctgtctccaggaaggagcttctaatggaacaagaagcattgactggtagtaatctcacaggattttccttgtattgcagctgggtccatggctggcagtggaaatccctgatctgattcagaagggcgtcatccaacacaaagagaaatgcaaccaatgaagaatcaagccactgaggcagggcagagggacctttgataggctacgatactattttcctgtgcatcacacttaactcatctaactgcttccccggacaccctccacctctagttgttactaagtagctgcagtaggcattgctggggaagaaacaaacacacaccaaacagtactgctacttagtttctaaggctgcacagggaagggaaagactgggctttggacaatctagaggtaatttatatccgcccccaggtggagcaacatgcgattctggaggcacgggggtaactgaaagtgagtacatatagtctttctggtttctggagataacccatcaataaaagctgcttcctctggtagcctgtggttctcattgggagctgttaacagagggcaagtgggctgaaacctgaggcacatgaacagctacgccgggttgggttgggaaagagtcggaaataggggatgctctggtcaggagtgggaatgaaatgttgactgttccccctgctgctcagatctacctttgtcctttagtggtgagccatgctttgccctaccgtgttagcctgcaagaagtggttttgccggaccagcacttcccgccctccagggatcttcccagccctctgtgaagtgctagatgcttctccactggtctgcgggctggacccaggcctgcagtttgccatacttgcgcccctgctgtttgggaaggatctgtgctgtaagcctcgcggccatactacgactgtcagatctccatccctatgggctataggatggggcgacggcaccctatacctcagggacttgctttggagtcatggattaaagacctctctgggcagcgttgagaaccagcgaccctaaacttggctgcgtttccatggtgtcgatcgcggagccgtgggggcgggctcacgcaagcgccaagggaccggtgggaggagttcgggtgtggatgcgcaggcgctttgagagacggtgaagccggtggccggtggccgggcgggaccaacaaagatggcggcggcccctgcggcgggagcgatctgggcaacggctgcggctaaagctgcagccgggcccacgggggggctgcacgggggtagtagggggtggccctgaactggggcctggccctggctggcctctcccgccgcctcactgggggacaggtacgggccggggcgttatggcatggcggggtgtgggggggcgcagagggaagactgctccagacccgagaggacactctccacaaaggcgcgtggggcccggcggggcctgggagaactgggctggagggacagcatccctggaccgcggggaatacgccgccggattccgtagccaatcagcggtctcggcctttctgccctcgaggggggcggacccggctaaagccctgctgtggtgggagaagtgcagagattaagggtcaaggagttgttcgtcctcyatccccgactactgctttctgaacctcgacaccatgtcggaggtcggaggtgggggagggaatggatcgtaagtcacccatatagtctgcttcatttgcagcccagagaggcagggattcgaggatggagggctgtcttttgggctgttattcttgcatctacactaccatttggctagggtcttaagtgacccgaggcacatcctactttactagccgggtatggggtcccatgttacgttagagccgagataggagttatcactggcttttcagtaaagatgtgttctgcagggaggggtcgggagtatagaaagggtcaaagccatgggctgcttatctttcattcatttgtttacccaatagatactaagtatttactttgtaccaaacacgatgccaggtactggggatacgatggctgattcgatagatctggttcctgccctcagtgcgtatactgctccccactttcgttgatgtggtagtggtgatgactgagccaaccacctaatgtggaaatgagaggacagcaagattgtgggtatggaatggggcaaagcaataagggaaaattagtgtggcagggttcagtacagcagcctgggttcccatttccccccatattcaaatgctgacactctcttctcctcccaggtccagcctgtggtgtccacaatgccccaggcctctgagcaccgcctgggccgtacccgagagccacctgttaatatccagccccgagtgggatccaagctaccatttgcccccagggcccgcagcaaggagcgcagaaacccagcctctgggccaaaccccatgttacgacctctgcctccccggccaggtctgcctgatgaacggctcaagaaactggagctgggacggggacggacctcaggccctcgtcccagaggcccccttcgagcagatcatggggttcccctgyctggctcaccacccccaacagtggctttgcctctcccatctcggaccaacttagcccgttccaagtctgtgagcagtggggacttgcgtccaatggggattgccttgggagggcaccrtggcaccggagagcttggggctgcactgagccgcttggccctccggcctgagccacccactttgagacgtagcacttctctccgccgcctagggggctttcctggaccccctaccctgttcagcatacggacagagccccctgcttcccatggctccttccacatgatatccgcccggtcctctgagcctttctactctgatgacaagatggtgaggacttgccacacacatggccttcatgcccatgttcctctgtgctttcctgccatcctctgccttttctgtcccccatttccctgaagttcctttctcagcccttcattacagcagtttggacatgcctctcccttgcttaaatacccttgagcctcctagacccttttttgggttgttggtgactcttcagcatggtgtgccatttcggtccccaggggattaccccaactatttagaattcttctttgggtccccaggcccttcctttcccttgcttgcaccttctctactgggactctgcctaggcctaattaatctctggagctaaagagaggcaggcacagaacatcttagcaaacgtggttgcacattttctgagctaagtaagctaggctgattgcaattggagccagcaggagaagggcaagaaggggccacgggggcaggagggggttttgggggcagaaaggtgggagtggtgagcagctgggcaaccatgccggtgctgggggagttgccccaggagctgcaacgtcarctagctgagcagaggagtaagtgggcaacaggtgggacagccatggctgagtcygtggtacattcagctgtgatgggcttactgctcatgaccagtgaggtagggagactagaatacctagtgaggggaatagggtagagtttggggatgaaacatgcatgggatgggggaggcagtgggcagcatgctgttgaaaggttaaagtgccaggtaggatatataggaacttgccgattgtactctgaccttccaggctcatcacacactccttctgggctctggtcatgttggccttcgaaacctgggaaacacggtgagagctattctcctatctttcctctctaaaaggaatgtgaaatggtgctgggggtggggaaaacccacgagcttggggaaggcatgtggaaggagagctctgaagctcttctaaggcttcctgggcagtggtctggagagataacagcagtgtccctactgctccccagtgcttcctgaatgctgtgctgcagtgtctgagcagcactcgacctcttcgggacttctgtctgagaagggacttccggcaagaggtgcctggaggaggccgagcccaagagctcactgaaggtggggcaacaactcctgctccctctgttcaagtccctttttccccaaccacttgcaggtccatctgccactggtggtggcccccaacccttaaatctggcagttgtatctacttttcccagtgcctactttcctaaaggttattttctaccctctgagccaccttttgcttgcctcttccagacattaacctttgtttgccttccccactcccatcccaacagcctttgcagatgtgattggtgccctctggcaccctgactcctgcgaagctgtgaatcctactcgattccgagctgtcttccagaaatatgttccctccttctctggatacaggtgggagagctggaggctatgggatttctctctggccatgtctgggggtagggccaagcaagggccctggcagcattgttctgagccttgagatgttcttcatccaggaagtggggaccaatatctgggcagggaatagtgtctgtggactaggagaggagtcagttgcccatactctttgtctggctgtagccagcaggatgcccaagagttcctgaagctcctcatggagcggctacaccttgaaatcaaccgccgagrccgccgggctccaccgatacttgccaatggtccagttccctctmcaccccgccgaggaggggctctgctagaagaacctgagttaaggtaagggtcgttccctctacctcctttccccgtagtttatcagcatcattcacacttcatagaactaaactagtaaagattgaagatgtagggtccagggaaaccctttagtatagaaaatagtatgagaagcaacatagaagtagaaggaaggaaggaagagggggagtctaagggagcagatggaggcagaagatcatgctagggatgtcaccaaattgaagaaggggataattcatttacaggtagaggaagacagcatattcttcccttatgtacattcctttcttttcctctcacctcggatttccctagaaagttcattgaggcattattcttttgacttttccttgaaatttagggaaggagcaggggtgtggatggggagtagggctctgtaggttgtttcagtgggtgttgggggtgcccagtgttcctgctgtctcatgggtgctccccacttcctttgatctgtggtagtgatgatgaccgagccaacctaatgtggaaacgttacctggagcgagaggacagcaagattgtgggtatggaatggggcaaagcaatgagggaaaattagtgtgtgaggggggtacaggcttggggggaaaaatcgatactatcaaggggtatgggaacaagactggatgatgcaaatgtgaagctgtgtgaagagttgattaggagtgttggtagtgggaaaggaagggtcaagcaaaggggcaggaagagatggaaatccaagaaatcatctcataacatccaacaatgaccttttctcctgtccctgtgcttctgtctagacctgtttgtgggccagttgaaaagttgtctcaagtgccaggcctgtgggtatcgctccacgaccttcgaggttttttgtgacctgtccctgcccatccccaaggtgggattccagaggattccggggtggacaggacaggggctctgtgacccaagcctacccacccccagagtgtgggcgggaaccctgtgggtttctggagcagaactgaagcctggattgattgagaagagttggaaaaggaaattcagaacatgttgacctttcttccccttttcccccagaaaggatttgctgggggcaaggtgtctctgcgggattgtttcaaccttttcactaaggaagaagagctagagtcggagaatgccccagtatgtggaggttcacargggatacagtaagggtgggagacctggggggactccatgtggataaaagggattgcatgatgtcttcatatggggaataatatttatgtatctgggtttgtgttggagtctcagatctgttctagtactcctagagcaaaggggagaagccaagaggatccagctgtaatgaagagcatactaaatttgtatgtggatcggggtgtcagaaaagccaattgaggttaggagcatattaacctaacactgtttgccatttattcaggtgtgtgaccgatgtcggcagaaaactcgaagtaccaaaaagttgacagtacaaagattccctcgaatcctcgtgctccatatcctaatcttcagattcttacttctcttaggatacctcccatacattctctttcctccatgtttccagagaattgaattttccttaggaaaagtctgccacccacttttccacaagatgctcccagtgtgtcgggagtggggagaggacagctttcaggatagaagaagttcccctcagaggcccactgcctcccaaatgctccttaaccagggcttagatctgaatcgattttctgcctcccgaggctccatcaaaaaaagttcagtaggtgtagactttccactgcagcgactgagcctaggggactttgccagtgacaaagccggtgagtctggtggggaaagtcctaaggagccaaaggagtgggggcacagctctgattatagaacttgatcatctccaaccccgcaggaagtcctgtataccagctgtatgccctttgcaaccactcaggcagcgtccactatggccactacacagccctgtgccggtgccagactggttggcatgtctacaatgactctcggtgagaatagcctcctatttacatcctgccccattcccactcagccctgacaccctccccttctatgaagctccaggagagcagagtgccaggtgaaaggagaggtggaggtcttgcctgatcatttcctggatgctctgaggttcggtcttgtagggagaagggagtaaacaggaatgaccacaaccctttcccgatctccttttttcctagtgtctcccctgtcagtgaaaaccaggtggcatccagcgagggctacgtgctgttctaccaaytgatgcaggagccaccccggtgcctgtgacacctytaagctctggcacctgtgaagccctttaaacacccttaagccccaggctccccgtttacctcagagacgtctatttttgtgtctttttaatcggggaggggggarggggtggttgtagctccattattttttttattaaaaaatacccttccacctggaggctcccttgtctcccagycccatgtacaaagctcaccaagcccctgcccatgtacagcccccagaccctctgcaatatcactttttgtgaataaatttattaagaaaaaatgatgtgcttatttgtatttttgcttagggggtgatagagaactgggccaaattggagtcttcttgggacccaagttccctctctaacaggtgggggcgctctcagagccgagggggaaggtttcggggatggtgctggacccggacctgtgtcccccagcagtgaaggttatgtactgggaggaaaagaggaaaggcatacttgagtgaggctgcgtgcaggctctggggcgactggtttggtcggcgatgggggagtgccactgttgacaaacactgggtacgttgccgggcggccctagctcccgtaggcccggtctgttgctaacatcaaggagctgtttatggagccgcctccccgtggactggccttaagtgtccctatctattctccctacgaccaaagctcctgcggccttccctctagggttgtcaccctagctggacctggtaagcttgtgctggggaacgctaactccagcattaagcgctcgccgcctcggtcctgaggagggcagtgacgggtacggccgctcactcccagctcggcgctaacacggttaacctccagctcttacagctgccgtcgctccgcctctgccagttcaatgttttattggtgaacgtgatccggggccttccaagtcccgccaatccagatgtaggagaggtagggttaggcgcgtgccgcgagaacagagtggacggagagtaggagagaccgaaaaggctgggggtgggagtagcggatttgaagcacttgttggcctacagaggtgtggcaagcagagcacctcagaactcaggcgtactgcccgccgcccgagccctgcgagggccgatagcgagggtgtggcccttatctgcacccagcagagcgccggcggggtacggtcttaggacctcgatctccttctccctcattttctctcatccctacctattgtgggtgagtcctggcccctggacggggacctcgctgttccaccagcccatccgtgcacacttagtttcccctaaagcagtgagtggccgggatagaactcaaaaccggcggggcttctggagcgcaggttgtccccggtctgcctgtccatatcgccccctttcccccaggtttccgcatgggccggaccgtggtcgtgctgggcggaggcatcagcggcttggccgccagttaccacctgagccgggccccctgcccccctaaggtgagtgctccacttgtgccagagggagcttcatttaatgctcttcccatttccatcaaaagctagatggatcctggccctctgaatatgcctcttcccctcccctcctgacctctcgccggcggctacaggcggtgctgcagtgtctctccctcttgtcgccaggtggtcctagtggagagcagtgagcgtctgggaggctggattcgctccgttcgaggccctaatggtgctatctttgagcttggacctcggggaattaggccagcgggagccctaggggcccggaccttgctcctggtgagaggcttgtgggatgtctaggagaggttgtggagggggcttccattggggaatagagtttaggggaggaagtatgtttggtgggtcagatcttcccttagtttctcctcttctgagggcatgtggagagcaggtttctgagcttggcttggattcagaagtgctgcctgtccggggagaccacccagctgcccagaacaggttcctctacgtgggcggtgccctgcatgccctacccactggcctcaggtaacaccagcacctccgctccttttactgtgccctcatcctcatatgccttccatttctttcttcttttctttttttttttttttttttttttttttgagacggagtatcgctctcgcccaggatggagtgcaatggcgcgatcttggctcactgcaacttccgcctttcgggttcaagcgattctcctgcctcagcctcccgagtagctgggactacaggtgcctaccaccacgtctggctagtttttgtatttttagtagagatggggtttcaccatattggccaggctggtcttgaactcctgaccttgtgatccgcccgcctcggcctgccaaagtgctgggattacaggcgtgagccaccacgcccgacctgccttccatttcttcatctccctgtcagccttcccagcaaaaggaagccaaatgagtggaaatgaccccagcgcctggagctggggaggtatgtcaggagcttccccctcactatgcctttctccatgcagggggctactccgcccttcaccccccttctccaaacctctgttttgggctgggctgagggagctgaccaagccccggggcaaagagcctgatgagactgtgcacagttttgcccagcgccgccttggacctgaggtgacacttgcccagaggccccaaacctcttccctcctaaaccagctgcagagctccctgttcaaatctaccacctaggggctcttctgtatcatttggggatgccctcttctcttcataccccaccccctcataattcccaaaactcattattgggagtgaaggccttcatttccatccgtcacagtgggaatgtcccccaacccaaaccctatcccaccctcattccctaccaaataggggctgtggaaatcagtcagtgtagattattttttcgctccttagtcctagtctcacccttaaggtggcgtctctagccatggacagtctctgccgtggagtgtttgcaggcaacagccgtgagctcagcatcaggtcctgctttcccagtctcttccaagctgagcaaacccatcgttccatattactgggcctgctgctgggggcaggtgaggggggattgattcagagggtgaaaatattaagtactgccaaagtgagggagtggggacaaggggtgctattcaatgattctttttttcttttttgagacggagtcttgctctgctgcctaggctggagtgcagtggtgcaatctcagatcggctcgctgcaacctccgcctcccagattcaagcaattctcctgcctcagcctcttaagtagctgggattacaaacatgtgccaccactcccagctaatctttgtatttttttgtagagatgcagtttcactatgttggccaggctggtctcaaactcctgacctcaagtgatccacccgcctcggcctcctaaagtgctgggattacaggtgtgagccactgcatccagcctcaatgattcttctttgcttcctctgcagggcggaccccacagccagactcagcactcattcgccaggccttggctgagcgctggagccagtggtcacttcgtggaggtctagagatgttgcctcaggcccttgaaacccacctgactagtaggggggtcagtgttctcagaggccagccggtctgtgggctcagcctccaggcagaagggcgctggaaggtaggggaacccctggagtgtaatgaacctgtcagtgtttccatctttatccaagtggcttaactaggccagggccgataggactggagttcctcattgtttttgtgccttagaagctacttagacatgggctaccccagaatcctaggccctatttgtgaaccttcctcaaagagcctatgcaagtctgtggatagaagtagtacttataagtggcttagagataggggaaagaacccagcttcactgaacatttcagaacagccacactggcctgtctggtccacttcctggagtacacagaggaatgattttttgtgaagtctacatagtcacccaatctcttcatcctgggtcagtacacagtctccccggccacatgggtgcctgggaaactgagagtgaggcaccagaagtctcttttcactcatcaaattctcattttctgggtctctcaaatgttttcatgctctcaggtatctctaagggacagcagtctggaggctgaccacgttattagtgccattccagcttcaggtaatggaatagccaccttccccttccccaacccctaccagtgagaagcaaaagctataccttcctgggtcagcaggaccacaccatgcccctgaactggtcatctctatgggagtctaatcccaaagaggactgacaactgtaatgggaatgccttctgagtcaggcctctgcctgatctctagtgctcagtgagctgctccctgctgaggctgcccctctggctcgtgccctgagtgccatcactgcagtgtctgtagctgtggtgaatctgcagtaccaaggagcccatctgcctgtccaggtatgataaagggacggagaggctgggcatggtggctcacacctgtaatcccagcattttgggaggccgaggtgggcagataacaaggtcaggagttcgagaccagcctggccaacatggtgaaaccccatctctacgaaaaatacaaaaattagccaggtgtggtggcttgcacctgtaatctcagctactcgggaggctaaggcaggagaatcgcttgaacccaggaggtggaggttgcagtgagctgagatctcgccattacactccagcctgggtgacagagtgagactctgtcccccccacccccccaaaaaaatgggaaggagagacagcctcagctagagccctttccttctgacgcatgaatgtccttctctccagggatttggacatttggtgccatcttcagaagatccaggagtcctgggaatcgtgtatgactcagttgctttccctgagcaggacgggagcccccctggcctcagagtgactgtgaggaggaggaaactttgcctagtggcatttccagagggctcctctgtgctccattgtaggcaaggccagactgatcagtgctatattccctccttaggtgatgctgggaggttcctggttacagacactggaggctagtggctgtgtcttatctcaggagctgtttcaacagcgggcccaggaagcagctgctacacaattaggactgaaggagatgccgagccactgcttggtccatctacacaaggtaagttgggataaacttccctcagctctccactgaaggccttgaagacagagactggaacatttgtcactgtatgtcagccaaggcctaggacatcaataataaacttttccctgcatcctctcctctcttctcagaactgcattccccagtatacactaggtcactggcaaaaactaggtaagttgggaaaacagctgggctgaggagggccaaggacatcagacccccagctaaaacattcctttcatcctttccttccagagtcagctaggcaattcctgactgctcacaggttgcccctgactctggctggagcctcctatgagggagttgctgttaatgactgtatagagagtgggcgccaggcagcagtcagtgtcctgggcacagaacctaacagctgatccccaactctcattcatgaaaataaaaattgctggagcttggcttggtctggctgttctatcacctataggcataagaatgcggggcagcaaagaggcaaagtgtgcctgggatgcagaaagcaggagcagatgcgagacaaagtcctttattagaaaatatatcaaaatcccagccccctgagccaggaccagaagagggagctattccagcataggcagaaaatgcccagggaggggcttccttcaccaaacaacttcccgggaaccataaatagaataaatattcacagaggtccgaggagaagccagatcactcttctctccatggaagagggaggggcttggggtccagccctgctcctactctaggggcagggactcctaggaatcgtcacataaaatcatgacatcaaggattcacagtcataagccctacaggagaccctagagagagggacccctcaggtctacaggagcccagctccagtccagcagtgagggagaggcccctaccccctagcacggcaccagagttcagttcc

SEQ ID NO: 96488 - DNA, 13900 bp, Homo sapiens
catcaacactaaaaatcactgatctaagaatcaagagaaatgagtctggatccagctgggcccatttccagctgtgtgatgcaggtaggtcaaacaccagtgcacaaagcacaaaaccctgtgggggacacaaaaatgaggattcaccctgccctcaggagctgtcaggtagatggaagaaggctaggattctgcaagtcagaaacagtgctgtgagcatttcattgagagcaggatgacagccacatttaggaagccagaaaaggcttcactgaagaggtagtgtgtgatggactttgaaaaatttcaacaggtagacaagattgagcagaagacaccagggagggtagggacagtaaagaaaaagtactgggcatattcagaaagtaaaaatagctttttggtgcataaggtacacgtaagaggaagaatgggagggaaaagggtggctgcatgtttgggcaaggggtttatactcagttttaaaagcaataggtaatgaggaacaaaattaaggagatttcctggttgtcgcgtttgttttgtttgcatgataggaagacccaaagatttttgtaggcaaatagaaactatctggatgaccagaaataactgagcacataaatccaaattgagacacaatcctggcaggaaaagggaggagtggaattgtaggtaccagtggaagggttagccctggcaaggtggggagacaagagatacaccctccccagagattggaggggaagggaaggtgaacatggaagagaaattttgaggtagaggaagaagatataagagcactcacaccagaggccctcaattctatcgagaaaatatggcacctgcaagggtaaagagggtgtgggggtggcaaatggggttggagaattagaaaaatagagaaggtcagccaggcacggtggctcacgcctgtaatcccagcactttggaaggccgaggtggacagatcacctgaggtcaggagttcgagaccagcctggtcaacatggcgaaatcccatctctactaaaatacaaaaattagccaggcatggtggcatgcacctgtaatcccagctactcaggaggctgaggcaggagaatcgctggaacctgggggacaagattgtaccactgcactccagcctgggtgacacagaaaggctccatctcaaaaaaaaaaaaaaaaaaaaaaagaatattgtggagaatgcaataggacatcaaaaagattagtaagaggaatatcaagcagtagccaaggtaaaatggcacccaatttacaagtcattccagctctattacctcatttataaaatgaaaacatgggaccagtatgaaacacatacaaaagctgaattagtaacgggcttaggaaaatccaccctcaccttcatgcagcagccttctcttgacactgcagcctttttaggcacctctgtaataccttgagatttctctaaagcttgactggacattcctaaactaggcaatcttgaaggtgccttcagctctaatatgcgatgagtctcctgagtctttctagagacattcctttccctccttccccaacacacacaggacacacacacacacacacacacacaaaaggttagagatgtctttgcactcaaggtaggtggcccatttaaaacctgtaaaatcaaaaaccctgccctggcaatggctgtgcttgctagaaagtgttcagaagggaattcttactgccttagggtggaagggaccataatgcaaaagtagaaaggcaaattgcagagatccaataaaacacatgtggtgacagtttccatttccagatggggagaggccccagagaatatagacatcataaattactgcattttggccaggcgcggtggctcatgcctgtaatcccagctcttagggtggcagaggcaggaggatagcttgagcccaggagttcaagacctgcctgggcaatataacaagaccccgttccgttctccataaaaaggaaaaaaaagacaaaaataaataaataaattaccgcatttcattggatactcacaatgtcatgactctggcctctcccagctaccacagttttaaggaaaagagagataaggcaggagttacaatgaaaaagaaagaacatcatacactggggaaggagagagggtggaaaccattaaaaagaaaaatgctacagggataaagaaccacttctgacccaagtagaggctggacatgtgtgtgaaacacttctcagactcttgagagggaggggaggcttaggaaagtaaaactgtaggttgactatcgccattaaaaagtgatacttgaaacaaaatttgaggaattatcatcaaatattactttcagagaattttagtataggaagagaccttggagaattagaaaaatagagaaggtcagccaggcacagtggctcacgcctgtaatcccagcactttggaaggccgaggtggacagatcacctgaggtcaggagttcgagaccagcctggtcaacatgacgaaaccccatctctactaaaaatatgaaaattagccaggcatggtggcgtgcgcctgtaatcccagctacccagtcttcaggtaaaagcacacagacatcatctagaggtgactaacagtactgtggggtaaaaatacactgtgcttcatccttcacctccctgtaacatttgctggggcccagtaaccctccctagaatgatattttcctcatgtgcatccagttcttttcctcggcacatgcacgctttcatttattcaacaaacattgattgaaaccctactatgtgccttacataccacattttttacattcagtgagggcaatgatgaagtgtaaaaatacttcacacttttaaatcacaagaatagttcctcaactatttcttctttaggtttggtaaatctgattcctgtaacctttcattaaaagccttatttctaaaacgtctattcgtatattcaataaacatttttaattactatcatcctagtggggtacccctgacaggcccctatcctcatggagcttgcattcttggaggttccccaaatttcctctgaggtttccacagctctcctgcgatatagacccagaaactggaccctgtcctccagtgagagtctgactctcacactaggcagaaggggcaacaaagtaaaatgggtgccagctgttttaaggaaattaaaagaaggaagaaattaacattcttggagaacaggagacgtgaatgttgtgcatatagagagaaggtctctatttaggggtgaattttattatcactttatatccgtttttaaaatgagaaagaaaagaactgacctgacaaaattttcttcccattgcctacactcctgcctgaaggatacaagcttaagaaagtaaatttccatggtagctgtgaaagaataatacaaataatgattaatattattgacagcctagaggcattgttccattagtaccattagcatgatacgattgcttcattgttccattagcatgatagctatcactccaatttctcctaggggctatgtaatattgcggttccagcatatagatatggaaactgagagaagttaagaaaattcccagatcagccagctaaaaatgtagagcttgagtatgaacctaggcagtctgacattgaggcctattctgttaagaactacattgcatgcatttctggagtctgtttcacagctcaagaatcaggcaaatcctgggctgcgtctcaaagagtcccagcaagtgtcccagtggtgatggtgacctcccaactgtgctgcaggaccaaagtggaccagaaggacagaaacacctctgctcatgctcttagtctcttccctctttccatggttcaaccctcctctccttttttctctactcactcatttttctcttcatgaaaacaaaaatcttctcctaagtcgccccatccatttttagagggcacgtgcttccacactcggagttcaaggcaactggtggaccccccaccaggtacaattcccagagtgtctgcagcacgggtgggagggtgcagtgtgggtattgaaggctggcagggcctgggaatcactggggcagattgcacagtgaggcgaacactggaggtgaggggccaggtcccaccaataccattcagaaggggcagggactcatactccctgtatatatgctaaatactccagaccttttctatttccaggagaaacaatcaatagaaggaaagagagacaagagtaagtattggtcttagattttatcctaagggctaagtttcctctgtaagctacagtttctcatatgttaacatctgtgatacattatttcacaacaggcttcagtgtttcctggaagcgcttcatctttctgccttgaaaattatcttcctacgttttgagaaacagaagggttatttttccctctatttttgttagttcattggccttaagttctcataaaataaatggttccctggcttatccagttccaatgaattgctgatatttaaatatgccattacaaaatgctttaaaatttttaatttgtgtgtgtgtatatatatatacacacacacacacacatttatatatatattaaatttatatttatatatagagagaaaaattatattttgggtatattgagttaaataaaatatactcttaaaattaatttcacttgtttctttttacttttttaatggggccactggtaaattcaaaagtgtttatgtggcatctatacatcctattgggcatcctaaagcactctcactcaaaatatggtccatgggccagcagcgtctgcataggagcttcttataaatgcacaatctcggacaggggcagtggctcacgcctgtaatctcagcaatttgggaggccgagaagggcggatcacgaggtcaggagatggagaccatcctggctaacatggtgaaaccccgtctctactaaaaatacaaaaaataaaataaaattagcagggcgtggtggccggcgcctgtagtcccaactactcgggaggccgaggcaggagaaagtcgtgaacccaggaggcggagcttgcagtgagccaagatcgggtgacttcactccttcctgggcgacagagcgagactccatctcaaaaaaaaacaaaaacaaaagaaatgcacaatctcaggctcaccctgacttacagagtcagcatccacatgtttgttagactacccaggcaattcctaacaaaattaaaaggcgctgagctacagagctgtgcttctcaaacagtgaagaacaatcaagtttttttccaattaattgtagactgttgtcaaatataataaaaaagaatccggccgggcgaggtggctcatgcttgtaatcccagcactttgggaggccaaggcaggcggatcatgaggtcaggagattgagaccatcctggctaacacggtgaaaccccgtctctactaaaaatacaaaaaaattagccaagcgtggtggcgggtgcctgtagtcccagctactcgggaggctgaggcaggagaatggcatgaacccgggaggcagagcttgcagtgagcagagattaagccactgcacgctagcctgggcgacagagcgaggctccgtctcaaaaaaagaaaaataaaaaagaaaaagaaaaaaaaaaagaatgcttagaaaaatgaaaatgacacaaacaaaaaatacaaaatgtaaatttgaaatttatagagtcagaaattataaaattaatttcagtaagtgtcattaaacaacatagatataaaggaaaacaattacaaaaaatgaacacattgttctttgaaagtgggtacataggcaattgacacagagagtcatcattacctttgtaactttttgccacacaaatattttgtatgaaattgcagttctccatgttaaacactcgtagacacattttaaatacacattttttatattactatttaaggtttttaatatgacaattaatcttgcttcctggttgtcaatttacctaatctggtttgaatggatggcaatgctctttgcaggggataatgtgtatctaaactatttctaaacattgcttaacagcagtcaaagtagagaaaggaggctcacagaggtatgttgattgaaatgaggaagagatttttaaaccagtctcagcaagttcagtgtatwttttttaactgctatccaaaatgaagctgatagtgctacatttttttaatgtatcttcagtcttttatccgtagccagttcaaataacttatactgtaagattaaatataaataatctttcaatgaaagaaaatgattccagattttatgcacttttggataacagttttcaaaataaccttaaaacatcgcacatgataatacagtcctatggcatatgactagtacacaactcaaactcatcacacaagttagacaaaaacaagactgatttatatcctgttcaacaaaatggtgtccacatgcttacatattgagcaatgtcaaattattgctataaaagtttctaaatgcttactcttgatttctgtatttatcctgtaacagactagtaacaaaccattcatatcagtattgctctgcagactatgtttgaataacactgcattagatattccagctgaataaaatatcaagatttaaatagtcatctttcgcaagcattttagctgagtctgtgtgacaggtgggccacagacaagcaggttgtaatcaactcttatcagtcaatgagataaataacattaatttaaaccacagagatatgtttataattttgttatctgtgattgctgtgtatttcagacagatacrggaatctatatatgatatcaattcacatcctttgcagaaacagagaaagccctctccatatgtgagatttatgttcatgtttctacttgttcacataaattaaataatttttatttcacaggaaaaatgaactatacatatgcaagatggtaaataatgttaaaatacaagaaccttgccactgaaattagaataatcctccatactactccccaaaagacagaggcaatgtatattaaagacattactaaaactgtttatcattcaactttgcagtagtcttatgagatattggtatttgctagttatttgagtaaaaactgagggtgggaaatttgttagtgctttgccacacacagttgtccaatctggaaacctttgactgcttcctctctcaacccctaaatctaattggttttgcaatcctatgtgttctaccttaccgccatctcacaaatctcacccttctgggttccagctrtcattgcctctgctcatgccctcattagcaatcaagtggatttgtgtattaggctcctggctagcgcccccttccttccttcccagctccctctaattcaccttttgtagaacgagagttatctttccaaaatttagaagtgatatgaatcacttctatatttagaacgttcagtagattggcataaccttcctgtaaaatccaaattccttaactttggatacaagatccttcatactctgaaccatcttctccataatcatttccagaataccccataaaaccaaattacctagcaattgtccatcattcaaataaatactacttcctgattctcatgtatttctatattctcctgtgcttggcaatgatactgtgtgcatctggaccggtgagttcttcccaggcttatttatgagcatgcaatgaatgttcatgtgtgtgcactgtttgtacaggaacatgttgaagaaggcagagccagtctctacaagtctgtggtttccaacagctgcaaggagatgtcttgttactcagactttccattcccagaagattatccaaactatgtgccaaattctcaattcctggaatatctcaaaatgtatgcaaaccactttgaccttctgaaacacattcaattcaaggtaagacacaaaacatcagttagtagtcagaaagtatttcctacctattttctcttatctctccagcctagccctgggctctgtagatgagatactaaactggcaatattaatgacacctggctgtatttattttctccctatactcactccccacttcaagtaaatctggaggtgggggaggatactttgtgtaaagattcacaagtataaaattttagtttgcaatacttatatccaagtatcttagggaacctaaaaaatatcaagccacattttcagcttgggccaaatgcctgcccacatggacactgagaaccaccaacccccttccccagtctcctgtttggttttttgtctgtttgtttgtttttgagacagggtctcactttgttgcccaggctggagtgcagtggcatgatcatggctcactgcagcctggacttcctaagctcaggtgattctcccacctcagcctcccaagtagctgggaacacaggtgcacaccaccacacccagctagctttttatattttttagcgatggggtctcaccatgttggccatgcagtctcaaacacctgggctcaagcaatcctcctgccttggcctcccaaagtgctgggattacaggcatgagccactgctcccagctcccactctcttcttgactattcttttataggaatggacacgtgcagtggcccatacacaagagaaccttgctatgtgaaagaaatcttttctagatattcttgagaatagaaaaatctttgaatattgttattctacaatgcccccttcctctcccatttcagaggctggagacaggaggaaggtagtaggacagggacaaatgaataatatatcctttttgtcctttttttttcctttttttctctgtttcctctccaagaaacatatgaaaatctatgtttcccttctcctttctccctcccctgtcagaggtaaggatgatgaggaattcacagagaattatacacagaaaacaacacaaatggagacattgaccaaaacaagtggaaaataaaatttgcattcacattcacgaccttaaaagtcctctgatatggtttggctgtgtcgccatccaaatctcatcttgaatttccacatgttgtgggagggactcagtgggaggtaattgaaccatgggggcaggtctttcccatgctgttctcctgatagtgaataagtctcatgagatctgatggttttataaggcggagcttccctgcacaagctctctctctgcttgctgccatgcacgtaagatgtgatttgctcttctttatcttccaccatgattgtgaggcttccccagccacaaggaactgtgagttctccattaaacctctttcctttgtaaattgccaggtctctggtatgtctttatcagcagcatgaaaatcaatacagtaaattggtaccagtagagtggggagctggtgaaaagatatcaaaaaatgtagaagtgactttggaactgtggaaacgtcagaggttagaacagtttggagggctcagaagaagaaaggaaaatgtaggaaactttggaacttcctagagacttgttgaatggctttgacaaaaatgctgatagtgatatgaacaataaagtccaggctgagatggtctcagatggagaggaggaacttgctgggaactggagcaaaggtgactcttgtttggttttttgttttaaaaaaaacctctgcaattattagtttattagtatcatccgggacttagatgttcagtattcctcctgaaattacataaacaaatgcaaatggaaagaatccaagtcaaaattatataacaaaacagcactccatcacaaaagcgtgtaaaattacaataacactattttaaaatactggcatcttaagaaaacgataatcttgaaaatcacaaaattgccaaattgttccctaaactgctaagcagataatcatgactaatgagtgagtttgttttgtaaagaaaaatcattcaaataaattgaataattcatactgagatgcaaaatttaagtgtcttctttcctcctatttggatttatgagggggcaaaccataatataggaaaatatacgctattttgaatgtggcatctttgttttaaaagctggcccaattaattaaaaatacttttaatggaaagtctcatttcctgagcagtccatatttagataaatgggaaaagacatctatagccagcattttcatagtcttcactgagactaatgtcaacaaaaaatttaatatggcagtcctgcattttaagctcacgcttttggggatacattctcaggtcttctttaatgtgggaactgcaaaatataactgccattacatggtaatgggagttaaagaatagagtcctcatgtaaaaattacaacatacttttctattagtccttcaaggactaatttcaaaatgttggattctagtaatcccatgctttgagtagattgattactcttcagtttgtaaatgtaagtgggctatgtgaaatttcttaactgatcaagattttggatgttcagttatggatgaaaactatctcaacttaactttacccccatatgatatgcagggtgtgtagacaaaagctttttattagctaactatatgaaaggataaacactgtaataattcatgtgattcaaaatgggcaaaagcaaagactagcttcccctccaaaagaaaaatttcagacctatgaaaaggacaacaatactaataaaaaatttgtatttacttagaagcattcagaatgtaaacaaaacagctgcaacttttttttttttgcaattacagagtggtattcagttaacagaacaacaattatttcctataagctgcatcagagacagctgaagatgaaaaaactaccatccccatatataactaatttgtgctgtgcaccaacaagaacatgctttaaatttccatgccaatttacaacccgcatactgcaccaggcaaggttagtggctattgaaaacaccaccaggagagggctatctaaagacacattcggtagtgtgttaactttataaaaaaagacactgtacagtttaaaaacaaatcctacacagacttacatttccatttttttctttaaaaggagtgacttgtgaacagtagggttaaatgctttatagacgagaaaaaaaaccgctagaaccaacttattcatcatcttcttcatcttcatcttcttcatctacctcctcatcataatcttcttcatcttcctcatcttcctcctcttccttctttttcttgcttttttcagccttgataaatcccttttttgctgcatcaggcttccctttagctcaatatgcagcaatatcctttttgtatttttcctttagctttgcagccttcttttcacaaggctgcttgtcttctgcagcagtgttattccacatctctcccagtttcttcacgacatcactaatgggcaggccaagttgttctcctttaatttttgggtgatactcagagcagaacaggaaaaaggctgaaggaggcctcttgggtgcattgggatccttgaacttcttttttgtctcccctttgggagggatttaggttttcacttctctttcataatgggccttgtcacctttgccatatcttcaaattgtcctttctctttagcagacatggtcttccacctctctgagcctttcttagaaaactctgagaagttgactgaagcatctgggtgctgcttcttatgctcttcccgacaagtttgcacaaaaaatgcatatgatgacattttgcctcttggcttcttagaatctcctttgccaatgtttagttatttttccccagtgaggcacagagttgcccagtgcccatctggctctcacttgccccagtgctgtctctatggagctcaatgtactgcctcttcttatgttctagcaatgagactggagatttatggaactttgaacttgagagatgatttagggtatctggcagaagaaatttctaagcagcaaagcaataaagaggtgacttgggtgctgttaaaggcattcagttttaaaagggaatcagcataaaagttcagaaaatctgcagcctgacaatgcaatagaaaagaaaatcttattttctggagaagaaatccaagccaactgcagaaatttgcataaataacaaggagccaaatgttaattcccaaaacaatggggaaaatgtctccagggcatgtcagaggtgttcaccacagcccttcccatcacaggcctggaggcctaggaagaaaaagtggtttcatgggccaggcccagagcccccatgctgtgtgcagccaagggacttggtgccctgcatcccagctgctccagctgtggctaaaaggggccaacatagagctcaggcagtggctttagagggtgcaaaccccaagacctggcagcctccacattgtattgagcctgcaatacacagaagtcaagaattgaggtttgggaaccttcacctagatttcacaggatgtatggaaatgcctggatgtgcaggcagaagtttgctgcaggggcagggatctcatggaaaacctctgctagggcagtgcagaagggaaatgtggggtcagagtccccacacagagtctctactggggctctgcctagtggagctgtgagaagagggccaccatccttcagaccccagaatgttagatccactgtcagcttgcatgtgcctggaaaagctgcagacactcaatgccagcctgtgaaagcagccaggagggaagctgtaccctgcaaagccacaggagcagagctgcccaagaccatgggaacccacctcttgcaacagtgtgacctggatgtgagacatggagtcaaaggagttcattttggagctttaagatttgactgccctgctggatttcggacttgcatggggcctgtagcccctttgttttgaccaatttctcccatttggaatggctgtatttacccaatgcctgtacccccactgtttctaggaagtaactaaccaacttttgattttacaggctcataggtggaagggacttgccatgtctcagttgagactttggactgtggacttttgagttaatgctgaaatgagttaagaccttgggggggaactgttgggaaggcataattgcttttgaaatgtgaggacatgagatttgggatgggccaggggtagagtaatatggtttgtctgtgtccccactcaaatgtcatcttgaattctcacatgttgtgagaggggtccagtgggaggtaaccgaatcatgagggtaggtctttcccatgctgttctagtgatagtgaataagtctcacaagatctgatggttttataaggcagaatttccctgcacaagctctctttttgcctgacatcatccatgtaagatatgacttgctcctctttgctcctgccatgattgtgatgcttccccagccacatggaactgtgagttctccattagacctttttcctttgtaaattgcccagtctctagtctgtctttatcagcagtgtgaaaatggactaatacatcctcctaaacagatttccaaagagtattttattccacttccttattttgcaatggacacagtaaaaataaagcattatcataatgaatatatacaacatataaaaatcttctttttaatgcatcaaaatttctgaatttgaagcatttcctttaccacatgctgcccaagaccttttttattttgttgttgttgtttgaaacaaagtttctgtcacccaggctggagtacagtggcaggatcttatctcactgcagcctccacctcctaggctcaagaaatcctcccacttcagcctccccac

SEQ ID NO: 96489 - DNA, 99847 bp, Homo sapiens
aatgatccaatttagaggaaaatactgacatgcaggagagaaaaaagagaatttctggggcaatttccttgggaagcaaaggaggacggaacccagtggagaagctgatagcaatctgatatgtattcattgtaattttaatttcgattttttcctactatgagtgattttggtaatctttcattcatttgacagctatgtgttacttttttttcccatgaactctctgttcaagtccttttctcatttttttaacgttgttttagactcccgtcagcttgaacatttcacgagggcaaggattttgtctatttaactcccagttatatcttcagtgtatagtaccatgcttggcacctggtggacacttgaaaattatttgctaaaactgaataatgtttaggtgctctttatgtattaaggaactaagccctttgtcacagtgctgcaagtacctttcttagtttgtggtttgaaatctgttacaacagattaattcagattttgtagaatttcctgtaagtagaatctttcaatatgtactctttttgcctggcctctttcactcagtatattgattttgagattcagccatgttgtgtgcactagcagtttatttctttttattgttcagtattatttcattgaatggatataccataattagtttatccattcatttgttgataaatatttgggtagttttccagtagtttattacaaataaagctgccatgagtgttgatgtacaaatctttatatggacatatatatatatatatatatatttttttttttttttctcttggttagatacatgagtgcaatggctggatcatatggtgagtgtatgtttaactttctaaagaaaccgccagatctttcagaaattgttgtaccattttacatttcccccatccgcgtatgagagtttcagttctttcatatcctgggcaacacttgataacgaccagttatttaattttagcgatactaacaggtatgtagtagtatctcattgtggttttaatttgtttttctttaattactaatgatgtttagcatcttttcacttgcttattggccattcatttatcttcttttgggaattgtctattcaaactttgtgcccattttcttattgagttgattactttactattgagttaaaatagttctttacatattctggatataagtcctctgtctgatgtatgtgtttggacataatttctcctagtctatggcttctttttcattttcctactgctgtctttcaatgaacaaagcaaaaacttttaattttgatgaagtccagtttaccaattttttcttttatggtttttactttttgtgttctatcacaaatatttttctcctatgttttattccagaaattttatagttttgggttttacatttaggtctatgaaccattttagataatttttgtgtatggtatgaaccgagggtcaattttttttccatgtggatatccagttgttctaccaccatttgttgaaaagactaccatttcctgctgaatttttcttgtacctttattgaaaaccaattgaccatatatgtttaagtctatagtaccctaagtactgtatgataattacaccccttttattgtttgatatctggcagggttatttcactctctttactcttctttgcaagaattttcctgactattcttgtgtttgttttagcattatttttgtattgagatataattcatataacataaaatgtgtcattttaaagtgcatacttcaatggtttttagtatattcactctgttgcacaccatcaccactgtccaattctagaacatgttcatcatctcaaaggaaccctcatagctattgacagtcccaattccccactctccccatcccctggcaactactaacctgctttctatctctatgaatttgtttattctggacattttatataaatggaatcatacactatgtaaccttttgtgcctggcttcttccgcttagcataatgttttcaagggtcatcccagttgcagcatgtaacagtgcttcattctttttgatggctgagtcatatttcattgtttggatacggcgcatttgcttatccattcctagttgtggccattcgaattgtttccagtttagggccactgtgaataatgctgctatgaacattcctttacaagtttttgtgtgagcctaggtttccgattctcttgggtatatatctaggaatagaattgctgggtcacatgatactatgtttaactttttgaggaactgccaaattatttttcacaagggcttcaccatttatataacccacaaaaatgtatgagaattccagtttctccacatccttatcaacacttgtattgtcggttttcttattttagctatcctagtgggtgagaagtggtatctcactgtcgttttgatttgtatttccctaatgactaatgatgttgtacatcttttcatgtgctaattggccatttgtatgtcttctttggagaaatgtctatttacatctttggccaatttttaattgggttatgttttttattgttgagtcataggggttatttatatattctgaatcctagacccttatcagtatatttacaaatgttttctttcattctgtgggttgggttgtcttttcactttcttcgttctttcttttgtctttctttgtcatcatatttcatgatttcttgtgaacaaagtattgtctagaggacaagcattgtaagtattaacatcggaatcagtgaaaacaatcagtatagatcaagtttttaagtgatactttctcagaaatgtatgtgtacaggtcattgaagattatctataagcaattggtcttggaaaagcataatttttgaagaactctcttgccctgtgagagtgatctaatatgaatgaataaaatatatttctgtagttgaactgaaaataggtacatctctgttgttgaattctaataattttattctctttaaaaatttacatagagtacaattaccagtgttcttttgaacgtgctattttctcaaaattcacatagctatcccaataacactcttaaagacttaagcatagtacttttataaagcctcttctttcaatatgtctcctaaagtccccttataaaatgtcttgttttaaaatagccgtctttggaatactttatgatgcagagttttatttatgtatgttggttgtttcaagccacttcacgtaatggtgattcgatgatcaatgtggcaagagtgaatataagacaatgtaagtatggaccactagttatgttgaaactcagaccctctgaggatgcaaaagagaaccagcaagtatgcatccttcaagctgagtaaaagctaaacaaacatacatcggatagaaacaaacaacaataaaatccttatggctttgttgatcactgtggtgtttaattgactctattttaagacttttctacacttagccctctctccctactcaaggtgcagcaaatcacttttttgttaataatgcatgtctggatcttatcttggctgtgtctgtattgcagtcaatggttcaagtcctcaaggccactgccagcaccctggcacatgggggccctctgctgtctttgttgtcctgttgactgctaaagaactcaggctaacaatgttactacccacattcatgagttacttgttgctggttgtcatctgttgcctttcaagtcttttctggaatctaattgttttttgtttgtttgtttgttttgttttgtttttggtctggaacccagaagacatttatctaataaaatattaggtgataatttcctaagaatttcaacagatttaaacattttgtctttaacatgggtgagttaaaatcacttacactatacaaaagttaagcatgtttccatcaccacttttcagataataaaacctctttcatttccgtgtccatggggaactatgcaccctaaggtcctccacacgtgggaggggagaatctgttcaggaactctctgaagtcagtattcatcaagaaatgggtatttgggatgatcacaccacatgagcatttctatgaagcggacattttcactccaggcttcaatgtccttgattcagtgagagaaaagtcaaaggcctgaaggttttccttgatcttttcaggattaaagcttttaggaatgacaaccaccccttgctggatgttgaaacgcaaaataacttgagctgtgatcttattgcacctttttagaagtgcatcctttaacgaaggcagagaagacatatttgtccaggttggattcctagtggtccccaaagggctatatgcaatcatgacaatgtcatgttgttggcgaaatttcaaaagttttggttgggtgtaatatgggtggcactcaacctcgttgctgactggcttgggtttgagtcctgggttgttctggatgagctccagctggcctgctgttaaaactggatactccgagggatttcaccaagccagcatctttacaagcttccgaagtctcccaagtggcacacagatttgacttgtgatataaccatttgccattctcacctatagggtagattttgtcttctggcttagcggccatgggtatttcagtgatgtaaagatccacacaatctagctggaggaccttgagcatcctctctaggctcgggcagaccagctctgggttgtgatttgtagcccacagttttccacagtagaagatatccttcctctgcacctttccttctgctattttccccctgatggcctccccagctgtgtcttcattttggtatatgtaggcttcatcagtgtgtcagcaccccagaccaatgacaaccttcactgatgaagactcagactaaatgtagagacagactacttgggctgtagtgacatctctacctaccacctacttgctgtgtggccttgagtaagtcatcggcccccttaggggtcaatttaggctctgagtaggtaccaagtctgatgatgggaatgctgtttccatcacttagaggtatgcggtgatttgcaggactcactttcttcatagtgtcctttgatgcacaaaaacttttaattgtgatgaagtccaatttatcaattttatgttggattgctgtgactttggattattggctattcttgtacattaatttttttcatatcaattttggaatcagcttaacttgttctaaaactttttgttggtattttcaatgaaatagattgattaattaagagagaatggtggtctccttaaaagagagcttcctatcaaagaagggtatgcctttccatttacccaagtcctttcggcgttcttcagcaatgttttaaagtttgtttcatatagatatattacaatttttagacgaagtttatgtctaggttttaatgttttattattgtaaattactctggtgtttaaatgttgacaactaacacaagtgtttaaaatactatgtgagctacagtatttcacacaatgatccaaattcaggccaagttcagatctgcaacctcagatctactccagctctttgctttatagataaggaagctgaagtctagagatgttgagtgactgactcaacgccacacagcaagtaggtggtaggcagagatgtcactaaagcccaaggaatctgtctctacatttgtcctggactctaatccagggttctgtcattttgccagccaccataaaatatttgacagtctaggaaaacagcaaatgttcttacatccatcgagaacttgtatttgcctagagatggactttaccaatcaagataggaattagataagaattattttttttaaaaaaaggagcattaaaacaatggtcaaatgagagaaaaagcaaaattcagacagacagatacatacacacaccccaaaccctcaaacctccagggcttcctgcctgtgaaccgaaagrgggagtgcgaatttcttggccstgtcggcaggtgctttctcaaaggccccacagtcctccacttcctggggaggtagctgcagaataaaaccagcagagactccttttctcctaaccgtcccggccaccgctgcctcagcctctgcctcccagcctctttctgagggaaaggacaagatgaagtggaaggcgcttttcaccgcggccatcctgcaggcacagttgccgattacaggtagggccgacgtgtcgacggcagggaacttctagaaactctttgtgtatgtgtagggsagtgggtgtgggtagtggagggtggtgaggggctggggtctccttcaaatcctgccctcctcaaatcaatgggcaagtgagcagtgaggggtccggcccggtgctggcatctgctccgtcacagccgagttgggcatcagttcagagccagctgctagaatacacagctcctccaggtacagatttttcgagtgataagagaggaaggaagaaggaagcaagagagcaaccgaggcaggcccagggtagagaaacggagagggagtgtttcacagaagctggacaggatcggaaaatgtcagccaggccaygtttcgtgctgcgacgttctagtcccttcagcttctttcaccctctggctggctccgtcactcagcccctttctttcttcctttgccaacaaagaagattttgttggtcagtcaaggtcatggcctgaaacactccaatgggcccgggagtaagtggggtaaccaaggaggagaggggcacaggcaggaagcaccgggtggcagcctccacagcgccttcgccacctcatggccaagcgtccgtgtctaggctcagccttgtcatggctgtccccacacccacgcctgggactgccgggtgacgcaccatcccaggctccgtgactcaccccagcctgccccttaggcggccatctagcccagccagagggcccggcattgacagaacacggggcagatgagacgatgtgcctggttaagtcaccaccacgagcagcgcccagccaacaagagtgcttgctcctcacctcattcccgatcgtgggagcccagctttgctgcaagcctttagcttccaccatgttttctagcccaggtaatgaggaagaaaaccagtgaaaagaggacaggacaaactgctcagggggatcagcctcgtggcatcttcctgagaagtggggcaggctgaatttcaatctaaagaaacagggaaggtgaagcaagcaaatgtcctcggcccacctgatcgctcctggyarctcacctgggtgtgggaatttgtttaggggccctgttgggagggcaggagaggccaygggcacttctgctcccaccagggagccaggcacagcccgggccagcgcctcgggggattctgaggcccgtgcagctgcaggggtttctgtcaggtcacagctgttttctcagaaaagccttgtggggtctaagtcacacacacagtgtggcagagtgagggtgcctgagcttgctcagagcagcccatccttgygtgctggggacaaggggacccagaacgctggaatttagtgacttcaggggagacagccaggggcaatagctccagcctctgagcttcaggcttgagacaccacaccagggagctcatataacctttcagggtctttacctgcagtttcctcactggtccatttgtgttcggcttggagagaccaaggtaggggcaaagtgaagttagaaagaaaaatgaaagattgttgggtggcggtggctgccaagcgtggtaaacagaaccccacccagcagacaagatgggggccgtgcctcatttccacaaatagggggcaggaggagaaaactgcacattggctggattttttgcttctcagtgccacttactttgcctctatggagactgatattttagctattttagataaagctaatagacaaaagtgtttcaaaatatcctagcccagaaacgaggtacggtaaggcaaagcgcgactcagagaggccttgacaccgagggctgcgatggtgcttttgctgcctgaggggacacctccacagtctccccggaggaaaggccgcwcatagaatttcagtcaggtcttctctcttttcttgctcagttaagtgacccattgcatacatcccttttaaaatgtctactttttactaagctgttgcatttgcatttctttggaaatgcccagatkattaggatcaaagcaaatgatgacctggtctgtccacatgaggaggcctccctgagagagaatctaccaagacagtcaccagggcytgaggccagaagatcctaagatggcgtgcctagtggcatgggcacacttgtgcctgcagagccctcagtgcctctaactccctactctgcagtagccaagaatgcacccagcggtcagtgtggtgtttgtcttttatcagtgaggagatggagctctgacaygcagccttgggraatgcaaagcttccaggcttgtgagtggctctgcttttaggaaggtggctggacgtggtagaaagagccaggctaatttcaggtggtgtcccagtgctgccgcttcctagctgtgcaaccttaggcaagttacttaacctctctgggcctcagttttctcacctctaaagaaagacttgtaataccttctttgcagagatgtgacaatgagaagtaatgtaatgtgtccaatacmtagtagacagccaataagtaaacattgtatttactattactattattacatctcggactgtcttcttgttctcaaaacaggagatggaaacccatggctgggattcttcatttgctttcaatatgttataaagcagcagtgggcattttctccatctgttgcaatccaactcatccctcttctgatttctgggcacacccataccagcacagaaacataacaatgattgcagaggtaggcccgatagtgaamaagcagcaaagctctggctggtcataggatgactgttacatccaccattttcattttttaaagatacttactctgtaggggaatattctcccgaagtaaaaacatgtctgaaaaaatatatgcaagatgggggctgtgccccatttccacaaatagggggcagggggattggctggatttttttacttctcagtgccacttactttgcctctgtggagactgacattttagctatcttagataaggctcatagacaaaagtttttcaaagtattactttgaaaggaatcagaaacaaaatccacccagtcatcactggtccgggtggccacctagattctgaagccaaagggctattgtgggtgcacagcgactgagtatctaaatgcaaacttcttgaacactaaatctttgctaaaattgctgggaggtgaatgtgaggcaagcttttaagtgataccagtacaaatttttcatcaatggcattttcaccatcagattgtttcgccctccartcgcctagctctgctcatccaaatgagctatttcatttttcaattttagcgtttctcaggcttactagcctagagatcacatctgcttctgctaagcatcccccagaaacggtcctggggagctctggcttaggtgaataaccactgctgtatttaattttaaattctttgtatttttgcttttgttctttaaaaaaatacatgtaattattgttggatatatacttttccagtcaaaagttacccagcattgtgtcttgtgctttacttagaagggtccagttgccctgagggaactctcttagattagagttgtccaaacacgcactttgggaatcgtttctcccaagccttatttatctaaggcttaggaccttatataggtcagataattgatttaataaataccggaaatagttcaaaataaatttcttagctctgcttcggccaaggctaatttttattaacactaaagtgatggtgttcgtcactttgaacaaacattcaatatggttaaaaaaaaaaattaaaccggtcattagacctgttaatcaaaacaaaatgatcgctttagtcagcgcatgtacatagtatgtcttccggtctaaaaaacaactttaagttccctgaaaacaaagacgcccctgtcacgctcacagctctacccagcacttagcatggtacctggagcagagtcaatgtgcrataattatcaataagaattgttgaatgcactctgggaggccgagacgggtggatcacctgaggtcaggaatttgagaccagcctggccaatgtggtgaaaccccatctccactaaaaaatgcaaaaaattaactgggcatggtggcacgtgcctgtagtcccaactacttgggaggctgaggcaggagaatcccttraacccgggaggcggaggttgcagtgagctgagatcgtaccactgcactccagcctgggcgacagagsaagattccatctcaaaaaaataaataaaataaaataaaataagaattgttgaatgaattaaaaggtgagtgaatgaaggaaatctagatgttttcataygattaaattaactttaatggtttatttggtgggtatattgaattggcattgtttggacctttcctctagagaacgtagtattaaacaatgttattttaaaaacaaaacaaaaaccagaaattaaaccagtggaggggacagggcagtttgagtgattagaattatttgaaatgagttgtaaggatggtttaagataaaaccctgccattattaaagttttctggttggaccatatgaaatttccactatttgtttatttcagatctacaaaaaggataatttcatatgattcaactaacattataactaaaaataaagaaatatgctcattttttctgattaggctttaacaccggaggaaagcggaaaataagcaaggctaacactgttggagattgttaactaatgaactaaaaataaactaatgaaaggcatcaggtagcaaaagactggattatagtataaaccacagtatccaatcacccagtttcctcaaaatatagaaagaaaaaaaagcaagatacttactattagtctggtttgatccaggttactaaataaatatttcaggtagccaacatttttctgttctcttagtttgagatattttagtaaagatataaaaatcactgacggaagttaaaatttaattaaawttttttcaaaattcctaccaagccagcccaataatattgcattctcacttctttatattccaatccaacattttttacaagtgtaaaaaattttactatctttttatagttaacataaaaacataagtcatatcataatcaaaacataaaacatatcattaaaaagtttcaagtgctttttttcttaatattttattgtaagcattgttttcatgtttagcctttgtgattgtttttaattgctatgtaagcttccatagcatccatgcatcgtattttcttcactatttccttattgttgtacatttggactatttctgatttttgttattttagctaatcctacaagaaaatcttyacatatgtagcttttgttactttcttgggcaaatccaggaatgacatttgaaagartaggttaaagtaaaacagcattttgcaggatgctctagacttctgttgaaaacaatcccatcaaggaaagaaaatgtttctctaactctctgttaccatctccaagcctttgtgtctcctctggagcaggcactatggtggaaggagaggaggctctggagccagaagtcctgagccgccttcccctcccsacctcagagccctgttcttcctctgtgagatggcggcaatggtgcctcttcacgcaggggactgtggagtggagatctgattcggaagtgcctaaacacaaaaggcacttggaaagccagaaccattagcatgtgtgcctcagtttcccaatctgcaaaatagaatatcattttcccaatgcaataatgggggaacactggactgacatgctttttttcttcctctgtcattacattgcagtgtatacttgggcagaaatttctctctaggctttagttttagcatctgtgagataaattatgagaggattgaacatcccttttagctacaaaatgagttgtgtgtggtcttgaaattacaaagttttaaagaacatttaatgactcagcccccgatccttaccccaccccacaggtattggctctcagaattcagagcctgaacttccttcttccttgcctctccaaatactttttaaatctgggctctcaccttaccacaatatttttaacattctaagtgggagcctctgctgtgaaaaatccaaggacaaagtccatcccttctgcttgtgcgtcggctgcagatttattgggggccgtgcaaggacttcggttggtgagaacagacttgaagagaaagcaaattactgcccgaagcagccaaattgcagtggtgaaaatgttaggygtttgcactgtccactttgcttgcctgttttgatttgtgctactcagcaactaattttcaggctcaaggagaaaaaaataaatagaaagcattagaacaaagacaagcaggacccttgccagtccagaccgccgttctctgagtgcagccatccctttacagttgcaaaatgagtttccatgcctttgtttactggatcctcataaccatcctatggcaaatagcagaaaaagcagcaggatctatctcttctcgtaaatgaagaaagtgaggctcgtaggtctggtgacttgcctacgagtagaaccaggcckcaaacatggtttctcggggccctcgtacagggtctgcaccttgaacagtgtgcagccgctcgcccaggtccgtacaccatcatatacccaaagactggattctgaagcctacttctaaaggtattccccttactaagcacttactcttttcctctcaatttttacagtaaaaaataattattttgatgctgaatattctcatttaatatacattttctgctgagtatgaatattaggttattaatatagaactatatgtttttctagaacgtattatgatggttctaaatggagaacttacattttctccaaagctgataaatccatagtttccattttactctcagaaaatgcatctattctggaacttccttagagggatgcgcctcaatttgcagttcaacccactcctgtgtgtgcaggtatgcacaccgctyaccaccccactgtatgcagaggttataagtaaaatgtaaattaaatcatatttgagaggttttgccctgaataaattgcctgtaattaatctgcttggtaagagtggatctccatatggtgtgaaaggttttatgtgtatgagattctctaaaagaacagcacaccgtcacgcacagactctgaattgagatttgttttttcactaactcctccaggactgggagagttatctttgaatgacaaatgtctataatctattcacaattatttacgtcatattttagcctggggttcacctgcaggctcggtgcaggtagtgcaaatccttgtgctgttgactggagcaaagcaaaagatggttttctggtgctcagaacaaatgcatgaagcattaaacagctggagatgtgaatatctgagactcttagtgggccacccccaaagctggctgagaggagggttgggaagaggggaagtattcaagtgctgcagcaggatgtctgtgatgggctgtaggtgctgttgcctttgccaagccatggcaggtggggaggagggctcagaatggaaaccaacatcaccatttaagattaacaaacccctacccccctcttttgctgtagatactagagtctactgtgtcttcttgtattttgctaattccccaccatgcaaaattgtactggctccaagacagaatgtgaatgacagccctcagttagacctgccctttcatcatctgggctgggcatgatgggagagaagtatgataggggaaagagtagaaaagacaggctgggggagggggtagaggttgcaacctgttcccctgggttkactggcctgagctgcctgctgcagggagaaggcagctgagccaggtgacccatcacgtgaaaagcctgagcccaagccccaggggttgcaggtcagtgtgggtgttggcaatgtgcacgccagcatgtatttacccataggctctggtggttgcaggtgtctgtgccccctgtgggcatatgctggcgcatgtggtgctgtgtgtttgtaggtgtgtcctgacatgcatgtgcaggtgtgcatgtgttggtgtgtgtggtgcactgtatgctcacctgtatgctgatggatgtgtgcctgcatctgcagggatgtgtttttatgtgcagcagtgagtgattttgtatgtatggtgtgtgtgtttaggaggagtttggtggcagcaggacagctccatagaaggaagggcaaacattacttcaactcagggctggcagtctgggttctgagtaggtgagcagaaagtcagagatgtcacagatcatgttccagggattctgtggagaagggagacaagaaaacctctgtcggatcatggagaggtgtgagtggcttcttcatagctgcatagacttttcaggttggtctggcctgactcccgtcagaggtctctcatcttccaagtaagcctggggtctttccttttttgtagcttccttcctctcaattctcccgacttagaatgcagacgccactccatcccccacctgcggaaaccctgttcaccccttaattctaagcccagatgtatggggatctcccagacccactgttgacattgttaccagcgttaaagtgacacaagcaggtggaaaattgttgttctcagaattcagggtcaaaaacccaacagaaatagttccctagagtgaggcgttcccagagaagagactcggcacccagatagtttcaggaacatttatctgtcagcggaaaatgtcaacagctccccaaattctcaccagttcttcccacagtgtccatcctatgtattttggctaaaataggcaaacacgcatttaatcttctttttttttcaccctcggaataggttggcaaacaatccaataaggtggttcccaatgacctactttgcccatcaagataaccagatggataatgatttcttttcttttctttttttttttttttttttttgagacagagtttcrcttcgctcttgttgactaggctggagtgcaatggcgcgatctcggctcaccacaacccccatcctgggttcaagtgattctcctgcctcagcctcctgtgtagctgggattacaggcatgtgccaacacacccggctaattttgtatttttagtagagacagggtttctccatgttggtcmggctggtctcaaactcccgacctcaagtgatccrcctgcctcggcctcccaaagtgctgggattataggcatgagccaccgcgcccagccatgatttttaatatctgattatttaaaccatctgacaggccacttgacttaccaattgagtaaatatttaccaagcacctctcatgtgccccaaatcaaaccaacagtcctgtagatggttggctcaaccagcccactggccaggccagtgttttgaagatgaaggttaaatgattgagagcccataagcacaagaaagtgtccctggtcccggaaaccatgttctcaatttttgcaaaaaagtctaaatttgtcttcaggctcacttctttatggtctcatctaattttcatcattgtgtggggcctgtgctaatttccatgctgagtttagtagcaaaggaagcatatatggaggataccacccaggacttttgagtcagccragagagcttcagaaattcctcctttgatttccacagagtcgagagaaatctttgtcttttctcccacttaactatcaacacttcaaagcccagacctacataaaatacacaaatgctttctggacaaaatgaatcttgtccgttttctttgggtttcattgggaacaataaagattgagctacaaaaggttggcaaagaggattatcctttttctttctattaaacatagaggcttcaaaagaacagctcagaaagtcaaataattgtatccaccatcgctcacccatccatctccctgctgacctggcctgtgaaatcccctttaaaaacttagccagctctcacctgcccattgcaaatgctgtattgttaaatgttcccatctataattccatgagggaggctgctataaagcaaactccttccatttcaacggagcatctcgtcgcgcaatagctctttggggtgggagtggtggggtgcctctaattttcaaagctttgtaatctcttgttggaaagggagctacttggaaaccagaaatgggctgtgaatagagttatagccacaagctcttgcagtccaaaggggctggtggggaggacacggagggtaagattttggaagccatttttgatcttcatgacaatttcttgattttgtcggtttggaagacacatctgttagtttttagctatggctgtaaacacaaagtctcagacttgaagctgacctaattcctcgtttggtttcagaccatagcttcctcagaaaattcctgtcagccattttgaagagcacaaaatggctcctatatgccaagagatagagagaatttgctatttagggatttttttttttttaagatagggtctcccttcttcactcaggctggagtgcaggggtgtgatcacagctcactgcagcctcraaatcctgggctcaagcaatcctaccacttcagcctcctgagccattggaaccataggggtgcaccatcatgcctgactaattttttctttttttgtagatacaggttctcactacgttgccctggctggccttggaaactcctgggctcatataatccaccagccttggcctcccaaagtgctgggattacaggaataagccaccacgctgcctatttagagatttttaaatttggagttgaacatttaatagcagcattcaagtctggaataatttcagttaagaaagaaaagaatagaaatctaaccttctaattggccaaccctctgaaattctatgtggaatgatcaacaaaggaagacagttttgagttgctgggtcctctctacggggtcagaaaagaggcctggttcacctggctctccatgttttccctgtagagtccttcaaacccatggtctttctctaccaactttgaccctgggtcatcatctctctctccaatcaccattccttctctttgaaggttaaaaaaaaaaaaaattcaggccaggcgyggtggcttacacctgtaatctcagaactttgggaggccaaggcaggtggatcacccagggtccggagtttgagatcaacctggccaacatggcaaaaccacatctctactaaaaatacaaaaacaaaaacaaacaaacaacaaaattagctgggcatgatggtgtgttcctgtagtcccagctactcaggaggctgasgcargagaatcacttgaacctgggatgcaggggttgccgtgagccaagatcacaccattgcactccagcctgggcgacagagcaagactccatctcaaaaaaaaaaaaaaaaaaaaaatcagagggaacatacaataagccatatttaatggagttctgaattatgtaaatttgaaaaaaatgcaatctaaaaattcataaggtctcactatttgtagtattcaagataatgtaagattttacatttattcctatgataaattaatcagaattttgcaaagtctttaggaatgcatctctcatgtaaagtgtagctactttgtagtcagaagtggcctgtggcaatatcgtgattaggctggkgtaggggttagggktgctgccacttagttctaccttcagtgataagaagagtagacagcaagccttggcaacatagcaaaaacctgtctcttctaaaatacaaaaaaaataaaaaagagagagagagaaaatattcgctgggcacggtgacacccccctgtagtctcagctatttgggaggttgaggtgggagaaatgcttgagcctgggaggcggaggttgcagtgagccgtgataatactactgcactttagcctggacaacagagtgagagaaaaagaaagggaaggggaggggaggggagggagaggagaaagaaaaaagaaaagaaaagaaaggaaaggaaaagaaaagaaaagaaaagaaaagaaaagaaagaaaagaaaagaaaagaaaaaagaaagatggcgtctctctgggaagattttctgtgaccagagtgggactgggctggtatgtcagaatctcggaatatttgacctggaaagtattatagataccttcaagttccacttctggattttaccaggggagaaatgatggccctagagaaaaataatacagatcaagaaattgccatgtcataagcaaatggcaaattcagcccttaaacccaggacttttgattcttgctctagctgcctgtcctctgggctgacaagctgccctgttataagtaaatggcacttctggagccagccacttgggtctcaggtgtgtgtgatgagaccctacactagaatgacagccacaaaagagctgcaggtggctgggccaccttagctcatcctgtccatgaaggggatggctttcaactgtttcagggggtacaaaaaggcattggatcatccccacagtgaggaaacccctccccactccccctaccagatagctgtcagtgctgctgagaagcctaccttggtctccctccactccagcttctgcaggccaagtggccattgttgttagattttttgccctgttgtgccataggccctgacctgcctacctgctgggcaacaggctgccggagggcgaggggcagcccttgtgccttgccccacatgagctgcactcatgctgccttccagagaagatgaatttagccttccacctgaatcctttcagaaacgaagcaggcaggcaggcaggcagcaagaaagctatagacacacacatacatgcaaacacatacaagtaaatttagccagagtgcttttagtctataaagatgttcagtaaaagtttaatgagtgaagaagtgacaaaaataccatgtattattagtatatctaggctcagacaatgtcttatggtatgtaaaccgtatctcaacaacaacaacaacaaaaaaagctactcaggaggctgaggcaggaggattgcttgagcccaggagttccaggctgcagtgagctatgatcrtaccactgcagtctaggctgggagacagagcaagaccctgtctctaaaaaaagaaaaagaaaagaaaatgtcagctatgtacaagggaatcttcactcaccagaggaagcccttggaaggttttgtgcaagagaatattataataatatgtaaatataggtagaatatttaaagaaaagctgtcgtgagttatttggtattgtgaggactcttcttctaatctacttgttttcatgagtatgaattttcatttattggatttttgtagaatcgacagatatattaacttttcaaaaatagagacgtgcccagattttcctgtcagttgttcaccaacggatgagatcccaaaaggtaggcaagattgatcgctaggttttagaagggtttccttttaagggctttttaatgaagcccattctaactgagattcccactgccccactgccctagcgtcccgttaatgacaaggagaggcagataaatgcctctttgtgccaataaatcaatggcatctctgcttctctgctgggactgtccaggaccatggtaaccataaggacagtgacccactgatcttaggccttggcaggcaaactagcctttactagtgatggtgtgtcctgttaggctatgccagctggggagagaagactaaaaccaatgagagaaaaacaagtaattttcctgttagtgaagagtgcctgttttaatcatacatttcatcgtcagaaatattatcagagatagaaataaaatgcagaacatagctgcgcattaattcactttcagtgtattttctgagcaagcgattgtatgtcagcggctgcattacagttgctgctctcaaagtactcacatttctagaggagagggatatgcctggctggtaaagtgatagaggggtggtaactgtgaacacttgtgatgccggggcttgttttatgtgctgtttgcatgcattaggtcaactaatcctgtggcacttttattgatgtccccacwtgataggtggggaattcagccctgggggtccatggctagcaggagcacagccagcctttggccccaggcagcctgccctcgctccccccgccatgaaccgcattgcctatacacagcaccccgggagcccagaggtaagggtctccctcatatttgcttgtcacggacttggagggaggagttgaggtttgtctgccacatggagaagggaattagcaaagggaagatctggtggtaggaataggattttctgccccagaaaaccaggaaacaccagccgtgactctaatccctaccccatccctgaaactcacttcccaccctcaggctagatgaagaggcgggggtaggggggcatggcctttggcaccctaaccggtagcctacccctcctccaggccaagtcctcacctggccccatggttcctggtcccaggcagaccctgttgccacctgctcagatgtgtcacccttccttgtcccaaggacctggctcctaaacaatgtgttcagtgacgtttataacaaaggcactcttccccaatctatgttcagcaagatgttaatactatactacaaaaaagaaggaatgtacattttggaaacagtagtttaagtgcactgaagaagggttttgtttgttgttgtttaagtgcaggacttttccaaaacttctgtctgcaaatgtgcattacacgttcccagggggaagggaggaagatagagttatgcaatgcaatggaaattaatttcacccctcttggcatctggtttttcagggaacacctattaagtgacctgcagaatacagagtgagggctctaagaggaagttatgagaaagctgggctagaggattaaaggaaagcatcctgggaggtaggatatgaatgggtaggatttaatgcaaaaaggaggaggaggaaactttgcaattcagggcatggcctcagcctgatgacaaatgccccagggggacctcctaaagtcggttcattttgaataccggcaggagcagacgcaagctgccacccctcctgtgtaaggctgaggtagctgttccacagtttcctgggacttgccagcaggatgaagttccagttgttaaccacagtagctaacctcataatgattccttccttcacctgcctcacttcccatgttcttactgtattcatttcctagggctgccttaacaaagtgccacaaactgagtggtttaaggagcaaaaccttattggctcacagttcggaaggctaaaagtccaaagtcaaggtgtctgcagggttggttccttctgagggctgtgcaggagaatctgtcccaagcctctccccagcttctggtggttgctggcaatctttggtgttccttggcttgtagatgcatcatcccaatctctgccttcattttcatgctgcattctccctgtgtgtgcatggctgtctctgtgtccaatttttccctttttataaggacaccagtcatattggattagagcccaccctaatgacctcatcttaacttgataatctgaaagcaccctatttccaaataaggtgacattcaragggtgttaggacttcaatatcttttgaggggacacagttcaacccataacacctaccaacggtttctggaatcatctctcaaaataaactatctaaactctaatctttgtttcagggtcagcttctagcagaactcaatgtaagacacccttttaaagatggtacctcagaggtacagacagattgtgaaccttccctagcacagtgtaacaagtcccttgcaaaaatcctgatttgagtcaacattgtaatttcttgcttaaatctaagaatatgcctcccagcttcttccaagactatctgggggagttgtttctagggtggctcaatttattcgttttgaacgctgatggccgtgcaccacaccgtggctcaatgggtgttgaggacacgttcacatgcaataaatgcacagggctttgccattaggtggcattaggggaaggacacttccagcatactgcagaggcattctcttccagcctggttgcctgtcaagcacctgctgagatgactggcccagacrgagattgtggggttgctgagscagccctgtcccctccttatctccggaagatggaataaatgcgtgtcagaagggagggtgcctcccatctcgggagcaccggggttgcccttcagaaaaacattgcctgcacattttgtagtcttgaaatgaatctgagtggcaattcaagcgggcagagcttgttttggattttagacagttctacctgcgtgctcctcttctctgctccagctctgacatctcggctccacatacagtggtctgaagtggcatacggaccctgagaagaggagaggcaaaggtggcagctgtggctggcccctcctgccytctggtctccttggctggtgagggaagaacaaacacagttgtgtttccaggtcacagctgccagggctccacctgtggggtgggtggctccagttctgttctgagttaagaaatgctgcaaatacgttctccttgaaagagacactaggaattgaccatttctttctgcagctttctgtagccaataagcatttgaggaactggagaagggttcagccctgaattgcaagggaaaactgtgtgagtgtgttttagttaagaaaaaagttaattctagtgagacctgcttgtttacaaaacagatgtataggccagacagatgtacagggatgaccttgactttcttttgtcattgcaggaaggtggggtatgtatgacccctggttaagaacaataggaggccgggcgcagtggcttacgcctgtaatcccaacactttgggaggccgaggcgggtggatcacccgaggtcgggagtttgagatyagcctggccaacatggagaaaccccgtctctactgaaaaaaaaaaatacaaaattagccaggtgtggtggcatgcctgtaatcccagctactcgggaggctgagrcaggaraatggcttgaacccggraggmggaggttgtggtgagccgagatcgcgccattgcactccagcctgggcaacaagtgcaaaactcggtmaaaaaaaaaaaaaaaaaaaagaacaataggatcagaagtcggatggctgggtccatatatacctccacctcttctgactcccagttttccatctctgtttgaaaatgagtctgtaagcctctccccacctctgcctgttcccatcccatagcaccaggctgacttaggcagccacacagctgggatgggaagttggcctcagtgagcagatggtacaggggctgagcttaaaacaaaaatcacaaacatttcttggggggtatcctcaaggccgataaccctcttactagagtgaaatggaaaaccaaatgtgattgagctgcctgagcgataaaagcatttgctgttattctctgatttgctctgttcatggagagtttagtcataggagtttctattctcagaaactcacagcacatcacaatacgtagctcatttgtcctcaaaataattctgccctgcataaatgggtgtgtgtgtaggggggtggtaattataagaaaccatgtgtgttagaattgatgtcagtgctttgagatcatcagataaaagctaataaacaacacatatgtgtacaggccacctctctaattcataccagaagcgctggttgtartcaaagcatggcatattttattttaaactattttataaataacctttgaaactgtgttgattgtgaaagccaagatctgatgtcctgttaaggaaagatgaaaataggctagaattaaagagcaatatgagtctggataaaagtgacaggaattactgtaggacaataaagcattgggtcatgtcaagttttcatcacatggagaatggaaagctgcatcataaatgctctccacctaatcatcctgagcattctcattttagtgcgatatattgtcctcttggaagcaataatctcatttaggtcatgagtaaaataagttgggttcagcgtttccatttcaagatatagagaatatttctccagtgcagcataagaaatagaatatcacccaggagaagctttacataggcagtgataatgtggaaaaatctaataaagagaacccacgtgccccagggaggagaagccctctgtgtgtgtgattgtcgtcaggtgagcagttatggcacactttgtagttttgccagtgcttttatgtaaattactgtatgcaaaatccacagccctcggggatgtgtgggtatggcctctgttactgacagaggaactgaaacttcaagaaggcaagtgatttgctcaagattggttatcagtagagttggggtttgaattccattcttctggattcaaatctaagctctccctctgcacagttacatgtgggcaggctgtgcatgcatatctgtggcctggaggmgtggggtgagtaaccttacaggaaggaataccctgcactaaaatttgcacctaagcttccattattacgcmtacttttcattttctgtttgttttcctcttagaggttaaattttccattcctgattttaacccaaagaaaggctaagtaaattccaggggccactcttgaataagggcagctggaaaaaaatacacaatgcccaccatctagcttaacaggatgtggacaccttcagtcgtggctaaatctatacagtttaaccctagcaacaatttcccagaaataaaacagctgctctttctggtatttggttagtctccagctgggtcaagtccctcttgatcgaatgcttggagcagggtttctcgacctctgcactaaaacacctggggccagataattctctgtggctgtgggcaccagggaggctgttctgtgcattgyagaatgttgagcagcatccctgacctctacccactagatgacagtagcactccccaagttgtgacaactcaaaatatctttagacgttgccaaatgtttcctgggggcaaaatctgcccctggttgagaaccagtggattggagtcatcatttgtgttgatcaatcactccgtgatgattaggccatgatggacaattcaggctgactttattttgctcattaggttgaccagaagactggcaattgatccactgctaagcactttcctgacacaagctgaaatgatgtcctcaggagccccgtgtgcgcatggcttttgggatggttcttcccaaggaggacagccgtaaaccatagaaagcaaccacttgactctgggtgtccctggtttgcaagtgcctcttgtgtccgccatctgcatttctgtctagatggtaaggttgagggaggtcagtttcagcagaaagtgcaaagagcatagattcatgaggcaatcagacctaaattaaagttttggctttatcactacccagcaacgtgatcttgggcaggtttcttgacctctctgaaactgtcctcttctttataaaatgaagattacctaccttgcagggtcattgggataattaaagaaaatgtgtgtaatgggcccagatggagctaggcccatagcagcactgtaataaatgttttcgattactgtamattttacaaaaatgaatgactgaatggaaaggtagaaaggccaaatagagtgtctgaggcatctccatggaggagggtgccagtgrccatgtctgtctgtggctgatcgcaagactcttttgacagtccctgaagcctgtgctcatcttcagctcccttgaggccctcttcacctggcctcacccagtgtccctgctcttctgactcctgagggacctgagcattccaaaatagatgttaggaagatgtggattcatgtagaaggatgtcaaggcattgttggttttagcagttgatcttacctggggtgtgaaagacaaccgaagtctgtgagctgcagtgatagaaatgtgagcagatgggcaggataggaaggcacttcttgacgggagcagcaacagaagccactgcctttggccaggactgggggagacacaacagaacaggactggcagaagatgccacatcccagggtccccaagaycaagctatggcaccatcacccatctacagcaagatctgtagcaggaaccagggagaaaagtctagaccctcagtaaactatgcggccaggacagtccgaggtcaagccgtaaaggaggcttttttggcatcttttttcttctcccttgggcatcatggaatctgtgctgggtaaagaaccttggagatcccctttgccttgactcctttgtttcactggccctcagaaaggagatggcagaatcacaaagctggtggctgagccagaaagatattgtaggtggaattcaggttatggatagggttaggttccccttgaagagggagtactgagtttgttccttggagagtttgcggttctagctctgtaacccaggactgactctcagcccagtgctttttctgttgtgccaggatgcatcctcatcctatatcttattttaactcatactgtttccaaatcaaataccaacaacatttacaacctttactttcttatttatttaatgctccccctgaaagtagtaatttgccactaagaaagcctcccctgccctagaatactaaagaaaacgagaactaagcgaaagaggacctgtagtcagcgatttcactgtatcctatttaaaatgaaatggactttattttctgctttgagaacctaaaacaccacactttaaaagatgatatttatcatatcttacaaggtcaaagcatacttattggggaaaacttggaaaaggtagaaaagaacaaagagaaaataaaaatcattttaaaaaatgttacccccaagactgattagtatgttggtgactgtccttctaggcttggatatgtgcattttatttcgtaactgttctttttacttagcaataaatcatggtcatctctccctgtcatgaactatgtctctacatcaactttagtgcctgtaaaatgccgtaatttattttaccactgtcttttgtcagacatttagatggcttcatgtttggacgcattatgaatagtgtcactgtggacattcctgtgcatacatcygtgctcacatttgtggctatttctttggaatgcactcctggcagtagggttgctaggtctcccctcactgtcagtgtccccgctctccggggcctgcttttttcatcaccygcctccccgtaaagattcctaarttccagggctatctccttctgatggagatctcctgggtgatgtggtacacgtcacccacacccctgccaccagcctgctgtccaacagatggagctgataaccatttaggaacaatccttaaacttctaaccgactcagtccctgattagacttcttgtcttgccttatccctggttatgtcccttctccctcccaacccttacccacttctcagccccatgcaggaggcccagtttgtcagctggccttgctaatttctctcttggcccagccagagatcgtctaggttccttcttcctactctctgcccgctctgtagagtcagactctccacgggatggagatcttcaaggccagagagatgcaaaacctccttgcttcaggatccggagacaagctgctgcttttaagcagatcccctctcaggcaggttcaagtactgacccaaagagcaggggggttgcagggctctagtgattcttgtgtgaccccagcagactcaagctgttgcagcagtcagacatttggtgatacctacaaaatcatctagtccaacctctcttccaacagaactcacactcgatagcttctttgatgaatggaaatccagacttctgggaacactactgtgatgagcaactcactacctgcctacctacctaccttccttccttctgctttatttcacaattcttgccatacaaaatgaacaaacacacaaacaccactactaatgctattcattcatttatttattcaaccaatatttattatttactatgtagcaggaacagtctaggtgcttttgaaacaatcatgaacaaactgaaccacagcagcaacaaaatcccagatcccatatagaactaacaattaaagacggagacaggcaataaacgaggtaaactgaaaaatatgtagatagttgtgatacatgctgagaagaaaaataacacagagaaggtgcataggaagtgtcaggctggtggtgtggggatacagttttgggtagggtatgcagggatgtccttgctaagatggtggcattctagtcaaacccagaaggaagtgagcgagcaagccaagtgggaacctggagaagacggaggtggcagtgcagactggcatgttcctggaactgcaaagaggtggtatgagtgaggggaaggccagtaggaggtgaggtcagacgtattgagttctgggggtttggggagagagtgacagttgcaaacaagcttgaaggacattttgctctaagtgagatggaggtcaaggacttggagcagaaaagatacatgattatatgttttggcaggatcattctagcagctgggcaaggaacatgctgagggggaataagggcagaagtaggcattacttagtgatgtttgttcaagaaacatctgttgcgctcctatatgccaagcactgcgtaggtgataaggattaaacgggagcacactcttcttccctctggtaggttactgtaacaactactcccacctctgtcatttatgagtatttacccagtcccaagctctggggtgagcacacccgtccattattgcatttattcctctcagcaaactgtaaggtaacaacctcaggatatcctcattttacagttgaagaaactgaggcttagagaggttatgtaacatatcgtagaccacatagatactaggtagacagccaagatttaaacccaggactgtctcactccaaagcctgcaatactaaccacaatgctgttgctggaaactttttcttacgctggactttgaaagttcacctaagacagcatgagaagtgatggtatcttccaggcagccacctgggccaccagccctcccctccttgggatctgccttcccactttgtctgaattgagggtccaacactgctcctcggacacaaggtccaggtggggagagaacagagtccagcccagccaaggcaagtcacctgggctctctggaacccggactgctttgctgtagagtaaagtcctggaataggtctctaaccctctttccagctctgaaatccaaggcgtatgtgatctgaggtaataattgtcttgcctctcatgcttggtttttgatgagaccttcacattctttaataaacatttatctgtatccaggaattataggagatacaaaatgccgaggaatgcactactcatgatcttttttgakccttttaacaatccagagacatgggctgtgtaaagccacagtgcaaaatacaattaggaaaacacagcaataagaccactgtagctttgaatggtgctgttcactaattattacctccccacccattttctcatctgaccctcacagcagccccatgaggtcgacagggtgaggacattatccccatatcacagatgggaaaactgcagcccagggagctatgcgatttctcccgaggtcctcctcacactagtgtagtggagccgctatgtttattgaccccaaatccaagtcaacccaacagtctctagaacgttccaattacctggccagtcctcacttagataacatcggactctttcagaaaagattaaacaaatcctctatttgttgrcagaggttttgctgaactggccctggggrtccgaattgatcatggccatcaacacaggcagcaaagacccttcagaagtgttttattcactagccacctccatcccccaaccctccatcgtctaaagtgtctcctgactcagttctgtccccctgcttgtcctcttctcctattagctctgggtacccagtccagatcatagccccaagctctgycatcattttgcagcctccagcctcccccacccaactcagcagagccctgagaagaaagtcctgggtcccggaggctgcacctgcagacacaacagattctgcaatggtgagagcatatagggtattttgggtctccagtggggtttttgctgattctgtgcctgaccagggcacatgcttcctggaattaataattctagataaagaagcctagcagatgcccacctatggaaaatgcttcttaaayaagaagaatctcagaattaggaggccagcttcttgttctcagcactgcccctaactagctgtggggcctcggacacgtcacttgatgcctctggtcctgttttcttctgtacattatggaggatttggacagagatgatcagtaaggtcccttctagccagactgtcaaggttcaaatcctagctctgccacattccagctgtgtgatcttggacaagttactttatctttcctaagcctcagtatccccaactataaaatgggcacaatagcacctatctcatatggctgttgtgaggacccaaagatacaatgaatgtcagccctcagcacagggcctggcacagagacagtrctcagctaagtaactgtttctaagttgtttatgatttgaagctaaggatagagatgcttattctgagaagcagaaaggaacagatggagaaggaaaaaggaagatgggacaaaaggagaaaaactggccaggtgcggtggctcacrcctstaatcctagcactttgggaggccgaggctggcggattgcctgaagtcaggagttcgagaccagcctgggtaatatggtgaagccctgtctctactaaaaatgcaaaacttagctgggcatagtggtggacacctgtaatcccaactactcaggaggctgaggcaggagaatagcttgaacccaggaggtggcagttgcagtgagccgagatcgcaccactgcrctccagcctgggcgacagagtgacactscatctcaaaaaaaaaaaaaaaaaaaaaaaaggagaaaaattagggaaaatagggcaaaattgggggtggagaaaggcaggaaaaatttgagggcagcaactgcaataacttcaacagaaaagtagaacaataagcatacagccccaaaatactcagcccctttcctgcctccccttcctctctgcccctagcagacgccatgatagctcctggaatgatgccttttataactgtggggcatgttcctccaggctgacaccttctgggggggcccctgaacacagcatgggctcagccttcctcccacacacctaccctggtaggcatccctttgagatggatctgagtggtttcccacctccttctaggggtgaactgtcagttcaagaaggaggtttagggggatgggatgtcccctacctggggctaatsggggcttgggaggtggcttacgaatcgaagccgaagacagcagcctacgtgaccagaaaggaaaattcccctccctgctagttaagaagcttcacagaagctcaccagactgttgttttctttctttcttctttttttcctttgtgcacacataagcgtctaaattttgcaaactgttgcctacctttgtctctgagagcagtggaaaatattggactaacaaaaataagcaacagccagtgggagaataatagagaggcaaggtctcctggtctagttggcgccgcaggggttaagcctttctgtcggtgaaacaggctaacagcaccccctgagcctgctgacctcttccggctctcctggtccttcacacatgtcaactgtgagcacgctccaayactgacaagactgtcttacacctgaggcaattttcatagcacaggctgctaatttttcctccaggttttttgtttgtttgtttktttgcctggtaaaatacacataacataaaatttaccctcttagccatgtttaagcgcacagttgagtgrtgtcaagtacattcatattgttgcgcaaccatcaccaccatccgtctctagaattcttttcattttgcgaaactgaaactctgtacccatgaaaccataactccccattcccgcctcctcccagcccctgacaaccactattctactttttgtctctatgattttaactactttaagtaactcatataagtgaaatcataccatatttgtctttctgtgtctggcttatttcacttagcctaatgccctcaactttcatccatgtggtagcatgtgtctgaatttccttccttttcaaggccaaataatattccactgtatgcatctgccgcattttgctcatccatccatctgtcaatgagtgcttggttgcgtccaccttttagtgattgtgaacagtgctgctataaacatgggtgcacaaatatctcttaaagaccctgctttcaattcttttgggtatagaaccagaagtagaattgctagaccatatgatagttctatttttttttttttttgagatggagtttcgctcttgttgcccaggctggagtrcratggcatgatcttggctcactgcaacctcccttcctggcttcaagcaattctcttgccycagcctcccgagtagctgggattacaggcatgggccaccatgtccggctaattttgtatttttagtagagacagggtttctccatgttggtcaggctggtctcgaactcccracctcaggtgatccactcrccttggcctcccaaagtgctgggattacaggcatgagccactgcgcccggccagtagttctatttttaactttctgaggaaccaccaaaccgttttccacaacagctgtaccattttacctttccgcccacagtgcacggcattccttctccacatcctcaccaacacttgtgattttctgttttttaaacaagtagccattccaacgagtaaagggtgatataaattttttaagaggcaagacgtgccaaaactaggatttcaaaaattgtaaatatagaataaaatagactattttaaatgtgacaaattaacaaattaattttagcctgcttatatgagttctttcaaagataatttctttttatttattattattattattatttattattattttgagacagagtcttgctctgtcaacccagactggaatgtagtggtgtgatctcagctcactgcaatctcggcctcccatgttcaaacagttctcctgcccatgttcaaacgattctcctgcttcagcgtcctgagtagctggaattataggcacccaccaccccaccaggctaatttttgtatttttagtagagacgaaggctggtctcgaattcctgacctcaagtgatctgcccgtctcagcctcccaaagggctgggattacaggcgtgagtcactgtacccgaccttcaaaaataatttttttttcttttttgagacggagactcgctcttgttgcccaggctggagtgcrgtggcgcgatctcggctcgctgcaacctccgcctcgcaggttcaagggattctcctgcctcagcctccggagkagctgggactacaggcgtgcgccaccaarcccagctaatttttgtatttttagtagagatggggtttcaccatgttggccakgmtsgtctcaaactcctgacctcgtgatccaymcaactcggcctcccaaagtgctgggcttacaggcgtgagccaccgcgcccggcctcaaatataatttctaaaggaagaaagagatagagaggggaagatagaaagaatgagagaagaaaaattaagaaagatgaggtcagatgacggggaaggtggagaagctttgcaggcagagtctggaatactgcttttggaaatgtgaggccaggccccgtgccttccaaatgcacccgatctttccgccgccgtaggtcccggatatatggatttgcttggggacattgcttgctttcacagggaggctgtgtactagcaaggacacaaagatgagcgctccacagttccctatttgggccagaaggtcaaaaaaaggggtggggtggtgggggggcacaggcagctaaactggctctgcctcctggggccaaaaggccagcttcctccctgggcctggctgcccagaaacctcggcgcgggcacaggtcagaggccgaactgggtggtattcaatcttgggtttaatgcattttaaaaactgcttttgaaggcgcaaatgcatcacagttctttcatttcagggaaaccgcctgtgagaaagggggaggtggggaaaacgctgagcccaggagggggctgccctgggcttttgtctaacaaagccgcagctcctcagcagcggggctcttgccctttgaaaaccaatcgggcaggaacccttcagcctcctttctgagagccagtcacatcacattttacagatctcagaaaagtgagccaagtccctgcgctatgtcactctgggtttgcgtcccatgtctctgacaccctgtttttctgagcaaacagcctctaggtgaacaacagtattttgcttctctcatcactgaatagggtcaaacttcccatggaattccactaccaaaccagatgaatagaaagaaagctgagagaccactaaatagggcattgctgctatctcaatgagagtgtcacctacccacaaagcaggcaggaaatctttaattaaccctgtttctagacacaaaagccctcaataacatttcatcctatttaaataaatattttcaaagaagrtgatgtgggaacacttttatttttgctattggagtgctaatttaatatcatatatagtttaaattatcatataagaacctataagcagagtttggggtggggaaggggggttggatccttctaggaactctcctttatctctttcatttttattccactgtgacacttccctcttgggaaattcctgccccggatttttattagtcttttgtctgctgtccggtgttaaaacctcacaaatccattacgtgcttctcggcgctgcctttcaagttacctctccacgaggtgtggactaatgaatcaaacggcaagggaagcagctgccctcagccctctcagaagaggcccggcccacagccatccttcagaaaaccctcctggcaggccctccctgggctcagcacaccctcgcttccctgggtttttattcggagctgtctgagctacaagaacatactcacgtacgtgrcataaaaacacgcacgcacatgcagaaagggaaatacttgttgggctccatcagagagaatatttttcaaaaatctctcaatattgtcattatgtcaactgctaaagattccctgcttgacaaaaacttaatcaggcttccaaactttctcctaggcccatctgtgtactttcttgcaaaatccaggtttagcaaagaactctgcccagttagttgagcacaaccatcaaccttcaatatccrgttcccctcagtgtctgatcagggtcctcatcccactccatcccccaggtgaggtctgatccccctggcctgtgttcagctagagtcctgttaggttggtttagccagaatccctctcactctttttgggaattttctatccattgaccccctactctgctccttggcataaatgcccacttgctgtacttggagttgagcccaatctttctgtcccactgcaagaccccattgcaatcatccttmtacctatcatgacagttttgaatgaagtctgccttactgtgctttaacaggtatcattgaattatttttctttaacacatcttagcagtaaaattatcttcaaaattttcttagaatgtatgatcatcatctcttatagctgtatcctgatttccactttacaatagagtgctcatattatcatctcatttgtgcctttaacaaaccttttggggtaacaattgttatttccatgtgatagctggagaaactgagtttgaatgagttcctcaggggaacacagctagaaagtagtattgtggggctggcacacagtggctcatgcttgcaatcccagccctttgggggccgagtggggaagactgcttgaggccatgagttcaatactgacctgggcaacatagtgagacccccatctctacaaaaaaaattctaaaaataaattagtcagatgtggtggtagatacttgtaatcccagctactcaggaggctgaggcagaaggattgattgagcccaggaatttgaggccacagtgcacagtgatcgtgtgccactgcactccagcctggacaacacagtgagaccctgtctcgaaaaaaacaaggtagtgtggtgggagtaggacccacacttctcactgctagcctggtactcattctttttgataatgctgttgtgtcatgaaatggcactcaattagtgttgttggaatggtgggttgtgcctgcctcatagactgagatcggagcctactttggtcagtgcctccagtaaggttatgcggtttaagcattggatggaggtgccaggctgaggctgccagtgggtcctgggacttgcctgtacctgctccctggcagtgtgggtccagggatgcccacctggaggaaggggcatcagctggcctgaacctgcctgccatggagctgccttttctttcttcgttttttcttttgtttgttttagatggaatctcactctatctctcaggctggagtgcagtggcacgatctcggctcactgcaacctccacctcccgaattcaagcgattctctgcctgaacctcccaagtagctgggattacaggygcccaccaccatgcctggctaatttttgtatttttagtagagatggggttgcaccatcttggccaggctggtcttgaactcctgaccccgtgatccacacacctcggcctcccaaagtgctggaattatagatgtgaaccatcacacccggccgttttcttcctttttttttttttgaaatggagtcttgctctgtcrcccaggctggagtgcagtggcatgatctcgactcactgcaacctccatctctggggttcaagtgattctccygcctcagcctsccaagtagctgggattacaggcaccctccaccacgcctggctaatttttgtgtttttagtagagacggggttgcaccatcttggccagactggtcttgaacycctgacctcaggtgatccacccacctcggtcttccaaagtgctgggattacataggcacgagccaccatgcccacccagagctgccatttctaactcacacagaggtatcagagcagcttgcagtggcccgcataagtggccagagctctttcctgggggttgcagggggtttctctgctgacccctcagcaggcagcaagccccataagccagagtgaaaggatgtggtagcagaaactggcctctgaagcgtgggaaacagatctgcttgccgtcagtggcatgcctgccaaatcatgctatccgcaaactcgaggcgggccctggaccggcggctgggcctgaggtcatctgggctttagtgctagttctgctgctgacactctttggttttatttttttcagtttacaaagtattttcacataaacagtctcagctgatcttcacaacaacactccgaaattgtccagtccctcgattttgctccagtgctctgagaggttaagtgacctgctcatgtcccgcagcacttcctctccctccgaggccagggcactttccccagagttgcctctctctggctgtggtgattcgggcaggtcctgtgtcccttctgaatttgacttctcatttgacaaccgagggggctggtgcaagaaccaaaccagtttcttgatcttgtgatgaaaacatgttttctttccactcacttttccatgttgctaatttctttggcctgacaatgcctgttctcttgctgtcttgagagcagcagagctgaggccacctgcccctcggagcatggtggtgtgtccttgcaggggtcagagtggtgtgtggatggcagtgggggccgtggaaggaggcttctggaaggcrgcccacaatgactcttaaccctcccctccccagcctccagtcgttttctttcagttaattacctggttgttcaacctycttggcagctccatagtttctttccccacccccaacatccacagccctcttggtctcagagctcagccagaaggaggcagagagtaaaagtcatattgttttggtgggaaatagttaagatgaattatacccaccattcttggtgggttggatttggggctggtgacaggactgaaaggagggattcctgagcttgtgccccttaatttacctcccaactgccctggcgtyaaccacctagtaagccatgccgggataccctccccacgggagcctagcacgccagccagcatgctgacaaaaggaggagtaaggcagctccctaatctcaggcagctctcagtgtttcaggaaaggcaggtgtgtgagtgggtcgttttcctgggtctccctcaatccacaccctagactaggtttttgcttctgcttccacccccactacaatccaagatgggagsttccccacccaaaaacaaacctcagcctctccactttgtccttctccttctgcaatgtcaagcggtcaggccatcccattcattcattcactcaacaaatatttactgagctccccagacgcagygccaggccacagcggcacagggacagagctgtgagcagggcgtgcaggggtctgtctgctcttggatgggctgagttggctgctctccctgcaagctcccttttcattttcaaatgccccccttagatcttccaataggtccacagaaggcagaaaagaccccaggtgagtgtgggttgtaaccaagtgaaggagtccatgccrtctgcatccatragggtgtgatgtgcctggttgtccctcacaaggrggtgctgaaggatggggactaaaggattcaggacagggccagtgtttggcctgattgttatttcctgggttccctagataccaaatacctgggttctgccaatgtgaggctttcacctctgaacagtctggcagcagagcagcagggaatgagcccctccctggacagccaaggaccaggcagtccctcagcctcagtctcctcagctggagagtcatcccgcctggtttttcttctgaggttgtgagagacaagtgaacctctaaaagcccttctcttttttgttttgttttgtttttgagacagagtctcgctctgtcgccgggctggactgcggtggygcgatctcggctcactgcaacctstgcctmccgggttcaagtgattctcctacctcagcctycygagtagctgggactacaggcacgtgccatgacgcctggctaatttttgtatttttagtrgagacrksgtttcatcatgttgsccaggctrgtctcgaactcctgacctcaggtgatccrccyrccttggcctcccaaagtgctgggatyacaggcgtgagccaccgcgcctggctgaacagggctcttaaaatgctcctgccagagcaatccagacagtgcctcctcctcctccagaaacttgaccttggcctctgggctcccaaaggggaagggtgtacagaggggacttcagggagctggagaagcccctgctgtccttgtgactgagatggagctttaaggagcccccacaacacagtcagcctatagggaagaggaggaaacagagggaaggaagatgggcagggagctggtggtgtctgctgattgggggtaaaggaagtggtctctaaaaggccaaattacccccagagaaacaagaaaggaacaaagggaggactcaagactctgcctgtgtggggcacgaggaatgaggcttgagagagctgtgatctcacctgcgattttgtattctccactctgcctctgaaccccacggcccccggcctggcccaccattcaggctccccagccttgactcccacayggcaccagyggtggcagagcagtgggacacttgctgtgggcagtctgggcagcctctgttcaggaagcctcctgctaccactgcagccagccaagtgggcaagccatttctcctgttcctccggaagtggctaaggtgatgtgtgctggggagggagtggggaggggaaccccttcttggactcagtgcatgccctgggttcaaagctgaggggcactgctgcaaaatgctgtgcaaatataaaatcctttcatagttattgtcatcgtcatcactgggcacattgtgccacctcccagagcaggcactgccctgcaggtgatgtggccttgctatcttatggaagagctcctctaccaactagctgtgtgacctcaggcaagtaagttaatctctctgagcctctgactcctctatgagatggggagagtgtggcctattttctgagccagttctgaggattaaatgaaataaacatttataaccagtgttaggaacayaggagatgataataaattccagctcccttgtgggaaaaactagcatgaatttttaacaaaatatcagaatcttcaaggttggtgggaaagcagggtagggagggggagggaggctatttttagggtctagataccaccaccctgagaagagccctgattttcttcactggacactgtggttgatcaactgaagtcattagcatattggttagctcactgggtgcggtggttcacgcctgtaatcctaacattttgggaggctgaggcaggtggatcacccgaggtcgggagtttgagaccagcctgaacaacatggagaaaccccatctctactaaaaatayaaaattakccrggcatggtggcgcatgcctataactccagctactcgggaggctgaggcaggagaattgcttgaayccaggaggcggaggttgctgtgagccgagatcatgccattgcactccagcctgagcaacaacagcgaaactcagtctcaaaaaaaaaaaaagaaagaaagaaagaaagaatattggttagttcctttgcagcccagtttgtgtggttactggatcagattaggcacctcagagagggccaaaaccrtgagccaaacaagggcttacccagaccttccccctccccacattttagtttttcacccatccttgaatagacctgggctctgtcctaacaggctgtggtagcctgggccggataaactaccctcacctcatcttcccttcccagggtacgggcagcccaaggcctctctcccaggtgaataggcacacagccctttggatatttgtccagaaggattccttaaggtcactccatggtcctccatggtgctggaggcccgaggtcccagcctccctagaagttgttgctttcatagcagctaggtytcccctgctgtggagtcacgrttctccactcttagaagtcagyccytggccccagccagcatgggctttgcttctggagaggctgaggggagaaaggaagggagtggcaactcttagtgcagaagtgtgtttggaagacacccagagaggaaagacgttcactccaccccacccccacagaggccagggcagattcagaacaaacccaggcaaagccctgaagaagctgccttgactctcaagcagcctcttggctgttggtgagggaagacccgccttctttcttgatcatcagagtcttgtgagcaccaggggggaatttatgggcctggtagctttaggttcagaaaggtcactgagaaaggagatgccagcttgaycccttcattccagagcacccagggatggcgttgtctccagtcgggtggtgttgggggctgaacctactgtgggttcatggtcatcctcaggccagagaacttttcacaggacctagaagacctmtcattcatgctgagacagttcagaggttgagcctccttctaagagttgtccagagggtaaaaagaaaggtccccagaagtcttggttgagaggcagaagagggagtgggcaggttcttaggcagggatcacacacagtaaaagatacaggcaggtcctgctgcagaaggccccagatcaacttggtcagaggcctagagtcctactcagcacccaaccttgggttccatcrctgcctgccctgggcctcagtgtgtcccctttgaaatggggcagacaggagtccctggccaccctcacagaactgaatgcagtgacaggtatggtcctgtgaccgccccaccccaccactgcttttcctggaggaaatggggacagtggtgccatttgcaatgtggctccatctggagtatcacgtgcaccaatcaattcaatgagacccttgtgctcactgctggattgtgcgatgaacttactgcatctgtcctcaagaaatgtatggtttagaaaagaagtaagacatttcacacaaaatgatcagagcagtcattctgagtttctctttccgcccccacccacattatagacggcaccaaaatgtatgtttctcatgggcttgtatgaacccatcctcccyctgctcccaactttctcccctgcgtcatgaaatcttttggaaagcaaatgagtaaaaatgattttaatataggtataagtttgactctacctgttttaatagaagtaagctatttccaagttttagtattctaactactataaatgacagtttcctttcagtgcctctttttgtttgtttgtttttgagagggagtctctctctgttgcccagcctggggtgcagtggcgtgatctcagctcactgcaacttctgcctctcaggcttaagtgatcctcccacctcagcctcctaagtagctgagaccacatgaacatgccaccacacacaggtaatttctgtattttttgtagagatggggtttcaccatgttgcccaggctgacctcaaattcctaggctccagcaatctacccacctcagcctcccaaagtgctggsattacaggcawgagccaccacacccagctcaacacctcttagtggataatggttgagaatcaatatatgtactagaaagcgaatctaagacaatgttataattgtgctatatgtcagccttgttgtttcacatgtaaatcttagagttttatcacgtcacaaatgttcccaagaatacacaataaaagycaagaaattgtagcttgtcatgaattaaatgaattacttgtaaccaaataatttcaaaagcaaaattataaaaatgctttcaactgttttcatagaaaaataaatatatatttaatgtttaatgagcatttatcttcacatttgatttaatgcagggtgagctgaagagttaaaagggtttaaaaggtcttgcttaaaccatcctccaaactatgtccctattttctttaaaatcacctgagcaggatatcccacagtcactcttgtttacatgctccacagcctgaagtttcaggtttaagacattgcaaaacaaccttttagagctggaagagatcttgttagctggaaggctcctaggctggttgagcaggaggagagctctgggggtgtcaggggcaggttggggacaggagacgttcttaagagcagaagtagtaccagtagcgtgcatgctgcctcagtttttcttgrtgtattaaagacttgtgkggcctcatctccactccttctccaactaaattaaccctattctttttatttttattccactttctaaacggtttcccattttcatcgccctgccaagacctcagcagctctctaaaccaaacactgaaatgctcaaagtgagaaaactgtttctttctctccagggcaggattgtgtcttaactgtggggctgccctgacaaatcacctttaactcacaggtctactatccttccagatctaaagaacgtcggcctaatcggttcttggcctattttggaacggggcatcagaccatatgcagtggccattgagtaacagtgatccagcccgtgctgttttggattctgagtccgctctcagcagcaagctagatgttttggtctggggcatatgaggcaaaagagaagtagaaaatgtggctctgcagtcacgaagctcatgccaaaggggagaggcacgaagcagtaaagaatgcagttgtgcyaaattatttggtgcaggcaaagaactggcgtttgcagaagcccagtgcccctggagcaacctcaaccaatgggtagaatgtggactggcaggaggaaggggcattccaagtcagggatcagcggcagtccagacagggagagggtaggtgttggtgagttcccaaaggtgtggacctggctggatggaagagatgtggactggggacacaggtggaaagtgaggtgaccagaatatgaggccctaaaagccacatgatggggagcggggaggtctgtgatgtgatgcaaaaacaaacctgaactcctggggtgatttttgaacagggggaggcatggccaccgctgggccgtagtgtgtggcagatggaggcggatatgtcacatcatgtaatcgccaccattgtgtggtcacagaatcatggtcggggaaactagatcagcaggtctatggggcccttcaagctaatctggactgaactccttttttaaaaatgtctttttagtttaattttcatttccaattaatcccactcctccccgttttcaaagtaatgcacatgtaatttagaaaactctgaaagtacagaaaagaatacagaaacaaacaatttctcatccacatccccagagtaaccataaccagtgccacctgtttccctccagtctgcattttcacgtgctacttyctttacatggttgggattaaacagtatgaataacccaactgtccattmgctatgtgagtttgaatacttttagtaacaggatggtttatcttttttggtaactaggatctcactacatttttaggtatgccatgcctttttaaatagagagcaaaataaaaatgtttttccattatgaagtaatatatgcttatctagaaaatatgcaatattaaaaactgtaatactttaaatcactcataatccaactgttcagaaattaccactgtgaatattttggggtattttcttcgagtattcttccaaaataatatgcattttaaaaacaaaattggaattacaccatatacaatttgaatcttgctgcctttatttatcaaatcatagatgtttccatttccacctcacatttattgagtacttagcatgaaccaagctatttaaagcattttacccatattaatttacttattcctcacaacaactttttgagataagtacaactttttaatctcgccttcacagacaaggtaagaggcacagaaagtaggatttggagacaaatagtctgactccagactctgcgttcctgtccacactactgcctctccaattggtttttagtgaaacttccttctaccaatctgacccgtgttccactggtccttgttcaaaccctcgaagccccccaccaaacacacacacatacacaagtccaatctcttttccatgagacagcctttcaaataggaaagcagctttaaagtcctcaagtcttttctaagcttaacattcttatctctgctattcttcatgttccgaaggccctttgccatgttaggtactcaggcaggtctggttcttccatgtcccattaactgcgtagctagaaacaaatgcacggctgtggtgtaacctgcccaaggaagtctggggtcagcctctccatctgtgtgtgagagacatcagacagctgtcagtgtagccggagctgcactggcttttccatatagcagctgtgctgcagtaaacacagtgcttctccacattcttcagcccctcacagctctatggtctggctcgtctggccttttgattctttgcctggtcctgcagagcacagcccagaagaaaggaagagttgccaagggctttagctcagctgggctgagaactttcatgacatcctggtggggaccaaaatagtcatcaggacagaaggggagacccagggctggtcacaggattggcagcagggccagcaactgccccatcagcaccagcatttctccatatggcttccaagttttgcactaagatatcccaagaaattatcaagacttcagagccaggccaggcacagtggctcacacctgtcatctcagcactttgggaggccaaggcgggggaattgcttgaagccaggagtctgagaccagcctggccaacatagtaaaactccatatacacaaaaaataaaacattagccaaaagtggtggtgcacacctgtagttctagctactcgggaggctgaggtgggaggatcdcttgarcccaggaggtcaaggctgcagtgagctacgatctgctgtgctggagcgccactgcactccagcctcctgggtgacagagtaagaccctgtctcaaggaaaaaacaaaaaacacttcacagccagtgtgccagagtccaagcccacaggagggatcagtgaggaaggaagctctgggcactggaactacacaaatggcactttcaagtcaggaccatcttccatctctgggtctgtttggaaaaaaagaaaagcagctttgtttgtctttcttctggcactgaccactggaatttgggctcaaggcaggctccaggtaaaattgtcaaggtcatgggctttgttcttaacgtcttcctcccttttgctttctcctggcccagccgctcctattttctctaagggtcctgatagaggagggagagtaacctgataatttcatattaaggcattccaggtaggcagaggtttaatttgtcacccctctcagagtaatatccttttaacagtaatctcttggattccaaaatgcttctatctaaaaatattttcagcaggaggagagctttcagctatccctcaaattacaacagtggggccaatagcctcttccatctatgtatgataagaacaaatactacaaatttggcactgtaacctttacatctttgccccttaacttccacacgtgtgagatgaggataatcataaaacatacggcatagggttttatgagaatcaaatgagataatgcatagaaagcccttagaatgaacctgaaacataataaaccttctatatgtgttagatgttattattattattattttgagacacagtctcactcttgcccaggctggagtgcagtggcacaatcataactcactgcagctttgccacctcagcctcccaagtagctgggaytacaggcatgtgccaccacgcctggctaatttttctatttttttgtagagatggggtttcactatgttgcacaggctggtctcaaacttctcagctcaagagatctgcccgcctaggcctcccaaagtgctgggattacaggyrtgagccaccatacctggctgctagctattattatcactatgaattgttattttaatcacagagaagaatcctatatattatactattttatcctcacaaaaatcctgtgaattaagaatcattggtcctattttatagataaagaaagaaaattaagagattaagtatgcagctaagtaagacatgacacagagccaagagctctctgaaaggctcattctatttgcttggtagggcttggggagagtgcacagtgggccatccctgggcctggtgtaccagagggtataagagaagccaagattcagagtccaccctcaggaagctcagcagaatctgagaaggtgtcagcagcccaagaaaggcgccatttcaacccataatgttatagcgcttcacttctcaccaactgcttttcttctgaagggggaccccaggactattttccaggacaactcttcctgtttcaacatgtagaaaagtaaagaaaataatataataaactacatatacatacgttagtgtgtatttccaaaagataagcaccctttaaagaaaaaaaatatatactatactaccattatccctcctacaaaatttacagtaattccttaatatcatcaaatatcaagttggtgttgaaataatttctctgtctcatgttttttacttcacagttcattttatccaacaaagacagtttctctgtctcttgcatatctagaattccttcccccacagcccgacccctctctttatttctttgaactgtacgaagctaggttatttgtgccayagaatctcccacagtgtgaatttttgctgattgcatccctgtggtgtcatttaacgtgttcctctgcctcctgtgttttttctaaactggctgttgaatctggaggttgatgggattcaggtttaatgtagcaagaacatttcaaggtggttattgtactttcctcaggaggcttgtgatgtgtcctgctctttcttttggtgacaccaaaagccactgataatcattgcctagagcctctatttcattagggattatctttcctttttcatttgtttgctggaatatttctatagagagaaacttacccttgttaactatttggttaccctgataaatgcccaggataagtgttcgatttcttccctttatttataatgatttattatttatagataaaatgacatgatgcctgtgatttgattcaaaataatccaggggagaggggactgggtagggatatagaaaaacaggaagagccgtgagctgatcatcgttgatgttgtgcgacaggtgcacagaggctcattctactattccactcttatgtgtgtttgataattttataataaaaatggtggggttttttcccagtaaaaagttaagtaataatttggttccttagcatcctccaagggtgagcaataagtatgttggttggttggttttagggttgtgataaatgtaggaacataaaaatatttgacagttttgccgggtgcggtggctcacacctgtaatcctagcacttcgggaggctgaggcgggtggatcacctgaggtcaggagttggagaccagcctggccaacttggtgaaacctgtctctactataaatacaaaaattacccgggcatggtggygggcgcctgtaatcccagctaytyggsaggytgaggcaggagaatcgcttgaactcgggargcagaggttgcagtgagtggagatcgtaccactgcactccagcctggggacagagcaagactccgtcaaaaaaaaaaaaaaaaaaaaagacagttttaacccatggcagtcgtttttcttatatgctcaagttgttccatcgttggccagtgggagcctcttcaagctggctcccaaatactttttgaactgagtccagtagtcttcgctggtgtctgtgctttcagcgggccaaggtgtcccatttgtgtgcatttccttcccagaccgggggctcagccagttttctgaagtagggctcttgtctttcactaaagatcttttctgtggcatgactctcatcattcctgcctggccactgttatctaaaaagatctctttgagcctccagttaggttctgtggccagaagcagaatttttctccccacaccccaaacaagtgtgcctctgccaccctctaaccccactaccgctaccctcccacccctacccaagcaggtgtctcagtgatgcgttgactgtgctggtgggtgggtggaagggaaaggagattaaggagattaaaatctgactttaaagtctcaggcagtaactttgcctgaggctggctcccccttcccagccccacccccagactcagagccagggagaagmaaaagagggcagtgagactattcagtatctctatccatctataattaggcagatttctcttgcgaatgaaatcagagagaaatatttaggaagaaggaagtggggtatctctggttcacacggctttatctagtcttccgggggtggtgaagggagagggtgtgcagagcaggcagagccctccagagacaagtacaagatgaaaacggcatagaagaccaaaagggcacaggccaggagcagccatcagatatgcaaggtgcaaccaagtagaagatgagagtgtagtggttaatttccaaggccagagctagcagatccgtgagtcagtgtgacaaggaggctggtgaccagtaaaaccccccagcaaaggagtgaggggctgcaatgtgcaagaaggggttccccttcacagtgagagctcctcaaagtctggggggtctccagtcaggaatgcttaggtgaggggtttctataccctgaccagacacacatcataatcttgcagagcacagtgacccttggctgaaagagagaacgtggacttgcctgtggcagagcagaaaagacctaggactcccagttctgcacgaactccccagctgtgtgaacttggtctgggctgttccttcccatttttttttctaatgggaataataacagcgcctcattctcaagctgcagttggggttgaaggagttggcgagaagctctgtgaatcactggctgtgagcgcggctaaatgacatttctcctagtagcctgtgggcgtgggtggtctgcaggtaggcaggaagcaaccttattttcgaaacaatatgcaggttgcagctgccctcagatgggccttggaggagagaaaggcccagagagaaggagatggcaagcagggagcaggagaaaccacacttgccccctgggcggtggagggcagctcgggacagctggctatctcaggtcagagaaccacccagagggtgtaagagggagtgtgaacacagaaccacagctcttcaaggaaaggcctcagaatagatctccctgtaagactacagatgggtgtgtgtgtgtgtgtgtgtgtgtgtgtgtgtgtaaaacttgaagaagacgcctaaggagtagacatctgatatccttcaaggccccagctgtagaatacttgtgtgggctggagggcaaaggtggtcaggccagaggagcaggtgggcaggggctgccgggaaggccaaggaattccacacactagcaaatgttcactgatctttcatgcaggcaacacaggtgtggacacacaaagaatcctctctaggccatgggggtcactaggccatgaggacaccaagccgaacaggccctcacagtgtgtgggagtggcaggatcagacacaagagggtcagacacaagattagtaatgttgtgtctccctcaagaatatctgcatatttagagcgcttccaacagatgcctttgcccactttgattttacttctttaaagaaaactgtgataaatacacaatctgcagtaggacctgacttcaacagccagcaaaatcctaatagatgtgcaacaataccctccctcacccagctatgaaacagaattcttcgcttcgttgttactgtccccttgaaaaaaaaagtccacattttgctttcttaattgtaatgcatttaaatagataaaataaattttgctagacttgctttcccgcatgtgcacacactgtgtgtgagtgcatacaaacacatttggccataggcataattctgccaacctgaactgcagcctaaaacacttcctaatttttttattgtgagcgttttatcaggacattgaaaatagtacccccaagaaaatataagtgaatgatctttgatctcaaaatgaggaaagattttctaagcaaaaatctgatgacttaaatttcaacttctatgtgccaaagacaccaaataaaaggtagatggtaaagagggaaaatattcacagtatataccataggaaaaggatgaatccttaatatgtaacacgctcttagaaatcatttagggctggacacagtggctcatgcctgtaatcctagcactttcggaggctgaggcgagtggatcacctgaggtcaggagtttgagaccagcctggccaacttgatgamaccccatctctactaaaaatacaaaaaattagttgggtgtggtggtggtcacctgtagtcscagctactcaggagrctgaggcaggagaattgcttgaatccaggaggcasaagttgcagtgagccgagatcgcactactgcacttcagactgggtgacagagcaagactcagtctcaaaaaaaaaaaaaaaaaaagaaagaaacagaaagaaaaaaaaaagaaatcactttgtaagagggtacatcaaaagaaaaataaagccgagtgtagtggctcatgcctgtagctccagctaccctggaggctgaggctggaagatcgtttgagcccaggagttcaaggctgcagtgagctaggaacataccactggactccagcgtgagagacagaatgagacccccatctctaaaacacataaacaaaatataagcaaaagtcatcaccacacaattcataaaataggaaatacacagggtgaagaaaacacatgaaaaaaatgttcaacattgctactattcaaaaaaatgcaaattttaaaattagactatttttgcttactgggtaggttgagttgttttgtttgctgtgtgtctgtttaatgataatacccagtgtggtgagaacacaatgaattagagtctctcaaaaactgctgaatgtaaattggttttgtctttctggaaagtaagtcagccctaagtttaaatagcccagaaaatttagagctgaattactttccagaaagatagagccaattttctttaaatttaagggtgagttactttccagaaaaatatatttgtcttttagggtacatgtttccatgtgtcttaatttattctgaagaaataatcacgctgagcgcagtggctcatacctataatcccagcactttgggaagccgaggcaggcagatcacgaggttagaaaatcaagaccatcctagctagcacggtgaaaacccacctgtactaaaaatataaaaaattagccgggcgtggtgatgggcgcctgtagtcccagctactcgggaagctgaggcaggagagttgcttgaacccaggaggtggaggttgcagtgagccgagattgtgccattgcactccagcctgggtgacagagtgagrctccatytcaaaaaaaaaaaaaaaaagaaagaaagaaataatcagtggaataaaatatttgtgttcaaggatgttgactgcagcactataatactaaaaatcaacgataacctgcatttctaacaataagggcatagctgagtaaattattatacatagcaatacctcaaaatagtcaaaaaataggtaatactaagaaaaatcaaacaaacacaaaccctaacatatgatcctaattttgaaaaaaaggaaagcagtagaaaaaaacattagaagaaaatatagcaaaatgttaaagattatgtttgagtggttggtttttggctaatttttattttcttttccacgcttttctgtattttccttgtttctttttytttttttttttttttttacaattaacatttttacttctgtaagcccaaaagtcatataggaaataaaaaaaatatttcccccagttttggattgagaaatcaaattcttcctcatgttacccaatgaccctggaaaaggcaggtttgctgggggaraaataaggagttctgcttaggacaagtagagctgagttgtccgttagatattgaatggatgttcragtctggatttcaggagagaactggggctgtagatctaaatggtggggtcaacagtatacggatgatattttaaagtactgagaaaaggccaggcatggtggctcatgcytgtaatcccaccactttgggaagctgagatgggtggatcacctgaggtcaggagttcaagaccaacctggccaayatggtgaaaycccrtctctactaaaaatacaaaaattagctgggcatgatggcatgagcctgtaatcccagctacttaggaggctgaggcaagagaatcacttgagcctgggaggcggaggttgccgtgtgccgagatcgcaccattgcactccagcctgggtgacgagagtgagactccatctcaaaaaaaataaaataaaataaaataaagtaccgagaatgaatagatgaaatcacaaaagaagtgtgtaagattagagaagaggtccaaggcctgagtcttgattctctccaagacatctaggagaggcagagatgccatccaaggaggctgtgccccagtgaccataggaggccaatcacaggctttcaaacagctctgtaatgactaggacatatttattctagaacctcagatcatttgcttgaacactttcctttatctctcactctgctttcaggcctaattattggaagaaaaaaaaaggggtgaggaggggagatctgcattgttcttgaaaataaaatcgcttggaaaacagaaaatgtcagattaaaaaatgcagagtcaatgcccgtgactgtcttaatgagtgtagttaagtgtcccaacatcaacaagaaccacttaagcatactgggaagtaatccaatgccagaggacagggaaagactcgatttccttctccagtgaattcccttgtttaactggatcttacaactgaaaatcaaatacgtctccatcttccaagacaactccttagctctgtgggcccatggtttggatctggacatttggacgatttaaatggactcagtcccacaaatgtataaatgcttcttgccaaactttgggaggctgcactttttgggaggctgagggggggcagatcacttgaggtcaggagttcaagaccagcctggccaacatggtgaaaccctgtctctactaaaaatacaaaaattagccgggcactgtggcacacacctgtagtgctagctactcgggtggctgaggcatgagaatcacttgaacccaggaggtggaggttgcagagagctgagattgtgccactgcactccaggaaaaagacaaaacaaagcaaaacagatcacgtattttttagtggtaggaactcctgttttttttttttttattgcagtttgctcttctctatgtttgggaatgtagcttcctttccctgcttggaaggaaagagagcactttattttttggttcccttaattcacaacaaatcagccgggtggagcatctcagtctaggagcgactgcatgactgggaattttagccactgtggatttgttggttacaatttagcagaaggcagggctaagaacaaaggtgggtaaagaaaagtgagggttctcagccttgrtttccctttactgggagcaaagtatcaagggtagaaataccagcccttcccaggtgtctggtgagtgcctgagatgagccaggtgacctgagctctctatgcaagtcactgactgtaactgaaggaagaagactctaaaacagttcctgctgggctaccaggaggctcactttgaggagtcttcgaattaaactgattgatggtctctctgtgtctggaagaggtgttttggcttcatgtcagagctcccatcagagaggcctgagctatgagaggtttgaaaaatgattcagaagaaaaaattgactctgttcaataataaattataacgatgctttgtatttatagagcatccttcaactgagggagtgcgaagttctttatgggtattaacttgcctttctcacaatagagaaaagataattttgtcaattcaatatttgtgtatcttttttctttccttttactgggggaggaggacagctattacagggacgttttcttatattaatttggaggcaataaatcttcccctcattttttttttactggaaatcttttctcattgggtatcacataaagaattaaaaataaatagctatgcctaaaatgtatgtgtatgtgcatttatatgtcggtgtgagcgtagtatcttcataaatatttaatttttactgtctaagccttctccctcagttttcatgagctagaatttattcgccactgaacactgaagctattattatttgcttttgcgcctaaatgatttaaaagtcaattatgaattggctaaggggattggagaactctggcatgtaatacgcctctcatgcttctatttgttaccaaatgtctggaatgagaaagtgtccatgatgggaaatagcccacagaagtaccataccgttattaaaccgaccagacggaggccctaggtcactgggatacgagcaaactgtgctggggttcatgtgggtgggttaggaggctggggagagcatgacaggggatgtgcagacagacaaataaatccgataataaagcagaagctcagaactgtccaaaatgatgactgaaagccagcagcccaaggagaggctgctcttaacagccagcccccaacgcttagggctgtgctctgcaccaacctgccctagtgtcctggggagggaacgtaaacagttcagcgctttctatttaactgcaaagtgctcatcttctgagtcaccgaggcaaagaagcaggctggaaagtagtaataatccaatccaacagaattatctgttgaacagaaaatcccctttggaatttgtgtccttggaacgttccaaatggaaaatgagagttttcaggtgggaaagcaaggcatggtttcatgagtcagggtgactctgcgtttgcatgaagggccgcagaaaagcagattatgttaaccttgaaattagccaggagcgaatggcaaatctttgttaacaagcttggagtccacgataaattttaaaagtgcaccgcaatgagcatctgtaataaatcttccgttgcctcctggttcaggtctgggactgaaaaggataaaggggccgggcgcggtggctcacgcctgtaatcccagcactttgggaggccaaggcgrgcggatcacgaggtcaggagatcgagaccatcctggctaacacgtgaaacmccgtctctactaaaaatacaaaaaattagcagggcgcggtggcgggcgcctgtagtcccagctactcgggaggctgaggcatgagaatggcgtgaaccygggaggcagagsttgcrgtgagctgagattgygccmcwgcactccagcctgggcgacagagcgagacttcgtctcaaaaaaaaaaaaaagaagaggataaagtacttctagaacaggagctaggcctcccgaagcctttgcatgttaactaactaatcaaggggctccagcctgttgggctcacattgcctggtctttactcacttgactttccacaggcctcgctcttgaaaactgaaattgctgcatggcattcattacacacacgtatgtatatatgtgcatatgaaaatacatttgcataggtacctatccatatgtatatacacacatacacacgtttttcctcataaatgaaactggattaaattttatttccaatattcaggtgactcttaaaactgaggggaaaaattggggataaaaagcaggacaaggcaataattatcctgtagcttatctcaaaatggaaatttccccaacaacattagttctaaattctaatatttaaaaaaaaaaagacgaatgtggtacagtattaaaatggacttacatttaatacacagaacatctagcagcttggatcagtacaaactgattttttttctaaaggctatcagagttaattggcaaatagtcagaaaactgtgcaagggggaggaattcttctgtttgtgcatttgtttgattttaggtacttctaagtgctgtgattggtagtaatactgagatctgtgctgagcctcgaactccaaagttgcaactcaaatccctgatraagttaattaagtctgagtcttgggctctgcagctagttgatgccagaataaatctaacgtgttgtcagcagactgaaccagaagagcaaagctccaaagaggaatttctatgcagtaaatatcacttaaattcctctcaaagttggagctggtgtcaaagtccagaaaagcaatattccctggcaattgctgtcaggagtgtgtgcatgtgcctggccatgcatcatctgaacactcaaattagcagaggaaaaagatagtgagttaatatcacccagctgactgctcaaagaactgctttaactgtagccagagaaatatggagggggcatggccagtcatcaatgacctccaaatgactagatgctcagaagtgtctggcagcctaggctagataaataattcctgctgctgtgaaataaataaattcccccaaataattcagggaaaccaattctttcactgcccagttgctgagctacaagaaactagagcaacactacaggtgaagaagaaagaaaggggctgggtgcggtggctcacgcctgtaataccagaacttttggaggcctaggcagatggatcacctgaggtcaggagttsragaccagcctggccaacatggtgaaaccccgtctctrctaaaaatacaaaaaaaattagccaggcgtgatgccgggagcctgtaatccagctactcgggaggctgaggcaggagaatcrcttgaacctgggagrtggaggttgcagtgagctgagatcaccactgcactccagcagcctgggcaactgaacgggactccatctcaaaaaaaaaaaaaaaaaaaagaaaaagaaaaaaaaaggaaggtggaaggcatctatgagtgactttctatctcactgatctccagtttataagggactggccactggaggcaggttggcctagcagggtggtggggagggggctggcgccttctccaacaactctgtgtatgaggcttgtaaacacatgattctctgtctggataggtctctgaaggagaagaaaggaggtggggaaggaaggaaagaaataaatatatggacaggaagattgagtattggagggagaagagaaaaagcaagagatrgtgaaaccaataaaaaggaaataaacgtaaaatggagacagaggggaagaaagagctggaataatactatgtggctctctaaaagttgctgcagtttttttttgttgttatttgttttttgtttttgtttttgttttttacagagcacacactgcagataaatagtgcgatcttggggccttttcggtaactgtacttctattcttctttccctttgcttttgtctaattaaaagtgtctgcctttaaaacagagacaattgaagtttcaagttagtgttgtcatcttctgtccccaggcatttcagagctagaaaaactacaggcaaaattctctgtagatcctttttgtacccctcttcttctactcaccctgtttccccagctttctacttttagaataggagtgggggctgagaaagataaaaatagcttttgagaattcaagttatttgggcccctgttttgggagccagcatccttgtccaaagcagaaagcagccagtcctgagtttgagggaagcttctccccatggagtttccttaggggactatttctgagccgttcttggaggaagcaacccctagagatgttcagaactggaactaaacccatcttcccctgaagaaaaacaggtttttaggaacccatcactcagcagggagccctctgtgtttggagccaagtgtttggggaaacaaataagctgccttcaatcagcctgagttggaaacgcaggaaaaccgcatcttcatgctggactccactgcaatcccaaggtgattttagttcaaggagagtggcatctgcttgggggaaattagaaacttcttatttccatttataaattaggcttyactaaggaagagaacttaaaaacagttttattgttgtccactgaaaagacaattacttccagccacaactggcacattccatggtaaaactagcgcaatcaaacacacaacactttccaccgtaggggcttctttttgaggctgtcattaaaggcatgtgtcttattagccagtgtcaggatttctgggatgttttattgtctcgagtaatgagaaggccatttccagggctgtgtgctttttaagtcagcaaacaaaacattaaaaacaaacaaacctccttttctttgtcaccatttctctgaccatcccctgtaaattcgtaggacayggtactcacagaaaaaggaaaattcattagccraatgaatcgctgatttaaattcaggcaataggttgacattatccttaattgaatagttttagaaaatgaatctatgtagatccagatcaaattctaaccaatcattrcaatggggtcttttttcttgaatgttcaaagttgattttcctccacaaaataatractctttggtgtccaagtaataaattagcacagttcagttcaagttcccactaaattggaggctgaaatgtaggatcaagagaaaggagatgcaagttacaaacctagattctaaatatcccagcagactaactccatgaaaccatcttttattttttgtgaataagtgtatgtgtgttagcctccctctccctttctccttttaaaaaaagaaatgatgactttttcaggtctctgcttccagatatgaggggctttaggtatttgaagtcagragggaggcaggaatgagcactgctaattgggtgcatcctggtgtgctaatataaaggacagccaatgtaatcgtgggtttctgagtttgctgtctgtacctggcctgcctggagactaagaaaggcttgctggccccaggccataggtcacattgcagccttgactgtaattccctggacaattcctgcaccagaacagatagtgtgacctcctatgctaaccagccgagagcaacccatgctcagtggcaacgcagaaaagccacaaacagaacccaggaagggttcctgggatggcccggcgactgcccatcctccagagagagctggatcaagcaaaagaagcagtccccaaattcttagggccagggatgccaggtaacctggcacccaaggctatctgaggagacaggcaatgaggctatcaagagtaaagatggaagagcaagcacagatgatggagaaaaaaataaggctggtgggagggaattaaggagggaaatgcaaggaagagacaactgagaggaaaaccagagggaaggagtgtatcagtctgaagacaggatgacacaggagaaggggaggatgagggccggaagggcttcaggcctgcagggagggagggcagacttttccagggggtgggagaattgccctggcccccttttactggtcccattctttggacattgtagagagaactcaggtgggggaaatggcccagcggcgggaaccctggcacacctctcccagcagggatcggcccccaaaaggaacagttctcctccttttctggcttagaccagggcaggccccctgtgcagctctctcccttgggttctcgtgtatgtagatacacttgtttacacacacaggctcctacacaggcacatgcagagacgcctaggtccccaacctgggttgtgacttctgtgtcgaggagagccataggaggcacagctttgccagagttcctgcccattgctgcggcctgttccctaaaccacactggtctggcttcatcgctggactcactgtgtggcccacagaggcctcttctatggtcacagggccccagtgacattttgggaggggcttcagggaygctggctggtaacccaagagcaaccctaaatcccaacttggtccatgtcctagaatatcaaaggagaatcttaaaccctgagtgggatgaggagcctcctaagcttgaagrgagccaggtggggagagggcctgggctccatgcaggttgggcatcagttarcctgtgacagtggccaagtcccatgagacttacaccatgctaaatattcagctttcctcctgtgggcatcctatactctgtgaattggtcagaaccaatctttaatccagcatcctatcaggcacacctccctcctgctgctgtgtgcctgaagaatgyrgagtgatttagatattcattgacctaaagtgcaactaaggtytgagggtgggggacacaaaagggaggttaatacaaggcatcaaaaatgtactttgactattttctcctttttttttgagcctgtcgcccaggctggagtgcagtggygygatctsrgctcactgcaacctctgcctcsyrggttcaagygattctcctgcctsagcctcctgagtagctgggactacaggcgcccaccaccacagccggctaatttttgtatttctggtaaagatggggtttcaccatattggccagggtggtctcgaactcctgatcttgtgatccgcccgcctgggcctcctaaagtgctgggattacaggcgtgagccaccacgcccggccgactattttctcttatttcaaaattacatattcttatacactatggaacttggaaaataagggaaagcataaagaaaatttaaatcacccataatttcacaaaccagagatgaaaccactgctaacagttgctgtaatttcttccagtctcttttctacagtgagatctgtatttctagctggctacacatagtataaatctaggtttagaatcaagtagaaatagctctagagtgctgccgatgctgccattggctctgatagtggatctcatttatccctgggtccaggtgagaggtcctgaggacccaaatcatgggacaacagagagaaaaagagaagaggtgacatgcctaggggcggcccggctgagtttggaagccgcaaggtgaactccctcccatgggagaaagctgccatgggaggcggcagcccagcagtctgcctctcagcccacgatcgcccacgtccccagcatgtccccagcgtggcagctgcaggcacggcaggctttgtggggcctttgatccacgcaaagtacgtcataggcgaatgctcacagcgcgtgggctgggcacaccaagggttgccaaactgacaaacacacctccaggaaagccttttggctctggctgggcttcattctggctgcctggacagcatggcctgaataggaaacttgcaaatgtgtgtgccctgtccccctggtgtctcccagcccagactcaggagtaactcagagataactccccgagagttgaacaatgagaacacatggacacarggcggggaacatcayacaccagggcctgtcgggggrtcagggggctggaggagggatagcattaggagaatatctaatgtaaatgacgacttgataggtgcagcaaaccaacatggcacatrtatacctatgtaacaaacctgcacgttgttcacatctagaacttaaagtataatttttaaaaaaagaagaaataactcgccgaggccgtgggagtagttagtagtggggcatggggccagctgagaagctggctctcctttctgcacattttggcacacagggcagatttttctgaagcacaggtatattgcccttcaacatctgagacatacggctcttggtcataatcttatttctttwtttttatttttattttttgagacagggtctcactctgtcactcaggctggagtgtagtgatgtgatcttggttcactgcagcctggacctcctcgggctcaggtgatcctcccacctcagcttcccgagtagctgggamtacaggtgcgcaccaccacacccagataatttttctattttttgtagagacgggatttcgccatgttgcccaggctagtctcaaacccctgggctcaagccatcctcccacctcagcctcccaaagtgctgggattacaggcgtgagccaccacacctggcccataatcttatttttgttcaaactttcagaggattagggagggagagtagaaaacacaggaatgatgccaggaaacctaccctgggttcagccccaaagacaagaattcggggaaaacctacctgacttgatcatttattcattcattaaacccttatgattgcccactgcatggtggttagctggggagtgaagagtcaaagaagaataaaacatatcccaggctttgtggaattctcaatttttaacggggacagacctgtcaccaaatattagtgaaaaatgtgccaagaactacagagcatctgaaaagttagaaatattaccataaacttactttaaaacagaactttagccacattttcaaataatatgctcatgtttttcttcaaccttcacacaccatttcaggaagtatctctacatttaaagcgagtccagttgttaatgtaaaaaaggtacaagaggccagggcacagtggctcaagcctataatcccagcactttgagaggctaaggcaggcggatgacctgaagtcaggagtttgagacaagcctggccaacatggcaaaatcctgtctctactaaaaatacaaaaattagccgggtgtggtgacgyrtgcctgtaatcccagctactcaggaggctgaggcaggaraatygcttgaacccgggaggtggaggttgcagygggctgagatcatgccactgcactccagcctgggtgacagagyragacttcatctcaaaaaaaaaaaaaaaaaaaaaagagttgtaaggaaaaagccagagaaagtagtgtatttcttgaacctttaaaaaaaattaacaattggacccatttctttacatttagaggtacttcacctgaaaacatatctaaaggttacagaaaaacatattgactgtattatttgaaaatgtaactaatattctgtttaacaataaattctccccatgattttttttttttttaaatttttgagacacagtttcactctgtcaccaaggctggagtgcagtggcttgatctcggctcaccgcaacctccccctcccagcttcaagcaattcttgtgcctcaacctcccgagtagctgggataacaggcgcacgccacaatgctcagctaacagatttttttttttttgtatttttagtagagacggggtttcaccatgttggccargctggtctcgaactcctggcctcaagtgrtccgcctgcctcagcctcccaaagtgctgggatttacaggcgtgagccattgctcccaatttctccatgattcttgacttttaggtcactccatagaacagaaacagatgcccattgtgaaggttcagtgagccaagattgcaccactgcactccagcctggacaagagagcaagaccctgtctcaaaaaaaaaaaaaaaaaaraaarararaaagaaagaaagaaagaaaaaaacagatgcccatcaaaaggaaatgcattttgctgaaagtagcrcagttttcccagggaaataacatttgagccgagccttgaaagatgagtaaaagttcgtcaagctgaaaaatttcatcgtaagatgagtcgaacacagggtcattgtgagccgttggctggcccccgcagaaacctggcagcccctttcaggtgaacctccagtccattctttattcaggcaccagtaggatgctgtgctgggtggcattcctgccccagcaggggctaggcctgagtcacatgcagggcaggggcctggtcacagcctggggcctcacctgagaaagacctgtgagaaaacatyccaatcccactcattcctgcccacaccagggctaggcacgtggggacagcagggacggtgaagagcatgtttgggaatgtgatgttctgtggtggcttgttaggaaatcataagtagctttctcctgatgaccagcttgaacactggatcgctgagcagggcacaggtggaaggaatcagaaattactgtattaacaccagtattttggaggcacagaaacaaggggtgaagcaacttccctaaggtcacgcactttaggtgatagcactggtgtaggctcccataaaaatgttctttcaggtctcttcgaactcataggttcttgaaaatgtgaggggcgaaattccttcattttatggcattaatgaccactaatcaatcaatcwttctctcaattatctgagcaattatgtaattactgagtcctagtgatgcctacaactgggcttcctacagtcctgcagtggtagaaacaaaggaactagaaatcacggtgtttaccttggagcaacctacaatctagttgcataggaaagaacccatttgacacaatgagagtaacaaaaacaacgaatgcagttgacattggaatgggctggagctttgggagaaggaatccttaggggaagatgaaagctaagaaaggcttggagaccatcaatggagaggaagggaaaggacagtatctggatggagagctctgggcaatatttaggaagactcaagagcgcctgctcatgaacagatggacagacaagcgtgtgctccctcctgaactcacagacttactggctcacctcacagcagggctccccttccaggctttgcaggtgatatggttccttctccatccaggataactccagtgaaggatggacagaggcaagattctagctccattttggctgcaatgygtccttgttcttttctcctttgctggtcattctggtctgtttgggaattggactcgttgtctctggtcaactaacctctaaccctgccagggggactaagcatgctacagagcgcccaggtcccccacctcccacttccatatagccctgagcaaaccacttagtgtcagtctctaaatggcccagagcagcttgtggctccattccaggagcaaaagcacygctgagaatgtgcggatgcagcctgagacccccaccatgccagctcctagcgctaaagcaggctggtacctcacactgctttcagaatcttctaagacactgtgggtgtgaggtcttccaggcaggcatcagcacccaccaagccggtcctcagaaaacgactggaggtagagaaagcagggctggaaagagacaaagaaattccaggactgtcctcactagcatattctaaacgaagcagatcttcaggcagccgtgttaggtatgatgtccccgaragagtacacattaacatgacaaagtttgaggaatgaacataagatggccatgcaatgtcaaagtcatggctcacttgggtgcttctctgacagaagagatagagtgtggcaccagtagtccctgttgggttctgtgtctacaacagagagctttggggctgccctccctcacagagcaggctttctgcaaatgctcaggtagggctggatatattcgtagaatcttccagacccatccaacccagaaggtggtggtccccgaagagtggtggtgtacatgagaagctgggggaacgtgtyacaaggcagacccctgggccggccttcagagagtctcattcacctgctctggaaacactgctaaggacttggcctctgctgtgagccaagaggaggaaagaaacccctctcactctagaactacctttttctgcctcaaccaccttttttcctgtcttttaaaaatttccaaaattctctgcatctgtagtttttgttaagtactttgtcatgccacctggttagctcaagccagagacaatcaggaaaaagctctatcagtggctgtcaactcagccacttccctccgtaccgtggtccctcattcctgcagctgggtgggagccagcacagccccaggcacaggcagtgccggcatgtattctcggagctccacacaggaatgtcccactctagaagggaagataaaatttagcgctctccatgcactgggtatgtgtgccaggaaagccctgaaacttttgctcacagggctcaaaatgaaagcagctgttgattccgagagtggcaggtttgacgacatttggagtccccctatgtgagaacggagagacccctggcgcttcctccctgctatctgaggaagggggagggggcggggggtgggaaggcccagcctctcagggttgcgtctctccggggcttcccaaggaggcagcgccggccctcccagtcttgccactgtcgccgtgctcgtgtgccgggccagccggagccaggcccgatcctggccactgtgcccaccaccgaaggcaggccccaggccgggtccctctccttgcctgtctgggggaccctggtgtcgggctcctttgatatctaaaaaccagaccctcggcccccagcgccggagcccggcgcagatccacgccctggtctctcagcgcgggggcctgggggcgggtgcggttcggggacaagrgaccgcaagtgggggcgggcggcagcgtgtgagcagctcagatgggagatcacgcgcgataacccgggccctggatggcagcgctcgacaggaaacctcgagcgaggagccagctgggggccggcggggcggggctgctgctcccgtaaccgcacgggagccgcggctggcggcaacacggggctgggagcccaccttggctgcatggtgaggaagggccggaggttccttcccaggcccagcctcctctctgtcttgcggagggcgtccttcacgggtgtggtttgtgactttgggacggcggtcccggccgcctgggctttgggcgtagtgggagagctgcccagcccgcagtgcacccggcgtagctttgacccgggagggacccggccccaagccggacgcggggaggccagggcggagaggcggcgtgagcgcggcttagcaggctgaagctcgtctctttaaaatcccagcgaaatattcacctatagcgtatcggtgacggttttaaaatccaagtggcatttcctctcccagcctccgaaaaactcggtgcagtgggcagcggctcggcggggcgtccccctgtgccttgcgtccgggcgggcggcccgcagcgggaggagcccaggcgcgggcaccgaggggcggaggcctggccccggctcggggagctccgggaggagcttgggcttgggctagccgatggatgcacgggtttcttccggggaagctgcgggggccacagggactctgaggaggcgccctcaacagcctgggaccggcaggacggatcccagagcgagggcgaccagcgagcgaggcaggtgmggccctcctggctccccctccgcccctgtcctcccttgcgttgcccaggcagcctgagctcccaaggcccagagggtctccagcttacagttgcagtgggactgattcggtggatcggaaaagcgctttcatctcactcggctgctggtgaaagcatctcgtccttacagcactggataataataacaatagtgatcatgctatttaccagcagtagttggttttctgtgttcatatataaatgtaaccatattcaccaaataccattatcgtgaaagttctgtatagctgaggtccttccaaaccccggcaagtcatcaccagaaatgtactgagccagggctgggcgcaaagcgcttcgctaaatgggccagcccctgtkcctccactttctgccctgccagaatcttgccgcacacaccttctttgatgtaagggttcatgttatttgtttttgttttggttgtttagtattataaatattatatactatcatagttagagttccaaacaccacaaaaaggtgtaaggtggaaaataagtgaaattcacccagcctccccctcccgtggctcctctgcagaagtaaccgtggatgacatttttgtgtgtgcggccctccagatatacatatatttttaacgtgttttttcttgtaaaataatataacattactattttcatttttaagtgtaattcagtgacatgaagtaagtacatttacattattgtacaatcatcagcactatccatttccagaacattttcaccatcccaaacagaaactccatctagatatatttttatgtatatatacatatatatgcagcttacayagtgtttttttcatacacaagtatctagagctttttttgtttttgtttttgtttttgaggcagggtctaactctgttgcccaggatggagggtagtggcatgatcacagctcacagcagcctccacctcttgggctcaggtgatcytccgacctaagcctccggaggagggggctggggctacaggtgtgtgccaccacacccagctaattttgttattgtyattatttgcagagacgggtcttgctatgtctcaaactcctgagctcragaaatcctccagcttcagcctcccaaagtgctasgattacaggcatgagccactgcacctggccaccttttttaaaacctaattatcttgaagatctttcatggtagcacatgtagaattatctgttgtgttttttttaacggttatatatgaatacaccaaaatttatcaggttcctagttgatggacatttacattattttctctgtatactgtgagagtttatcctcagaaaaaattaaattctcagagaaatggcaaaatactgcctggaattttgacataaggggtttgctygaaagtagatttttttgaaatggtgctaattttcaagagcaaaacttgagggcagtgtgctgcgtgagaaagaacaaaggcccggcaagacctggcttctcgtccaggctctgacacatgagctgtttgactgygggagagtcacttcacctccctgaccttcagtctctttatctgcraagtggagcaaataagatctacccggcttacctcactcaattgttgttaggatcaaatgaaataaaaaatataaaagggttttgtaaactgaaagtgtagagcaaatgtttggtatgacaatgattgttacagcatcagtccctggagtcagccagagaaagctacatgtccaagttggcaacaagaggtaagaataagtgtctttctctctgtatatctataatatatatatataatatatatctataatatatatatatkcacacacacacacatacacacacatattgctctctaygtatatatgtacatgcatacatrtatgtttgtattgttctatttatgtgtgtgtatatacacatatgtatgcaagtgtgtgtgtgtatcttacactctatgtgcctggcatatagcaagtgttgtctgctaacctgagagacttgtccactggcsttggggggctcttggtggaatgagcggagggaactgaaacatgcaacctgctcaccaaaggagatcacttgcctgtcattgtttactcccagagcgtgactgcagrcatcgtccctccctcatgtttccttagcaccctgtgcccctctctcgtgggatgatttgtttccttgcccacctctctgctcggctgggaggctacatctgtgtctgtcacctccaccctcactgcccagcacagtgcgtgacattttctcctagtaaggatggccaccacatgaccactcgtgaggygccactccttggcttgtaggtggccatctctccctgtgtctttacatcatcttcacggcatcttccctctgtacatgtctgtgtcctaatctcatcttttttttttttttttttgatagagtcttgctccctcgcccaggctggagtgcagtggcacratctcggctcactgmagcctcygcctcccgggttcaagggattctcctgcctcagcctcctgaagcctcatggtgtaccaccatgcccagctaattttttgtattttattagagatggtttttgttttgttttgttttgtttgagatggagtttcrctcttgttgcccaggcyggagtgcaatggcrygatctcggctcactgcaaccyyygccrcccaagttcaagcaattctcctgccttagccttctgagtagctgggtttacaagtgcctrccaccacacctggctaatttttctgtattttcggtagagacggggtttagccatgttggccaggctagtctcaaacycctggcctcaggtgatccacccgcctccacctcccaaagtgctgggaatacaggcatgagccaccgcacccggccgagttggggttttaccatgttggtcaggctggtctcaaactcctgacctcaggttatctacccacctcagcctcccaaagtgctgggattacaggcgtgagccacctcgcccgacctaatcttgtcttcttacaaggacacgagtcatattggatcagggcccccactaatgacctcattttaacttagtgacctctttcaagaccttttcttcaagtacggtcacattctgaggtgttgggagttaggatttcaacataagaatttcagggggcaaaattcagcccataacagaaatggaggcttagggattattagtgttaatggatgaggaaggagcaaaagagtgaatgggtttcaccctttcaggacaaacaaccactttctgggtggtttatggggcaagagtaggaagagcttggttttgaggaccaggggaagaagagatgacaatgactatgtttggctgaatgcagacaggtwatggaggctggcagtatagcctggattttagggctgatttgaagcctgtcctggggcttgccggggcatctccagttagcccaggggcccaaggcaactgtgaaccttgccttgttccagttggctttaattttttctttgaaatgttattaccatattttaaataaaaacataatgtgtccttgtcaaaagagaaaaccctgcagctgttccccatctcattcagagtaaaagccactggccaaggaagttctacctaacaaccccacmcgcttgtcgccctctttcctagtctcctagaacttcccctcattcatgctacctacccctgcttgcagttcagagacactgggcacaggtccaccacacagcctttccacctctgctcctctgccyggagtgcccttcccygacagatctgcacagctgaagcccgctctgaccacctgtgaaaaacaggagacatctctttgtcacttcatactttcatttccttggctrgcactgagactgtcttttcttttcttttctttttttttttttttgagacagatgcttgctctgtcaccaggtgggattgcagtggctcgatctcagctcactgcaacctgtgcctcctgggttcaagcgattctcctccctcagcctcccgagtagctgggactacaggcacatgccaccatgyctgactaatttttgtatttttagtagagatggggttttaccatattggctagactggtctcgagctcctgacctagtgatctgcctgcctyggccttccaaagtgctgggattggcatgagccactgctcccagtatgtctttttatatgtttgtaagtaatctgttttyctgtctctgcgaattgcctatttatatcttttgctgatttatctcttggactattagtcttagctttcatttttcaaagtattattatttattcacttatttttttttgagacagggtctcactctgtcraccaggctggagtgcagtgacacggtcagggctcactgcagttttgacctcctgggctcaagtgatcctcgcacctcagcctcctgagtagctgtgactaaggcatgcaccatcatgcccagctaattttttattttttgtagagggagggtcttgccatgttgcccaggctggtctctaactcctgggctcaagcagtcctgctagcttggcctcgccaagtgttgggattacaggcctgagccacygcacctggcccatttttcaagctattattgatggaattccaatcctgtaaaaagctttaggaatgaagctgttcatcttagaattatttataatggtgaaaaattggaaacaaatgagcaycaatggggaatggttatgtagatagtggaaagcttattaggcaacctttaaaaaggatatttattaatagtaaaatgacaaagtaacatgaaatatgaatatatgaaataacatgaagtctyagattataacataatactaaatgaaaaaaacaattyttcaggaaatttttttttttttgagacagagtctcactttgtcacccaggctgacatgcaatgacgcaatcttggctcactgcagcctccacgtcccaagttcaagtgattctcctgcctcagcctcccaagtagctgggattataggcacgtgccaccatgcccggctaattttcatacttttagtagagagagggtttcaccatgttggccaggctggtctcaaactcctgacctcaggcgatctgcccacctcggcctcccaacgtactgggattacaggcgtgagccactgcacctgcccgtggaaagttgttatgtaaaatgattacagtttataaataacaaagactttggtcagccatctgccatcatattaataatggctgtgtttraaagtggtattatgggcaattctgattttttcctacttttctgcacttttatattaagttgatttacttgaaaatgaaaagaaaaatgatcacaaaggctgggctcggtggctcacacctgtaatcccagcacttygggaggcygaggcgggtggattacctgaggtcaggagtttgagaacagcctggccaacatggtgaaaccccgtctctgctaaaaatacaaaaaattagccaggtgtggtggcaggtgcctgtaatcatggctgcctgggaggctgaggcaggagaatcgcttgaacctgggaggcrgaggttgcagtcagccaagatcatgccmctgcactccagcctgggmaacaragcragactctgtctcaaaaaaaaaraaaaaaaaaaagaaaagaaaaatgatcacaaagtatcgctcaaaacataacaactttaatggaaataaaaatacaagaagagaaacatttgctcataaagcactacccctaagaaatcatacagccctgttcttccctcttcccttggaacccttatctatgggaatacataatttgtaggtagttttgaacaaatgatccaattttacaatgaaacatgaatatttgaaatctgacactgaggagagaattaaggaggctgtggtactttttaaaaaaatttttgtttatttatttttttagacagagtctcactctatggcccaggctggagtgcagtggtgctatctcaactcactgcaacctccacctcctgsgttcaagcgattcttttgcctcagcgtcttgagtagctggtattacaggcgcccgccaccacacctagctaattttttgtatttttagtagagatgtggtttcaccctgttggccaggctggtagcaaattaaagaragtagtaaaacattatatgttgccagtaaattagctggagtcgttctgcagttcagggtgattgaggtatctccagtgggtcattgctataagcactgggcagtgtgagtcctggcctcacatttggtagcaggccttctgtatctgtcaaccccccaggccggcctctcagccctcaatgaaagaaagctaattgtagagtcaagaatatgacctgctataatggttcgatcctgggagaagggactccacagcctggtgaggacccctctcaccacctctgaggatcagcaagtctttgaaggtcagtaccaagtggtggttaagacctggactgtggatccagatgtgcctggattcaaccctggctgtagacattaggcatgttattaacttctctgagcctcagtttccctagctgtgaaatcagagtcactgtgaagactgaatgagaaaactcacacgtgtggttcctggcccagaacaaatcttcaaccagtggttataactattactctgtgtgtctagcctatatcttttctgctgcagtgaaagttagttattcgatgaaagggagcaacccactgagggggatggtctgggtgcctggatgctgtggtcaatgggtcggcatcacacccagcaccctgcccaacacagacaccgcccccacccccccmcccatagctgctgccactgccttcctaagaacagtgacttcctgttttctaagtttttaccctgcaatgtcatcaccagttgtgcctgagcctgggggtggagctggcagcagcaggactcagggctcaaagttggggactcaaaggaaggaaggttggcgagtagaaagctggccactcctacctggatcatgagctactgtgattcatattgattccatcagtgcctacaaactgagcgcttaccaggtaccaagcccttcccatttgagtgtcacacaccctgggaggtcgctgtgattactcagtgattacacagtagcaacaccaggacttggattgcagttgtcgccttcgtaggattcattcttacctgccgtgcttcctatcaaagtggaaacaagctggacgggggtgaggtttgaaaggctgccctatagaaattggaggatctgtgtgatttgtgcttctgaaggcagaactaggttcaaagttttttttttaactctgaaaattagagctctccaccagtgattgctgggtgctgagcttcctgtcaccagagatattcaagcagaggccagaagtgcctaccaaagaagaaactcctgaaagaggtgggaagctctctatatgacaggaaccccagaggcactgggataaggtagattgagaagggactttgcatcagatgcactcagaaaatctctagccatgtgacctattggagcygcaacgtcattatctgcaaaatagaattggtaataattctgcccgtattgtgcaaggttgttctgaggattaagccagatcatgcaagtgcaaagagctctctaaactgtatgcttcatgcatgtgttacatcattatcattttgtgaagtgaggagttctcagaaagtctacacactactgagctcccactgtgtgccaggcactttgtacacacccattatctctttttattttttttgagacggagtcccactctgttgyccaggctggagtgtagtggcgtaatctccgcttactgcaagctccacctcctgggttcacaccattctcctgcctcagcctcctgagcagctggkaccacaggtgcctgccaccacgcccggctaattttttygkattttttaktagagacggggtttcaccatgttagccaggatggtctcratctcctgacctcatgatccgcccgcctcggcctcccaaagtgctgggattatagrcgtgagccaccgcgcctggcccccattatctgtttttatcttcaaacacccctgaagagtgggtatccccatcctgggctgggaaacctggccaggttctgtccccaaccgtggcatgatggkgtgggaggtcagagggccrtcccctgctgtcactccttgtacctgcagagcctctyagcatgcgccactgtgcagggcaccccacaaactttacctcatttctctgcacccgtgaaatcggtcttgtcaaagcccttctgcagataggagaattgacgctcagagaggttaagaaaactgttccaaaacaagccaataatggggcagattccacatttgagtcttagagtctttctgactcaaagacttattatgttctttgctcttctctaagcctgtgatgtgcgggtgaggagggaaaggtgcaaatgaaactataaggcaccatctgtgcttgccagagccagtggtggggggcggacttgaagtgraacgtttacaagccgttgtgactaagtgtcaaaagtgggcaaaatggcaagggctgtgaaatcagaggtaggtggaaactccggatcctgagcccataggtcagstgcatcgaagccataaggctaagagaagtacctggagtcaggagacccaggaattcccttccagctttgccactaacctgcaggtgtccttggtgaagttgcttcattcctctgatctcagtttatccacctgtgaattgggcccaaaagtagccccctgtttgtctcctggcactcataagaatctaactccatcagacacaggaagtcactttaaaagtagaaattagagttcaaatgagaagaatccttattagttggatgtgagtaagtcccgcagatgcccagctccgaaacaggatttgctggaraaggaggttgactgcaggggaaagggcaccagcgtgtattttcagcctcagggtatggcaggaccaggttgattaaggcctgatccctgttagcagaagttcatagtctggctcagagacagacagacaaacaacgcaattcaagtaaatctcacccagagaaaccagattctgtaaggataggtgcrtctcccccagggtgcactctggggctccagaatcttcctgttagtggtcagtaccatgagacttcctgaattcagggcttttttttaatgaagatgacaaaaggctacaaagggatggcgaggctcactgtcactaattagactcacaacacttagatacaatgacccgtatgcctagatactctgtgatcatctttggctgcccccagcctcctctgagcatctcacatggcctattcctgggatcttgctacagggcaggaaggttccaacttatcgtgcatgggcttaaagtagaaatcatggcagtaacaataggtggcaaaatggaacacatacccttatggggtccttcaccccataagaattattttattttatcctcaccccataagaagtatcatatttggccaggcacggtggctcatgcctgtaatccgagcactttgggaggccgaggcgggcagatmacttgaggtcagragtttgagaccagcctgrccaacatggcaaaaccccatctctactaaaattacaaaaattagcagggcatcgtggtgtgcacctgtaatcccagccactygggaggctgaggcrggagaatcacttgaacctgggaggcagaggttgcagtragctgaggtcatgcmattgcactccagcctgggcaacagagtgagactccacttaaaaaaaaaaaaaagtatcgtatttaaccctcaccaccatctaatgagacaggtagtgttgttatccccattttacagatgagaaaacgaaggcttagagaagttccataatacacagttcagaagtacagygtataagaaggaccaaagctttaattttattgcatctgtttgacagaaatttacatttgttgtagggtatggctgcatctctacagaaggcagggcttccctctcacatgctgtggcccctgtaatgatgcaggtctgaatctcaatccattcatggccatgcagtgaagtccccatgcccaggttccactccaggccacttaagtcagagcctcaggggagagggcggtggattgagagtctgtgtgagaatgctctattagtctctggggctcctttcagatgctgaggttctcctgggtgctgtamtcttgggtagggatcaggaacattaaataaaacagcttctccacttttacagaaaagtagctaccatgtaataccctgaaacctcctaggaagcagctgctggtccctttgggatggaattggtagaaatacgaagaagccacaggagcgcgcacagggaagaagccaggaccaagtagagagtggcgatgcggtgcctttgagctggcatcctgcaaaactgtctgttgtccagggaagctcctacaccttgtgtgcggcctcaagagctaagacttaagccccatgagggcagggactcagaagactcgacccaaatatcagacatcattgtcttttgattctcatcacaacccttaaggtagatatgattaccctccatttaatagatgaggtaactgaggcccagagagggaagtgacttgtccaaaaccacacagctagtaagtggcaagagaagtactcgaacccacctgcacgcaatccagagttcattccatttcaatagttcccggcacagagcagatgcccaatgaatatttaattaattgcgtaactgaatcaggtcctgcatccctgcatggagctttctgggccatgactgtcttcctcaggcccatctctcccagcacaggyatagtgggaccgaggagaggagggtcctacacagggaattatgttggggttaatatcctctcctccacccaaccacacacagcacacttgtcatcagtcataaaactatgcagaaagaaaggaagaaggaaggagggaaggaagaaaggaaggaaacwtgttcatattatttatctcagggacatgcccaatccccctgcccctttgtgttgtgctgagtctgcacaacacaaagaaatatttcttatttgtgctaaatttactgtccagtaatttttctgttctmattttctgtgacaagcagctgagtgattttctcctggattttcttctgagtctcaaccagtcccataaatcgccacggttatctcctctgcagtcctcacagcaaaaagtcaccccagctttggtggccttcatgggggctggcttgtcccccagaggcctttagatcgtccctaggtcagtgaggacttccagcaataccttggggccagagggcaggcacacctggggctgggcccagcatcttcctcatcactgaagttcagccctgaaaaattccatgatatcgagtgattgtctaccctgtgccctgcactctgatgctggggctggaggaagaggcaataatgaagatgcagccattggtctcaggtgctgacagcctagatggaggggcatctgagtcctgaggagttgggtttgtagagcgctttgggggatataggctcttgaaccgacatcctctcactttttcctcaggggctcaggtggtgggacagtctgatttcaacaggtgttgagtggaggggtagaacgcaagcctagaaaaagatctagctcagcaggccagggggtagaaaaatatgggtgttcaaggaagaatggggggaaaagacaagagcagagggacagggtggcacaaagctgtggtcttttcaggcctggactggttatggcagagccctaacatggctggacaaagagcttggactctygtccgagtggctgggtcatcaatggtctctgggcagggtctgtgggaggtttgtagagatcagctgcctgggggcaagaggggtcctgaattagggttggagtcaaaagccaggggacagagggattcagggtggtgggggtggggacactggcggctgcctttgaatcatctgcttccatagttcgtcagggaggccaaaacgttgctggcatggaggggtaggcagggctggcccaggggcaggaagggggcgagaactgctagggatcagtcctgggctgcctgtgaccgtgtgctctgaacccgaatactcggtgcctcagtgtccgagtgtgggtggcaggaggatctgacgatgattacatttaaggcagtgtctgaagaaatgttagttttcaccctgttcaacagaagaggcagctgacagagcatacataacctgccccaaatcacacagccagaaagaatgacagcactcccacatatggcctccactccctctgccctcatctgggtccaaaggccaccagagggcgcccaggccttgggagacagacactagcggggctggcctgggacctctgctctagttaccaggcaggggtggagtgagatgggtaccacaccctgttttacaggttgagttgctgcacgtttacctagtaggaagtatggtcagactaaaatctgagtctcctcattcacagtgcaatgatgytccaaataaaaacactaactttttaaatttttttttgagacggagcctcactctgtgtgccaggctgaagtgcagtggcgtgatctcggctcactgcaacctctgcctcccaggttccagcgattctcctgcctcagcctccagagtggctgtgatcaaagctgccagccaccacgcccagctaattttcrtatttttagtagagatggggtttcaccacgttggccaggctggacttgaactcctgacctcaagtgatacacccatgtcagcctcccaaagtgctgggattacaggcgtgagccaccgcccccagcccaaaaatgcaaacttttatttaaccagagtatttagtgtatctgcattcttcagcccattgtactccaatggcagtgccaactaaacgtgcattaactacagcttgacaaaggttaatatggcactaggagttaggggcccctgggaaatttgcagtgggagaagctaacacagaagggatctttgagctgcattttgtaggatgcatcaaatgttaccaaatagtagggtttcagggagagaaatggagggaacatgaagagggaacagagagtgcaaggcacagggcaaatagtctggaagagcaaggygtgtcctgggaatggggtgtgtgtagtgggaggaggggagacagagaaggctgaggccatggagctgggactaggggacagggagatgctgggcctaggtggggaggggcaccaaaggtacctctgtctgttggccatgaaacccttcagggaacagggaagggaagccgagcaccagatcccactgtcctaggcgggagagtgcttggcactgaggaggcagggagttgggggagagttaacccagattctcyctgtcctagttaactgtcagatattgaaatgatctcatttgaccatcatttgacctattgtctccctgtgggtaggcctcagagccacacacctcaggccaggagtaccrttcatccagacgtgaacatcttcccgaggcttccagagttcttggttcacaccggggctaacatggctgggcttctgctgcagtggcaggagctctgtgcacagagaacagcctcatctgctcgccttgtttccacctcccctcccattgccccaggttctttggccccacagcggccacatctgccgttggtgccaataggttttccaggagctggttgaggtgggagggagggagagggttgtgatcaggctgaggcatggggattggatatagtctccgtgtcatgatttatttggtcagtcagtcctagtgccaccctggggtaatggggatgtgttctcgtcaccttgggcctggctgaccagctttatctcttggcacagaggcacagagctttggcctgctggatcccaaactctgctacctgctggatggaatcctcttcatctatggtgtcattctcactgccttgttcctgagagtgaaggtgggtaccactgggctttgggaggagggcacggggtcccccacttgatggatgttcagaggggccttggtcttggaaggtctcaagctcgggtggtgcctggggcttggtatccaggagcaaagcaaggaccagccaagtgtgtgccttgagtgggctgaggaggaggtggcagtgtctggctgagatggacagggtaggagggagagcctggtgctaggcacctccatgacaagccgtacaaatgtgtgcacatcagagtgtcccagggaaggcgatgctactggtgayaaaggggcttacactcaggcagaggtccttctttccaagtgtgaatgaaggccatgttagcctttctcttgaaaaggccctttcctcatctgtaactggggagctgaccagagcgtgggtttttcacttggtgccttgcagaccctggatttcttcgtggggctggtcatggtgtgggcagagattggaagaatttaggagtaaaggggagaatccagtcccagtcatcacttcagtgcttctcaacccatttcttgtttgaattttggactttggcataatattttatttgaaaaaccaaatcttactgagtttcttgttttaagtttgaaaatgctgccctagatgatttctaaggttgtttccaatgctctagatctgtaagacattgcagtttctcccgcctgaagcggcatgaagtgaagcaggagtgaggctgtgtcagcttcccwcagatgctcaggacactaagcgaacgcgaggcttcctgggcacyggggcagccgggcgatggctgagggctgggcgagtgatgcacgtacagtacactgctccgggggtcaagataggaggcgggatcttgaccagccgccatccaccctggattgtcctcagagtccccggaggaagggatcctagagaatactcatgtccccgggggcgcagaccaagaaccttatacctctgcgcacgcgcgagggcgctagcccgggaagaataaactccagcgggtccygggccagcgtgatgaatgcacgtgtcacaggcgggaggaaaaaggacaactgggctcagmaaaaggggctgccacgccccggcccctgcaagggctcagccccaggaggcagggcagcattgttagttgccaaggagcggagtagggctgtccctcgggtcgccgcgcgccctggcaccccggctcccctgcgcgccctcgcgragcagtaacgcgctttgctttctgtgttgcagttcagcaggagcgcagacgcccccgcgtaccagcagggccagaaccagctctataacgtaagtcagcctcgcmgtagaccctccggaaaggaagggcagcctcctcctcggacctagggaacgcgcccgccagagtcttgggtttaggtttggtccctagctatcacctctgcgaccyggctgcaacttgtttaacctcagttttctaacccacaaaacaggtgtagtaattgtacctgtctcaaagggcgccataaagattacatgctttaatgtcttgatgcatggaacgagcttagtctagtgcctgccactagtgagcccccaagccrtcagcaatttgcaaaggctagaggggggtggagaagraatgtattagaatcttcccagaggaggggaaagcgatttcacactccctgtgcaatgggactgtggtgaaattgactaccacctctgagcccccacttctctatttgctcatgagaatgttgatccttatcccgttggactgatcagcctatagtacttggtgacctttggggatcccatccactgtcatgttaakgcgtgttctctgagatgtcctctgggatgatggtctccagatggaccagttaccatcccctccccagcccctgcccctctttttatgagccaccccagagagggaaaccacactccccagtccagctggctccatccttctgaggttcctccgtcctgtgtctgacactttcttatctgttataggagctcaatctaggacgaagagaggartaygatgttttggacaagagacgtggccgggaccctgagatggggggaaagccggtaggggttcctctaccttcctgtrtgttcctgcatgtgtggtggggctcagcccaggctgtgggggagggctcctcagctcactctgcaaccagactcgaccctcacatgtgtgggcccrggacaagagaagagatggagacccacttgctgccgcaccctcttccttcctccttggctccattctgcatctcaaggggcctcacccccggacgtggcaccccactgctcatgtctaagctctacccacttcccctcaaactgctccttggccatcctgagatgcacayacggtgacgccatctgccccaagaggacagacctggtgaagaggtccatacaggaagggcccaagacccctggataacccacatatggtcrgggtatggtccctggggggtttgacctcttggctttgtagacactatacctgtgggtatacctgtgggtaggggagcagctggatgacaccacagtagggtagggtcctctttgttttttccccttcattctgatttccttccttccttccttccttccttccttcctctgtctttatttattttatattgacaaattatagttctacatatttatggggtacaaagtattgttatgatttttgaatataatatgaaatgattaaattaagctaattaacatatttatcacttcaaatctttaacttttttgtgatgagaacattagcaacttactcttagagatattaaaatgtatagtactcacatattaactatattcagcatgttgtgctgttgatctaaaaataaattactcttcctatctaattgaggctttgtaccctgtgactatcatctccccattccccccattccccagcctctggtaaacatcatgctacctgtccatgcttcagtgagttaaactgttttagattccacatataggtgagaacatggagtgtttgtctttctgtgcctggctgatttcacttggcataatggtctctagttccatccatgttagagtgaataacagaatttcttcctttttaaaagctgaatagtattctattgtgtgtatgttccacagtctctttatctgttcattctttgatggacacttaggttgattccataacttggttattggtttcttttgttttgttttcttttttttttttgagacagcgtttagcttttgttgcccaggctggggtgcaacggcacagtctcggctcaccacaacctctgcctctagggttcaagcaattctcctgcctcagcctcccgagtagctgrgattacaggcawgcrccaccacgcttggctaattttgtagtttttttagtagagacggggtttctccatgttgatcaggctggtctcgaactttcgacctcaagtgatctgcccgcctcagccaaccaaagtgctgcgattccaggcgtgagccaccacacccagccttggttattgttaataggactacaatctggaatcacaggtgtaagcccccgcgcccagccgtggttattgttaatagtgctacaatcaacatgggagtatagacatttcttcracaagcagacttcaaatyttttgggtaaatacccagaagcgggattgttgggtcatatggtagttctatttttagttttttgtggagcctcaatactgttttccataatggttgtattaatttacattcccaccaagagtgttcaagggtttccttttctctccatccttgccaactattgttgtcttttgtctttttggtaatgcgcaccctaacaagtgtgaggtgatctcattgtggttttactttttatctccctaatggttagtgatgttaagcattttttcatatgtctcttagccatttatatgtcttcttttgagaaatatctattcatctatgatttattatggaagttttacagtttcaggccttatgtttaagtctttaatccattttcagttgatttttgtatacggtgtgagataaggtccaatttcattattttgcttgtggatatccaggttttccaacaccgtttattgaagagaccattcatttcccattgtatattcttggcaccttttgctaattgctcggctgggacctatgttactatrttgaatagaagtagtgagtgtgggcatctttgtcttgtttcagatcttagaagaaagggaggaaaggcttcagcttttccctgctgagtgtggtgttagctgtggattggtcatatgtggcctttattgtgtggaggcacattccttctatacctaatttgttgagagtttttagcatgaaaggatgttaaattttgtcaaatgcttttcctgcatctagtgagatgatcatgatttttgttcttcattctgttaatgtggtgtatmatgtttattgatttcgtttgttgaaccatccttgcatcccagggattaatcccacttgatcacactgaatgatccttttaatgtgttgttaaatttgacttgttagggtccttttaagcacagggctcaggacaaaggccagggctgtcctggtgtaagggcagtgctgccagatgctgccagtggtcacgcctgtccatccagcccctgtccaggctgatccctgtgctggttgtgttgttgctagagtgaatgggcagtagagaggctgtcgatttcattgacyactcctcacccccaccatccaagtttatcttgcctcctctcctcttgtcaggactaggagggtgtggggagggcacctttcagtaggcactcactaccagtggctggccctgctccaaatgatggtatgtgactccttttgtyttcagccaaaagtcccacttgtcagcttgtgatgtgtgtgggcgtcccgatggcctgccctgggcaatgctgggcttgggtgggcccctctggaagagcgaagtgtgtatccagttgcaggtaaccaagtatgagccatgtagtgccatgagggccccaacagtggcctaggcaaggctggggtagcacagggaggagagaggcagacggcagagccccaggaaactgcagtcagggggcaggatggggtttgctgtactttcatggcttgggtttgtgtttctctccctctaacgtcttcccgttgtctttcctagcagagaaggaagaaccctcaggaaggcctgtacaatgtgagtagaggagacctcacatttgaccttggaaagttggaggaagggctggaggagggctccagaggaagggctggaggaagggctggaggagggctccagaggaagggctggaggaagggctggaggagggctccggaggaagggctggaggaagggctggaggagggctccggaggaagggctggaggaagggctggaggagggctccggaggaagggctggaggaagggctggaggagggctccggaggaagggctggaggaagggctggaggagggctccggaggaagggctggaggagggctccggaggaagggctggaggaagggctggaggagggctccagaggaaggcggttgctcctcactctgtggtctttgtctgtccagaccttcccttcttggattgagtaatgtctcacctgcttgcggcctgcagcagcacctgcttctagaaagtctccttagctgaaaagtgccgagtaatctcccttccctccccaaaccctgctgctggagttcccaggttgatcagcctggggtgtagggggacacagcaaggtcaagctaggcaaggacgaggtggctggccccttcgaggggctcctgtcctgggtgctgaagtcttctgagtgtmccccsctataggaaggtcaacctcaccctcctgggtgtgaccctgaaccctgattgtcgatctgggttgccatgcaggagacccttgcaggtggcagccttctgtgaaggagatgcctccccgcccctcctgtggggagggagggttgatctacagcccgtttggctgtgtaaagagacaacttgctcagataaatgattctggggctccaggtgagcccttgytttgcccagtctccgtgtctttgtctagaactccacctcctatctttttgagcctaacttgagcccctcagctcagtgcaaagagctggcagctcggaggagactccaaagggctgaggayraggggggtgggctggagctggttgtgggcagagaagtttgtgtgcataaggtttggagccttgattgtgggagccctccctgtctgccactgctgccaacttggggatcaagaagcttcctgttgtaggggaacctgctgctttcygcattagttggtaaaaatcagtgttccacgccctcttctgcaggaactgcagaaagataagatggcggaggcctacagtgagattgggatgaaaggcgaggtgagtgttgctgtttcttaatttccgagggagttcctcttggtyctccagacacgcctgctgcaggcctcctttcccatccacttctcatcccagctgcaaatgcccatgtggtggccatcagaggtgaaggcgaacctggctgtcacccagccgggcagaacataagaaactaaggaagggctgatgctctttcagtacagaaaaccacatctagattctatgacagcctaagctttgcaaaagcaggtccgttttaataacaggaagcatcgagtgcttaatatgtgctgccgtgttcagtgctcaggaccacaggtcccaggacaacatgaaaacaattcatcaacaattaagaattgttcatcaacaattaattgttcatcaacaattaagaatttcaaaatggtgagagtgaagcattgaccccttccaagcaggggttctctgtagttttatttaattcccacaacaacccaatgagaaacatgtgccctgcaaggcacaaggaggttgagtgacttacccaaggtcttctagctggtaaacgggcacgtgattgaactgactatgccagagctcgtaactgctcaaaacagctggttgtcagtgagcaaaaatgactagccaagaactttaagagctgaagggaagcccatttatctaagcagtaggcaatataggtcctgcgggccctagaccttaggaatctgatgtctgtgaggatctgagtggggtggagcaaacccaagccccatcatggccaggcctcaccttactctgcagagatgaaggtctgaccaggggcctgaggatccttctctcccaggggcaggggtgctgctgggagacagttacctctgacttcctgggtaccttgggaggggcccttgagcagaaatgccactactgactgcctgactttctaatccttttctcatttcactcccaaacaaccagcgccggaggggcaaggggcacgatggcctttaccaggtaggagctgccggcgtcccttcagtggaaggggcaccacctgacaaggggcaagatcaaggcccccacattttgcctgctggtggcaccagctcttgccaacagctgggcagggcaagcccaaggcacccatttaggccagtggcaacgccactgccaataagtccctggagcacagctgggacttggccattcaagcgaattacttggctccaaccatgccttgcttggccatggcagacagagcagcagctgtccagagggtacgcagcctcccygccgatgcagatggaggcaaaggaccacacaagtgattatcctgcctctttgggttcttgtagaaccctcactctgcatcatttccttaggcctagtaagatgagaggttggctgggaagactgaaggaaaaaaagctaagaaaaatggcagcttcaraaagaaaatgttatgtagttaggtgcctggtttttgcaaatcagtgcaggcaattatgcaaactaagcacggtcaaactacttctctaaaacatgatccccagcgggttgtcatttccctccttctggctcccatgggctgttcatagctcgttcttctgactctagtgtcaggatgcccagcttgcctgagttgagtgatatcaaaagggccccagaaacttacctgtgtgtggctgctgttgatccttctccttcctggccccyggaccagggggacaggcattccagcaggtttggggccagccttgtgggcctgttcgtgaccaagaaaacactagaatcacygggcctgggaagggaaggaggctcacagagggctgaggccaaggagcccctcttctccctgtgacaagtccaggcttcctttgggcccaggtgtcagggacagcagattctctggagcaggyctgggccctcccccctgattcctgcccaatatgggaggtgggagactcctttctcttaggtccagcaggaagttggcggggcccaagcactgtaaggcacagcatttgaggagctgagaagaggggtgagaatttagctggaaaggagttgctgcaaggccattcccggcagggcacagcacccatctaccaacgaagctgttgcagccaaggctcctgcccgtggggccagggggattattcctgggcctctggaggctgggtgggtggtcacagggctgtgctgcagagacacctgttggcctctgggttggctcctgcccacacaggctactgacccactctttgttttctgatttgctttcacgccagggtctcagtacagccaccaaggacacctacgacgcccttcacatgcaggccctgccccctcgctaacagccaggggatttcaccactcaaaggccagacctgcagacgcccagattatgagacacaggatgaagcatttacaacccggttcactcttctcagccactgaagtattcccctttatgtacaggatgctttggttatatttagctccaaaccttcacacacagactgttgtccctgcactctttaagggagtgtactcccagggcttacggccctggccttgggccctctggtttgccggtggtgcaggtagacctgtctcctggcggttcctcgttctccctgggaggcgggcgcactgcctctcacagctgagttgttgagtctgttttgtaaagtccccagagaaagcgcagatgctagcacatgccctaatgtctgtatcactctgtgtctgagtggcttcactcctgctgtaaatttggcttctgttgtcaccttcacctcctttcaaggtaactgtactgggccatgttgtgcctccctggtgagagggccgggcagaggggcagatggaaaggagcctaggccaggtgcaaccagggagctgcaggggcatgggaaggtgggcgggcaggggagggtcagccagggcctgcgagggcagcgggagcctccstgcctcaggcctctgtgccgcaccattgaactgtaccatgtgctacaggggccagaagatgaacagactgaccttgatgagctgtgcacaaagtggcataaaaaacatgtggttacacagtgtgaataaagtgctgcggagcaagaggaggccgttgattcacttcacgctttcagcgaatgacaaaatcatctttgtgaaggcctcgcaggaagacscaacacwtgggacctataactgcccagcggacagtggcaggacaggaaaaacccgtcaatgtactaggatactgctgcgtcattacagggcacaggccatggatggaaaacgctctctrctctgctttttttctactgttttaatttatactggcatgctaaagccttcctattttgcataataaatgcttcagtgaaaatgcagctttactctaagctttatttcagcagtcaagcttgtaatggcaatttagtcatcagtaaatcagcaggttgcccttgggggaggaggggagcaaaactgctgattctcaggagagaccaggacagttcctgggaacgagcacatgagcacaggtgcatcctgcggcccggaatgcggcaatatgggtggtgtcacacacggcaagtgggccgggcatcccggctgggtggctgtgccttagacagagagagtggggcttggtgcaatacaatgtgtcaggatgggcccagtcttatgccagaaacagagagggctatgggaaaggagccctgcagcacggcaccagcttgtcaggtgcaggaaaacaagcgcgaaaggctggcctggcacccaggcatcagaatagacagcgtgtgagcagaaggtgtccggaagttatgcacagcagctgacgccacagtgcaaaatgtctcagtgcatagggtttgagggagggatggagaacaagtcttttaggcgtttctctcacaaaaggtggccctgtccctagcagtatttcctctaactgcagtggctatatataaggccccaattcaacaagcccaccaactaatattgtgtaaagactgaaatctataccttgacattttcaaaaaggaaatccaagaccatgactgttaaagcccctgaaaatttgggattccaacaggagccacgcacatcatcactaggcatatttaacaattcacaggcaactcataaggagaaggcatttgatttgtaactcagcctcaggggaattctgctactcactgggcttttaaaactgaaatctggttcatctattagtgaaagagagtgcctctcacatcgagggcttgtgctagaccaagtttcaaggtcagctgacatatatacaggctgtgtgacctggatggctggtttgaaaagtgagttgatccaattctgtcaagaatatgtcattctgggcatggtggctcatgcctgtaatcccagcattttgtgaggctgaggcaggagaatcctttgagcccaggagtttgagaccagcctgggcaacacaggaggaccccgtctctacaaaaaaatacagctgggcatggcggcatgtgcctgtgttcctcgctacttgggatgctgaagctagaggatcgcttgagcacaggaggtcaaggctgcagtgagccgaaatccagcctgggtaacagaaggagaccctatctcaaaatatatatatatatatataatttttttataacatgtctaaagaggcaaaaagaaaagctggcagtgggcagtgagctatggtgctagagctaaactgaggtgtgggccacatcaggctacgtgcaaggtaaccacacagacagcaagctgggggagaactgagatatgctcacagaagcagggctgagaaaccagtttctgagagagcaaagccctgaatccgaggggagagcggctagccctggaactgccagggttcctgtctttcctgaggtctggcaatgccttctccacagcacaactgcactccctccatcctaagacactgttggttactgatgtatcaacttatttcaagggcaaaaacactaaatatccattgtaagatgtagatctgtttcatgggttaaaatgtgaagatatgcttagaatcaaggaaacatggaattttacttgtattgaggaaacacattatatatataaagatggaagctttcaatatttttcaaacgtttattcaaatgtcactaaactcagagataagatatgaatatttctgatcgcttttcttcttagagtataatttgaggtcattcttggaataagatccaaggtttctagtttaaaatgttcctataagcagagaaatactcaaaactgcaaagcctggcttggcagagaaaaaatggcagatgacctacttaggctaagaggacaacttccggggtgatttaaagccttgtcatttggccaactgtttagccacaggcctcaaactgtccatgaataacttgtgatgtgttttggttgcttggtgctggacatttcagttgttgatcaacaactacttttgtgaacccatgactgagtcctaacaccggatttcctgttaacttcaacctgggtctttggagagatgtaagtccctccaaaaacaaaagagtaagggcatatattattcacatcctgccataggtaattcagctttgtatacaaacctggaaatgggttagaatttaacaactttttcacaaaggactacagggtaacagaatctcatcagttgtttatcctcattccttaggatatgacaaacgagttttgcttgctaagtctgtgagcacgacactatctcaaaaacaggatttctgttaaaaacttgacattattttaagaaaataactacaaactgagacataagccatatatctaaggaatggaatggaaaaatataaattctatgataaaggagcagggagaaagggacccaccatttgccttcccattttggtccctttccaggagagcgagcacatcttgcgacaacggctctccacatcatctaattcaagaatgcctgccagatggccagcacgtgatagacaacttccccaggttcttcagtaagctgaagccttctctctgtggggaattcattttaaaattcaaactttccttttcatgaaatgaatgaattgtagtaagacactaaatgctaagtggtatttataagtctgaagaagctaagttgtgcagcctcgaacaggaggaggaccagatgccaagttcagggttaccttccttcggaggaccccccacccggcccccacccagtgaatgttcaggacttggcaagaaatgctagaggggcagtgcagtttaaacaatacatttggaaaaagttgagttcggtcccagttctgcagtcaaatacacagtgagatggagctttgaagagctcccttgcaggatcaatcatgggcctgcgtgtttgatcacacaaagtacttgggcctgagggagactactgctactcagggtcccacgaaaccacactgagggtctgggagggagaaatgcagtggccatagctcctcctggagtgcaggaggaagggtggagtggggcaggaaccagggtgcttatggtgattctggggttcctgagagcacttggaaaaaacaatttggaagctgaattatgcgaagagtctgagaatctgtatgtgaagcatccagaataccaacacagcaatttcaaagaaactccaacaatgtgaaaacacttggaagatggtttaatgatgttttacaacagaaatgaactgtacagttacagtaagtttaatatatatataaaaaattacagcagacaaatgcatctacacaaaatctaccacttcattctgattcactgtcacctacacaatctttcccaagcctacagcccctgcaggcagccctaggagggggaatcatctaaagggcacttttgagagagacagcaccgctcatattccccgccacctcctcaggcttcaggaggcatcagctaattccccaaaatgtaaagttgcctgtgtttcaggttttcaaaaccaagaaaacgtgtgtctcccaggggcacagataacaaggtccagcacgcaagttatcagctgattcttagaaaatattcctatcagaggggaaatatttggctaacaggcactctggggcagtaaggctacacaatagccacccagagtgcagagttatctaagagaaatgtagaaggactcccaataaaccacctcagaattgtcactgcctcattcaagctgctggacaattttggaaagaatcatttacaccacatcttaagtttccacaaagaagaactcaaactcacattttaaagtacataaaacaaaaagttctaggaggccgggggccaattccccttgtgcccctcctttgacaacagtggacaaacacccctgaattaataattaagacaaaaaaggaagaaaaaaaaagtgagttaagatattgaaagagagaaagaaaacatctttagaaaaacacgatcactgtctctttaaaagaaaacaaaatcccagttgggaacagtaatgaggaatatgcaatctaaattgacacctggtgggagattattattgaatattatgtacactcagaacttttttcattttcttttttattatgaacacctaggcagtgaaaactgttatgttaatacatacatagacacacccaaaacatacaaaaatactattatttcaaactactaagaataggacagttcaattattttcatgctatgactttaagagcattacactgaaacaaacaagaagttaaacgacattttttttaatatcccagaaatataccaaaatatacatctaagctttggaattactgaggttagactaatgcaagtgctgggtaatcgtacttaatacacgagtctaaggttctgcaggaaagaaattatctttggtatctgcatcaggctaatattattaacatttggattttgctttgggatagagcttgtgtgacccaagaaccaagtacccccctcccccaaccaactgagattaaaaagatccatgtaaaaagttccttcatttgcaatccccccaccccccaagttaaaaagtcacaggcatctacctagcacaaaaggttgtgaagtacaatgcatagttgcacagtggtgctgcaaaaaggaaagaaaactacaataaagagaaatgaaaagcttgataatctttctgcatgttttctcacaaacaggacagccacttccaagcagttccagtacaggaaaagaaaaaaaggctcagaagggcaccgtggcgtgcattcgcccagccccagaggttaaagcacccagcagagcagccaatcgtgcgccagtgtcttcaacgtcccccactctgtggagtcctcgggccagtccagcagcagctcccaccctccctaggccctgtgctaagtccccatagtgaccctggttggtgtagggtggatgatggtggtgatggggttttttgacttttgttttggaaaatctgaaatgccaatttgtttcagggcatgctcacaagtttgtgagggccaaagctaggggcatgcacctgtgctggaccctggaaggtggtaagcagcttgcctgccctttctgatccagtcagagggtccccccgccccaccttccctggcctcactcttctaagtgccaggacaccacagactggactgatgctgaagacttcccttttctttggttcttttgtttgttttgagtttatacaatcattaagaaatctttggttttggctggaaatttaaaaaacaaaacaaaacaaaacaaaacaaagaaaccaccctcccctggcttatagcagcagtatcatgacctggctaagctttttgtcagcattaggggtgggaattgaaggttgggaactacattcaaagaaaaggtgaaagggctggggatgcagcttctagagagcccattggatataagattgtcaaataataataataataataataaacttaaatatttggatatttttggtcatgtcaaaggaaaaaaagtgaaatgtgtatgcagcagtcagcttaaaggagcctttggtgtcttcccttctacccaaagtcctgaaaagaaacagaaccctgaggcctcagaggagaaggggttggcctctaccccaccaaggaaaaggcaagtacagaagttgacgtgtggccagctgtcagaaacacagggtgggttaggggtgtggatagctggccagcccctaaaggcagggtggcagggaaagcagatgttaagagacctgtgaagaccccttgcaacaaaaaggaatagaagattgcaatttgccctcagtttgcagtagcttttaagcagcgacattcagaggctttagggggtcccaccctaggctacaggtccc

SEQ ID NO: 96490 - DNA, 23586 bp, Homo sapiens
gagtctgagctgagaggaagtcaaggttagataaggagggctcgagggtcagcacacccacaagtgggaaactgtctgttggaaaccactgtagactcagcagaagggagatcgtcaaaatgtccacagggaccaaaaggtggcctgcaacaggcttacagtaaggctggtaagaaatgtaaactcctcccatgccaattaaaacctgcctccagcagggcccccaaggggactggaaagcagagtactgctacctgcctccatctccagagccctatccccaaaatatagcacctgcaggtcccatttctttctccatagtttggggcctggctctcatattccctggtctcccatgacctccctgtcccctccctggctatctccagtgcagggattggccggacgggctgcttcatcgccacgcgaattggctgtcaacagctgaaagcccgaggagaagtggacattctgggtattgtgtgccaactgcggctagacaggtgggtctgtgggtgtaaacaaggccaacaacgttaacggatggcatcagtgcctctgggccccagagttctgctaggcccatcaccatcaagcactcctgcaagaaaggaagaaaccctttctgcttagagctgtttattttacaactaacaaccaggaaaaaatatctatctggatggccgggtgcggtggctcacacctgtaatcccagcactttgggaggctgaggcgggtggatcacctgagcccaggagttcgagaccagcctggccaacatggtgtaaaccctgtctctactaaaaatacaaaaattagccaggcctggtgcgggcccctgtgatcccagctactcaggaggctgaggcaggacaattgcttgaacccaggaggtggagattgcagtgagccgagattgtgccatcgcactgcagcctgggtgacagagcaagactctgactcaaaaaaaaaaaaaaaaaaaaacaaaaaaaagaatatctgtctggaatgttggcttggatgcctggaattaaacatgatatgaggcagcaacaagtagtgcaaagaagatcactgggtggaggcagagccggtgttcagattctgacatctgtctcactgagatgtcactagatttctctgagcccccatttctttttttttctttcttctttttttaataatagagatgggggtctcactatgttgcccagactagtctcgaactcctgggctcaacaatgcccacttggctttgcaaagtgctgggattacaggcttaagccactgtgcccagcccccacttcttctttatctagacagagataatggctccttcccccagaaaactgttgtaagaaatgagttaacttatatgaaaatgttttggaaatggaaactactatacaaatgtatggaatcattatttttactttttaagattattagaaagaaggaaacttgaggctcaggagtattcctggcccgacccaaggcttcagagatctggttttgtcccaggagctgagtggatcaaggaagaccaagtgtcaacatggggcatcacccctcagcacgtgtaaggggcagaggacttctctcacagcagatctgaggggcagcaatgaggagtagaaagtagaaaagatgaatataggtggtggggcatggtggctcatgtctgcaatccaagcagtttgggaggccaagatgggccaatcacttgaggtcaggagttcaagaccaccctggcaacatggtgaaaccctgtttctactaaaaatacaaaaattagctgggcaaggtggcaggcacttgtagtcctagctactcaggagattgaggcaggagaatcacttgaacctgggaggcagaggttgcagtgagctgagatcataccactgctctccagcctggctatcagagtgagactctgtctcacaaaaaaaaaaaaaaaaaaaaaaaagtgaaaagatgaatataggcaaaggagttggcatgttctttgagaaagtcaggactttcccagtaggaccacagggatgtttgactggagccattcagccagcaccctgaccctccttcactcatggtctgtgtgtttctccttgcagaggggggatgatccagacggcagagcagtaccagttcctgcaccacactttggccctgtatgcaggccagctgcctgaggaacccagcccctgacccctgccaccctccggtggcccaggtgcctacctccctcaagcctgggaaggtgggtctggggaaagtgggccgagtgatctgggggtaccccttgggttggtgtggggaaggagtgcctccttagtggtgcttgcagtcacaggaagcagcagcagtaaggacaaggggccggattccaggtcttcaacactggccactcctctgcttcctctgttggccccagatggacagtaaggggaacctccaatgtctctctgaacttaaagacaggagctggcatttatgacagacaaagaaagaagcccaggtgtcctggtgttctctgagacactctttgtgagcttcagtttcctgttctataacatgaacataagtgcttagctgccatgagggaaaagtaatgagagaagtttctagaagccactccagccactccttcctggggctgacaaaagggtgattccaagatcatccttcacccgaggtcctgcccaagcacaggccagatgcaagaatggggaaaagtctggtcctgatctccaagtctcaacatcctatcagtgactctgctccctgaccacacatcggaagggctggatgaccccaatcaaaagaaagaacaaggactctggttacccttgcctccacccatgtgtcataagagtaggctacagaggtgaccaggcctggcagttgaaatctctggaagagggaacatgtggggactactcagaggcaaagaggagctgctcctgcctccatggttgctggccactcccaccaactactcttagggaggctaagcagtctctgttttgcttccatggctcaaataataccctgggtatgcaggacccactataccttgcatttgctgagtacacctagagagcttggctgtttccaaaaacaatcagggtcataaccatccatgcagacatggaggctcggctgaaccaggactcctcactgtctacctgagagaatgagcacccctcatccatctcagcatcaacacaatttccaggggacctcaggtctacctcaggactgaacgccacacctcaggattcctcctccttgaatctgagactggctgcccattctgagatggggatgaaggtaagatgccgcatcaccaggcacgccgcccctgacagctgccttgataccagctctctgtggaaacccccgaggagttggatctggagaacagctgggcctcctcactcaggacttctctcctgaagaacacgcagtgctaaaactgaggatgatttccctaatgcttctgcttggccttatggaggagctgctccttccttacagccttggggatggacttgcccacacctccacctcccctgagccctgtgagaggcacgactgtctatgccaatgaggctcggtggggggctctcaagtgcctgatcctgccctgggctcagagccagcccagagggaagcaactgcacagccccacaggccctccctggcactgtccccccaaccccatctcagagctcagagggtacaagctccagaacagtaaccaagtgggaaaataaagacttcttggatgactgactcattccttctttccatcttcttcttggccctctggggcctctttgtagcaagagagaaagactgcagaccagggacaggcaggctgcaaatctttgcccttgggatatgcacttttctagcacttccaaggacataaagtaaggtgaaaccaaagtcaatttaggaagtgagacagggtggaccctcatagcctacccaggcagctgtaacaattcacactaccgtaaaccatgtggcttctaaacaacagaaatgtattgctggcctggcgtggtggctcatgcctgtaatcccagcactttgggaggccgaggcaggcggatcacgaggtcaggagatccagctaacacagtgaaacgctgtctctactaaaaatacaaaaaattagccggacgtggtagcacacacctgtagtcagctattcgggaggctgaggcagaagaattgtttgaaccctggaggtggagggtgcagtgagctatcatgccactgcactccagcctggatgacagagcaagactccatctcaaaaaaaaaagaaaaaagaaaaaaagaaatgtgttgctcacagttctggaagctgggaagtctaggatcaagacccttgcagactcagtgtctggctattaggcagagccttctttctgtccttgcatggtgaaaaggttgtgggctggtattcttccccctaatcccaccggccccctttataaggctctaccctcatgacttaatcacctcctaataccatcactttagggattaggacttcaacctatgaatttggggggacacaaacattcagtccatagcctttatcttaggagctagaggaggacttataaagggcagaggttagaaagatggtgcttaataaaccagaatattggccaggctcatgcctgtaatcccagcactttgggaggctgaggcaggcagatggcttgagctcagggcttcgagaccagcctggacaacatggcaaaaccccgtctctaccaaatatacaaaaattaggctggcatggtggcgcatgcctgtagtcccagctactcgggaggctgaggtagaagaatcacctgagcccgaggaggtggaggctgcagtgagtcgagatcccaccgctgcactccagcctgggccacacagtgagaccccatcaaaaaaaaaaaaaaaaacaatattatgctagccgaaaccttgtgattcttctactttggtaactgtttgactatttggggtcatctaactccagttgattggacagatatggttgatattgatagtttacccacttttgactaaaacaatagactacatatgactacatttgaaaaccaaaccccaacgggcagccagcataggctggggactgcccgaagcctgagcctacccgggactgccagctgaggttgtcagcctgcctgagcaggtcctatgggtgggtcttgcaaggagaggggcaggagtaaggcatctttgcaggcactccagacccacttcaagaggagaactatcacttctcctcctgaagaatactctgcttttcaccaaaacagggcaacattttcctttgtcacagacgttcctcactgaaaaccccctgccaggactgtatctgtttgggtatcttggggatgctggtaaaaatccggagcaagttcaagcgtccgtttcacttggggccagaggcttcctaacaagtggtcggggtaaattgtggtgaacaaaacaagatggagtattaaaagacccgaatacggttgtccctctgcactgggtgcattttgagaggatgggactgtacccaggaatgctcagaggcaagggttcagggacaaaaaagcctccatctgcctccctgtcgtagagatctcatctccgtgtcctgggaagtgggtgacccactctccttcaacctgaaaaggctcctgcttaaccggaacctcacccacctcgagcccaccaccctttaagaaagggggtgccagtcagggcgcggcagtcggggacagggtctaaaataaattagaccccatttcccaagcgcctctcgacgccagctgccggtcaacccccgccgctgaagcctgcggattccctgctcaccccacctgcggattccctgctcaccccacctgcgggtgcggcccctggccccccggctccagcgagggaggagcgcgcgctcgggtgcgagcaggacacggcccggccgcgagggagggcggcggcggcggcggaggaggagggcgcggaagccacacccatcggcgagccgattccggggcagcgagtcgtcggcagccgcgctcgagcctccgcccgcaccgagccgcgggacccgggccgtaccggggaggggccgctccgggccgcagcgcgagggcagcgaggggcggcggggacctggcaccgggcggggccggcggcagcgaccatgatcgctttgttcaacaagctgctggactggttcaaggccctattctggaaggaggagatggagctcacgctggtcgggcttcagtactcgggcaagaccaccttcgtcaacgtgatcgcggtacgagggcgtcgggcgcggggtccccgggcgcgggccgcgggtcgggcctgtccccgcccgcgccgcgccctgctgagccggggtcgccgcctggcatagccgggcacggccgggcgccgggcgggggaggagccggccccgagcgcttggggcctagtacggcccgtgccgtgggggaccggggcggcgcgcgacccgctctctcacccgggccggtactgcacggctgggggcaggggaagggggacgaacagacagggccggtgccacggggcaggcggcaccgaggggctctcgaagcaggagggacccgctgccggctgagacgggccccctctggcccccgcgcaagggggcatgacggggcgaaagtgcacgggccttcctgtcccgcgggtagagggtcacgggacggggcggccgagaggcttgaggagggggtttgggcaagcccagccccacccagagggcttaacccctccttgccggaagaggaagccccggccctattgagggggaggggaggtatcccccggggtagaggagtcagctgaggcccttggctcaagcccagactcctccccaacttctccccgacccgcagtgtctagccgggggtccagggaggatcgcatggtaacgggagtttggagactccgtctggctcagaagtttkcaggagcaggtgctcccgacaagagaggatgaggtgtaggggcacggcccactggggccttgggagagtggctctaagggctttgggtcgtcaacactgaagtgggtgattgtaagtctttcagcgccaggggagtggtggggaaggagttaaaatctctctcaaaaaaggggaagatgagctccatgggtgtgagctgaggctgccgtaatggctgcggcctgcctgtcagagccaggctagacagggcttgtgggtcgaggaagcatgggacaggggctggggttgtccagggacctggccccagtcccaaagctgaggtttcccacaactgtgagttggccagatagtaaccaaagatactgatgagataggtcagcagaggaatgtatccagccggcctaggtacctctacctgtccgtgttgttgccccaccttgcagaagatgggcctcctcgacagttctcagcgtcctagaaggcaggggacgtcacttcattggacctgaggcatgaaggcagatggaaagctcgaggggcgggcatcctgtggttacacaattgaacactggcttcctttcccaaacatgctctgcaaatgacctctgcccttyctcgacccagtgtctcctgtctcctgacctgacagggcaggatcttcaggccaatgctgcggttttggcacagtaattttcggagctaacacccctgggctctgtctgcctaggctctgcccttggggtcagagaccctctggttaaacttggcattgacttaggctcttggattcccagagcaggcacataacacctggactctgacctgactctgcaggcctaggtggcttgggttctaggcgtttaggtctgagaaatgcagctgggcctaggtatctcctcgttccccagggtgttactatagctgtgctctgggacagggatccacaggtacccgggtgggttcggtttctgggtctgcagttgagcctttgacaggagggccccctctagaccagcatcatatccagagagttggagactatagcaggccagaaacagaacccaagagtcccaaattcccctgccagggtcaagagttcctgtgatatacaggaaaagccccccatctccagcccacaaggtcccctttttaatcttaaatttgccacttccgctggcacattctaaaagagcaggcaagctaaattcccttctttagagaggcttcccaaggaaaaccaccccatgtgggctgcagttggaattccagtgtcccggtcactccagtgttttcagatcctctggggctaccacactggcattgctgcccaccccgtgtataatcacagttgagtgtcttccagaaagaaacgaagagttgggacccctgggctctgttcccatgcctaccactgaatttctgaattacctgtgcctgttcatttggcctctgtttgtctcagatctttcgccattgggttttttctactcaccctatgaggtctggctgtaaatagaaattgagtttagtgtgtctagctgctcagcaggttaatgtgagctggaaagaaattatatacactgcttctaagaacctgaaacatcagccgggcatggtggctcacgcctgtaatcccagcaattgggaggccaaagtgggggkwtcacctgaggctaggagttcgagaccagcctggccaacatggtgaaaccccatctctactaaaaatacaaaaattagccaggcatggtggtggccacctgtaatcccagctacttgggaggctgaggcaagagaattgcttgaacccaggaggcggaggctgcagtgagttaagatcgtgccgccactgcactccagcctgggcaacaagagcgaaactccgtctcaaaaaaaaaaaaggaacctaaaacatcctttgagttctgaaaaagttgtgatgctagaaaagtgggagatgttttgtcctaggaaacaacagggtcattttcaaatatttaaaagtgtcaaagactgtcctatggaataactagtcttggagtgcccaaggggacttaggaacaatgggtggacattctaggaatgatagatttttttttcttttttttcttttttcttttttttttttgagacagagtgttgctctatcacccaggctgggagtgcagtggtacagtctcggctcactgcaacctccgcctcccaggctcaagcaattctcctgcctcagtctcccgagtagctgggattacaggcatacaccaccatgcctggctaatttttgtatttttagtagagatggggtttcgtcatgttggccaggctggtctcgaacccctgacctcaggtgatctgcctgcctcagcctcccaaagtgctgggattacaggtatgagccaccatgtccggccggattgttaactcaatataaagaactttctgatagttggaactgacccaagaggggatggggcagaagggactgaagtctgagacaagaggttgggctgcatgacttcaggttacttccaaccttaaatgaggagcctatgagacagggaggcattagcagggaaattaagtcataatctgattccaccttagctccgattcacagctgaacaagacctactggtgccggggagcctggctccttgaaggtcctcccagcatccccctctgccaaggtcacattctgccaggctgggcttctcatttacttggtagcctgtggatcttctagttgccaaagagcagtgatggttccccatgctatatcgaaaccatttccaagcatgttgtgagtcttatttacagttcctaggagaccgaaacccttctccccagttttacattcagaaacactgaggtccagagaagttcaagtttcttatccaagcaccccctgggatgagagacaaacaagaactgggcctccttcctcagactctattgttggggatggggtagactgcagcaggctgccggggtttgggtaattacagcacacttaattctccctgcttagctagaagaagccattccctcttcctcagtggttcctaactttgggggctctcagaactttttgatatctgaaagaagtgagagaccctttctccagaaaaatgtacacacaaacaaaactttgcacacacacagattgtgtacagtttcagggggttcaggggatctctgaagcccaactgtggacctcaggttggaaaccgctgctggaccttgtcattgggtgtcagtcctgggtactcagttcttatatcatcctaaggccctgatgaataggtggttcctgcagataaaagggaattgggctgggcgcggtggctcacgcctgtaatcccagcactttgggaggccgaggtgggcggatcacgaggtcaggagatcgaaaccatcctggccaacatggtgaaaccccgaatctactaaaaatacaaaaaaaaaaaaaaaaaattagctaggcatggtggcacgcgcctgtagtcccagctacttgggaggctgaggcaggagaactgcttgaacccaggaggcagaggctacagtgagccgagatcacaccactgcactcctgcctgggcgagagagtgagactccgtctcaaaaaaaaaaaagggaatcaaagcagtctattcagatgggatatcaggggtcttcatgtggacatggaggcaccaaataagagccaatcatctcctacatcttggctaatggtcagggcccctgatctctttatgtaacccaaggcaaattattcctaccagctggtgggagaaaaaggcatggtaaaggaacagggcttggccgggcaccgtggctcacccctataatcccagmgctttgggaggcccaggtaggcagatcacttgaggtcaggagttcaagaccatcctggccaatgtggtgaaaccctgtctctactaaaaatacaaaaattagctgggtgtggtggcacatgcctgtggtctcagctactggggaggctgaggcaggagaccctcgcttgagcccaggaggcagaggctgcagtgagctgagatcacatcactgcactccagcctgggccatagagcgagactctgtctcagaaaaaaaaaaaaaaaaaaaaaaaaaaaaaggaacagggctatcaccctcaggttcaatgttgaatgagcctcatctttttttttttctcaagccggagtcttgctctgtcacccaggctggagtacaatggcatgatctcggctcactgcaacctccacctcctgggttcaagcgattcacctgcctcagcctcccaagtagctgggattacaggcacacgccaccacacccggctaattttttgtatctttagtagagatggggtttcaccatgttgatcaggatggtctcaaactcctgacctcgtgatctgccccctcagcctcccaaagtgctgggattacaggtgtgagccatcgcgcccggccgagccccatctctttagcctgcttccaagggataagcagaagtgtcctacctgtgaacatggagatatgacctgggagggagttgggtctggccttatttgaagactgtaggtagtttagaagaatccagaaatcctagagacaatacagaatggattttggaaaatggaattacagtcaaacccccagtattcagcaaacatttactaatggtgttactatagacctgggtcctctcccaggaagtgttctttctagtgaggagacacatagataaataagcagacgatatagagtgtaggttatccttcccaataactggagtacagtacaaataaactgaaccatggataatccagaaattgcttggcatgcactgcattttcaggatgaccaatatactctgccctaaaaagtttgattttttagtttgaaaattcatctgctttctttgagatcctccttaactattagaacatgacttgcttcaagttctcttgctggaaggtaatttcttcttcctctccactggagagaaagtggcgtcagttactacagagagatgtaggttagacttgaggaagaattttcccctagtctaggcaaagagattgagactgtctgacaaaagcgggtcttttcacagggcatccccaggtgtaggcgggacacataggttggtgatagcccatcctgcctgaaagcacaggatgtgcaagagtaccccacagtgggaagtctaggaagctctggcctgrcctctgcatggttctcgcagcctcttggtctgcggtgggggcatatcgatttttgcactgtttcccattctgagtcttctttccagtcaggacagttcaacgaggacatgatccccaccgtgggtttcaacatgcgcaaaatcaccaaagggaatgtgactatcaaggtgagggcccagaagcttggggggtgcagaggactgtttttgtgtgtgtgtgtgtgtgtgtgtgtgtgtgtgttggggaggscaacggaggcccctgggaggagcgagctgaagtggggcagaggccagggtccccctgctgaggagctgggaaaagacagtagaagacttctaaggtagacggagagcgggtggagacgggggagaactggagaggaagccggggaggcagaggagagtagggcagggtaggagggggcatttgagacccaagacacgttttggtggcctgcccactactgaggctatctcaccctcttcttgctcagctctgggacattgggggacagccgcgtttccgcagcatgtgggagcgctactgccgaggagtgagcgccatcgtgtaagtacacgggaggcatcgccagactccagccttacccggcccccctagccctgctaccttcgaggacctcagaggcgcagggttttattagacataatccttggttcatgacacagtgtcggtccagggcctgcgtttattttgcatgccacttgtttcttattggataaatgccctgggcactcactacccaatctaagaaacagactatagactattaaccagccagatgcacctgtgcatcctcttcattgacttgtctccctcccctcaacccaaagtcaccactgtcttgaattttgtgtggtttaaatgattcttttttttttttttgagacggagtttcgctcttgttgcccaggctggcgtgcaatggtgcgatctcggctcaccacaacctcctgcctcccaggttcaagcgattctcccacttcagcatcccaagtagctgggattacaggcatgcgctaccacgcctggccacttttgtatttttagtagagacagggtttctccatgttggttaggctggtcttgaactcccgacctcaggtgatctgcctgcctcggcctcccaaattacatgcatgagccaccgcgcgcagccctctcttgctttttaaaaataatgttttttttggctgagcatggtgccacacacctgtaatcccagctacttgggaggctgaggcaagaggattgcttgagcccaggagtttagggccagcctaggcaacatagcaagatcctgtctttaaaaaaataaaataaaataaattttaaacattgaaaaatggcagggcatgggctgggcgcggtggctcacgcctgtaatcccagcactttgggaggccgaggtgggcggatcacgaggtcagaagatcgagaccatcctggctaacacagtgaaaccctgtctctaccaaaaatacaaaaaaaattagctgggcgtggtggcaggcgcctgtagtcccagctactcgcgaggctgaggcaggagaatggcgtgaacccaggaggcggagcttgcagtgagccgagatcgcatcactgcactccagcctgggcgacaaagcgagactctgtctcaaaaaaaaggaaaagaaaagaaaagaaaaatggcagggcacagggggaggccaaggcagacggattacttgaggtcagaagttcaaaaccaacctgggtaacatggtgcaaccctatctctacaaaagtacaaaaattagctgagcctggtagcacgcacctgtagtcccagctactcagacgactgaggtgggaggatctcttgagtccaggaagccgaggctgcagtgagctgtaattgcaccactgcactccaccctgggtgacagtgagaccctgcctcagaaaataataggctggatgcggtggctcatgcctgtaatcccagcactttgggagcccgagacgagtggatcacaaggtcaggagattgagcccatcctggctaacatggtgaaaccccatctctgctaaaaatacaaaaaattagccgggcgtggcggcatgtgcctgtagtcccagttacttgggaggttgaggcaggagaatcgcttgaacctggcaggcggaggtggcagtgagctgagattgcaccactgcactccagcctggcaacagagcgagactccatctcaaaaatgatattaataataataataaaatttattctatatatatatgcccaaacaatagattgtttagaatacacaataggttgctttttaacctgataacaaaaagtatcttgctaaaagaaatcttctaaggtttcctttgcttttttcactctaaccttatttagtctttccatgaaaacataagtgggtcactttgagagggacttacagctaatctcaaagggcccacgcttttccacatgagtaacggcttccccagagtagcacttggaggctaatggcaggcctaaggagtccctgcagctgttcactcccatagactcagaaaacatccgcggagcacctgccttgagccaggccaggtagcccatggatcccgaggtgaccaagctgcaacagatgctttcacctccaagcagcagctccttctcttccttgcaccacctcagcctgtggtgtcaacatgcttgtccccaccctgcctctttccccaggtacatggtggatgctgctgaccaggagaagattgaggcctctaagaacgagctccacaacctactggacaaacctcagctgcagggcatcccggtcagcagacctgagggagcgggatggggagggagctcggctgggaagtcactgggagcaggtaaaagccaggcatggtaggggcgcagagaggaaacgggacccaggaggccagctcaccacccagacaacctgggcacggctgccctagacctcatcctcaccctcccttctccgtaggtcttagtcctgggtaacaagcgagaccttccgggagcattggatgagaaggagctgattgagaaaatgtgagttgggtgactctatattactttctgctctcccaattccccaaccaccagaccaacagcctaggcttgctgctgttcttagtattagccacacggtggcagcagagccgaccttttcaggcacctcaccctcccctttgtagcctcttaggtaagaaaaaggccccgctgtcccctagccccaggccccctggacgttcgtagcctcagcggactctactctggtttcccccaggaatctgtctgccatccaggaccgagagatctgctgctactccatctcttgcaaagaaaaggacaacattggtgcgtaggatgggggaaagggaggagaggggagaggcatttctgagtgttttagtggctctcaggttctcgctccacaactttccctgaagtccaaagccctgtggctcttgggtagaaaaggcagccaggtggcccagattctgggcactatcccagcttgtcgccaagcggttgtgtgatctcgggcaaatcgatccccgctctgggcttcacctcctcgtttctaagattccagggctggacccggtgattctcaggtccctgctggctctgacatgctgtggctctgtctctttcccagcacctgaattccgctactactcattcagggccatgtggcgcttgccagctctggacttcttgtttgtttttgagaaagtgtctcgctctgtcacccaggctggagttcagtggcgtgaccatagctcactgcagcctccaactccactcctgggttcaagcaatcctctcayctgagcttcccatgtagctgagactccaggtgtgcgccacccctcctggcatctctggacttctgatacccttaggtttggtttcttgggcctctctgctgccccagcacggccagtacttgcaggccttataagctgttctcttttctcctatcagacatcaccctacagtggcttattcaacactcgaagtcacggagaagctgagactccagcccttctccctcagaccagggaccgtcatcatctaaacctgaagccgagctccccgcccacccctgtcgtccccctaagcccacccctcctcacccagtgtgaggagggccctctggggaccccagagtcctgttctgctgaggtttgaactcctgtttttattgtaaaataaattgccccccattctggtcccctaacttctcacccttccccgctgcctttgtcccatcacccagccctgcctccctcccagcagccctgggccacagcccccgcccctggcttttccccggcccgctcttgtacctcccttttcaacactctctgttattgtcctgtgtgtacagtatatatatgtatatatattttaattttttaatttaagcaaagactaaaatcaaccatttgatgctgcaggggcctttcaggatctgggagggggcagtctggagagaaggagggagacgcaggtggacytggggcaagttcagatcagaagaggtgcaggctggcacctgcggcaggtaccagcctgggcactggtggccgcctccctgtcccgtgtgtttccaccgcccaatctggcttgtcctggcagtgcttgaatgccacaggctggcaggggcctctgggggcccctcccctcgacccccagcctgggtagagccaccaggtacgacgaccaggtaccagaaaccaccaggcacacggggcagaaagccagcgtccatgccccagcagccccctcctgcctgttcctggctcccagctcccgcccctccccagggcccccacctccacggcccacttcattttctgttctcattttgcagagttgcacaaggagagaactcagcatggggggttggttctttgggttctgtttgtttatttgtttaatttaatgatttgtaaagtgatgttcctcttccttttttacacttttcagctcatatttaacctctgtttggaaaatgattcttgtaactgtacatttttttgcttcctaataacaatgacaacaaaaaaaataaatgaccagttttgtgttggggggggtgtatggtgctggttacttttccgcagttggcatgggttgccctacaggcccacagggccaccagcacacccccgcacgctgggcaccaacagagccacggagcgcgagcacatgcccgcccggggagcacaatggcgctgcacaaaacggcctcccacacgtgcgtccaggctcttgcgccacctccttctcattctcttttcagactttcatgtagtcccagctttgagccagcagctgccacttggggctgcagagctctgttgagggaactgcccagggctgggtagaggcagcaaggggacagggctgggtgctgttgtgtgcgaactgagctgcactctccttaggcccagttcaggcctcagcccctctttcccaggccctggatctcaccagcagccaaggttgagccagaaccagaaccctgtccctccggcccccagttcctaccccagaaccagttaactgtgcttcaggggtagggctgggcccacagagcctgggggagtgtcaccgcctttgctgcctctcagttagtgtcaatgctatgggtttcctggtaggagccctgccctcgctcctctgctggattctagtcccccacccgacctcaccgtcagagctggtcctccctcggcactgctcacagctgctgcctcagagcctggtgaccctgcctgctcaaatccgaggccatcttgacccagtttcacagtaagccccacctcctcccgctccacctccctcggcctctccttcaccctggaaaatggagcaggcccttgcagaacaccccagcccttctcacccctcccactgcaggaaaaaggagccaaactgtcccttagtcctgggagtggggaccttgactccccgtcctgggccctccagcccctcaccttcattggtgcccagggcttcctcctggaggcagtcatcagacctgtcagagcagttccctgcctggagaggcagttccccactgccagagagttggaggaaagaatgtggatggaatttggcatctgaagctaagtgattctagggtacctcccaactcctaagcaaaatgggacatgtcctcctggctaaggaggttgaatgggagccagggctctatcccctgccctctcctgactgcaagcatggctaggttttcctgggcctgggatcccgggagaggaccagcaatctcactcatctggggctgtttccaggccaaggtgcctttctcagatcctgtgatcctcactgaggattgaggtttgagataagagagctggttaccaggaagcaagcaagcatcctccttccacagtgccggcgtgcagcaggtgctaatatgacttaaagaatttgttcaggggccaggtgctcatgcctgtaatcccagtactttgggagcccgaggtaggagaatgacttgagtctgggagtttgagaccagcctgggcaaaatagtgagaccctatctctacaaataatcaaaaattagacaggcgtggtagtgcgcacctgtagtcccagctactcaggaagctgaggcaggagaatcgcttgagcccaggaagtggaggctgcaatgagctgtgatcacaccacagcactcagcttgagtgactgagtgggatcttgtctcaaaaaaaaaaaagtgttcagccaggcatggtggtacacacttgtagtcccagctactcaggaggctgagacaggaggactgcttgagcccaggagttcaaagccagcctgggcaacatagtgagacccccccacccagctcttaagaaaaaaaaaacacacataacctattaaagttgaatgggaacagaccatgagtataggtaaattgtcatgtttggggccctttgatgccaaaacctggatgcatttaagaatccctgggccaagcctgctcctaacactagagaattgaattcccaaaggagaggaaggaataaaaggttcggggcaccatgcaaagtgctttatgtatcttgtctcattaaatgaccataatcctctgtgaaggacagattattcccattttacagatgaggaagctgagactgagtttaagtaattgcattcagttccaggataggtgatgagaaggtgactcccaagtggagcagggagacccagtggatttcaggctcccctcagccctgtaacctggcatcaggatctgagggctggtctgaagtctgccctcgggtgagcgtgtcagtgccccctcagaccatcccagctcaagtccactgcccaccatgtgccaacccccccgcaagcctgggacccctaagcaacaaaccctacattgttcccccagctggcccaggctgcgaggacagtggctctttcccaaggccgctggcctgctgactgattctgcaagccattcacgttggcaggcttgggaggtggcggtggcagagccttggagccaccatctctcccccttcatctctgagccggccaaccagcaggagggagaggtggagggcaccctttgtggaggaggacccctaaacaggatgttgaggggtctgactcccctgccctggacttcacctcagttcacccggccccttcctgcatcccttaggaagctggtggtacttccgggcctggcaggggggtggagaaggagttggggaaatgccgaggaaacggtccccaagagcttcagcacgacaggcctgcctttggtcccctctccaacctgctcccccacccatctgaagtttctacagacagagctgggggcttcagtcaccgtggcaacaggtctgctgagaaacgggtgggtgtcactccccagcacaaagggtgtgtgcatggcggcgccatcacctagcaacggcctccctctctcttggcggcatcacccgccctgggggtgggtgccagggagagagaacaaggccgttaagatccccaggagagggggagggaagcttgggtacagggcaggctgaggccaaggggtgtgggtgggtggacagaggagaatggagccccaggcgcttggaaaccctgcccctgcccatccctgggcccccggggcccttcctgaggccccatgtggatgctgtaggtaggcctggtgggcagaagtctggtgggacccaggacagagcttcagacagggggggtggttctgaggaaagctgagctcccaggcggggagcgactggtggcctggctgaggcatcacttctggttgatgctgtgccagcttcccagggacctacaaggctaagggtgccctctggaagggaccagaggtggggctgggggaagtggcacttcaagggcaagaccccacaggagaagctgcatgaagggtctgccgggggcagtgggagctctggcgggaagggtggtgcagtgggggctgggtgggggcaggccagggcaggcagctgggccgtctacaggcaaaacagtccattctaagaaactgaacaagagcagttctcagagtgacaaaggctgggaagccctggggctcacagaggaaagaccactggactccctccaaggggggctttgtggagagagggcatagcagagatgaaggctccagaggagatattttccaggcttttgacttcccaaggagcatggggtttaggccaggatgaggacttaggtcctccggctccccaagccctccatcctctctgtccctcaaaagccataaaacccttggagtcgccagggccacaaggctgttctgaacatcggccgcaaggctgttctgaacatcagccacaggccaggccaggtcaggagaaattctcctaggcactgccaggccaggaaggcccagctgcatctgggccctgccagaatgtggcacaagaaagtggatgggcataggggtagttctacctagtttattgtttctcaagaagggcctcctatgggaaagcacctaacaaggaggttgggacagggcaacccagggatcccaaagaaaggaggaggaaggagagagaaatcctctggaagaaaagaaggcaccagtaggaggaggcatccaggactgggacagatctggtccagagaagagtgtactggggctgggcgtggcagctcacacctgtaatcccagcactttgggaggccaaggcaggcagatcacttgaggtcaggagttcaacaccagcctggccaacatggtgaaaccccgcctcttctacaaatacaaaaattagccgggtgtgttggtgcacacctgtaatcccagctactcaggaggctgaggcaggagaatcgcttgaacccaggaggcggaggttgcagggagctgacatcaggcaaatgtactccagcctgggcaacagagcaagactccatctcaaaaaaaaaaaaaaaaaaaagaagagtgtggtgagccacactgggctggccccaaggagcccccattccaagatggggccccaggttggtggtaggaggatgatgcctgggaagggcacaactaaagtatggtcaggttccaaggcagagagagagaagagagactggaaccaagggagggcaggcaaagttctggctcccagctgctgggactcagagtttctgggcagttctaaggacctagaagcatcaccgcccaccagtggaaaggacagggttggaaggccccacaagggacaggaaaggccctgtgtggggagggggctttgacattcccaaaccttgacaagaggaaccaagtccatccctagacagcaagacaggcaacaaagcaagacctatggggaaagaacagcagacaccggcgggggtggcggcctctccctccctccccacccctactggggcctcagcaaggtgtgcccaggggcaggagtgggggtgactccctgggcttgtggaagtagatggaagaggacacctcggtcttgagcttgttgtccgacccattggcagcagaggcctccgaagccccgccgcactcctcacagcagcagcagcagcagcagtccaggaaggcctggcccagcggcctgcagatgcaaaggagcagcactggggtgatggcgcccttgaagaaggtggagaactggttgatgaggcccaggaggtccagggtctggcgggtcagctcggtggagaggtaggccaccacgatgttgcagacgttctctgggagggtgcagaaggcgtagaccacggtcaggcccaccacggtgctgttgagctggctctcacactgctcgtgcttgctggccctgcactctgacttcctccctggagggcctcgcacccgccatgtcaccagctggcaggtgactgtgaagaggatgggcaggcagaagtagcagccaaagtaccaccacatgcgggcgttctggtaggtcatcaccagtgaatacagggactcgggcaggctggctgagggtttcatgatgcatgagtccagggtgcccatggtgggggcaggctcctgtgccagctgccacagcaggagctcaggcacagccagcgtcatggagcccacccagatgacagccaacttggccaggatggattggcaccgctcgatgggcctcaccttgggcagggtgctggtggccacgtggaagcggtcaatgcccagggcacagaggctgaaagtcgtgactcccagagaggagacctgtgggcaggatgtgagggaagagagaagcacttggtcaaaatctatggggacaaggaaggacacctggcttctggctcagttagaccatgaattgagtgataagcatagaaattataataatgggccgggtgcggtgactcacacctgtaatcccagcactttgagaggccgaggcaggcagatcacttgagcccaggagttcaaggccagcctgggcaacatgatggaaccctgtctctactaaaaatacaaaaaaatagcctgtcgtggtgaggcacgcctgtggtcccaactactcgggaaacttaggtaggaggatggcttgagcctaggaggctgaggctgcagtgagccaagatcacgacactgcactccagcctgggtgacagagcaaaaccctgtggaaacaaggaaggaaggaaggaaggaaagaaggaaggaaggaaggaaggaaggaaagaaggaaggaattataataatggtaacaactccatttaatgagcatttccta

SEQ ID NO: 96491 - DNA, 18127 bp, Homo sapiens
attttatcattcactgtctttccttgtgttacatggttctttcattatacctccagtactctaacataaggcccagaggactgtcagggggaattttattgtctgcttggccttttgtactccctgtcttacttggggtatttcccattctggaggttggtgcccatttcctaggggcttaacctctcccttttcccattggaggtttcttgcactcatatgaataatcgcttcgtactttttggccgcttccctcgtgggaatttcaggcccctcttagcattagcgggtcggtataatccccgactggaaaaccgccctaagccttatgaggtgaccatggaaccaagtctggactccacactcgattcgtgtccactgacatgtctcagccatgcactttcaacctccaagtgaccccaaccaccaaggaaatactttgtcgccccagtagcaacttttcttaccttggtctgtgcacagagttacccacttgcctgggaattttaaggctccttcctgcccacgttgctgaaagtccggatttattcctcactttgggtggacccgatcctccgctccttgggccactgcaacaaggcagtgggacgtgtctcacgaggaaaagtaatcgctacccctcccaaaggagaatgggatcccagaagaccctcaaatttgttgaaaacaagtgctcagtgtagtcaagaaaaaccagcactgagacagaagacttcccagcaaggcatctttacttctgcagaagggtgctgcttgcgctggttgcaatcccaagagcacccgccaacaaaggagggaagtggtttttaaccctaacgcagttcctgtttctgtgtcctttccccattggctggggggttggaccgcacaatctgagctgatcccgattggctaaggtttaaactttcccaaatagggtagacgtgcgacaaagaagaaaaagcgggagtagaatctgtttacagcttatgaccaggaaattgagtctttgaagaggaacttagctgtcccaacagaggcatccgagaggcctggaggaggtgatgctggacagtaggaattgcctggtccgacgccctggctgccaggggcgcgcatctttgggtcttccctgctagaaggtgaactgagtgtgtccctggcgctctggcaaaagccatggaatgggcccacagtgagaattccagcttcgcctcttactagctggataacctagggagccgcgagacctccctgggcctcagcccccggtacagtggagccaacgggagaaacggcctcacgggattgatgcggggattgagcggggcacgggcggcggacaaacgcgggtcattatactcatctcccccagagcatgcgtcccagcgccacccgcttcctcgctccgcgcccggcctagaccttccgaccccgcccctgcgcgggccacaagcaggaatgcgagcaggcctggggcgcgcgggccgcagccgcatttccgggccggcgggagcgggcggcgggggaggggcggtcggggcctgcgccggccgccgtgtgacgcgccccctcatttgcatgcggagcgcccattggccacggcggccgccgggacaggaggcgggtcccctccccctcccgccgcagcggcggcagcagctgggctcggtgtaaacaagtccaggcgcctgcgaacccgggcccgggggggacggcgcccgccaggagcgccccccactcccagtgccagcccaccccggcggaccgggccccgcgcgcccaggcgaggtgaggcccgcgccgtcagggctgcgtgtcgccccgcgcccctgcccagcccgcgaggactgccccctcccccggcgcccgcccccacccccgcgccccaggtgagccccggagtccaggtaaggctccgcgttgcaggtaagagcccctgagcgtagaggaggccttggcgcccgcaggtgagagcccctcccctcctaggtgaccctcaaccttcacggcgaggcctcctacctcctccaggtgggggaccctctccccgatgaaccccctaaaccaccagtgaaccccactgctctccagatgaggtcgcaaggaccaaccagtgcctacccgcccatgctcccccgaaactgggaactgacagcccagcccctccaaagccccttcctccagcttcagctgccaggtcagcaagggtgaggccggaagcaggcgggtgactcaccctgggcacctccgagcctcagtttccccatggatgcaacctgaggcctcctcactgagtcaaaaccgagacgcctctggtccccggagaggctgctggctctggggaaaggagagagcagcccagtgtgacagagcgagtccccacggctctgggagtgcctcgcatgtgtgtggcccaggtcctgacagcccacctactccctccccggcaggcactgggctccctctgctccccgtgggccgctccccgcgtggggccactgcccccggcccccgccatggtgcggatttcaaagcccaagacgtttcaggcctacttggatgattgtcaccggaggtatagctgtgcccactgccgcgctcacctggccaaccacgacgacctcatctccaaggtaaccaaccaggccacagtggggctggaacctataggggctgcctggcagctccccaccggcagccctgaccccctcctctcttcccaccctctcaccctttagtccttccagggcagtcaggggcgtgcctacctcttcaactcagtgtgagtatctggcctcccttcttgctttccctgacctctgttgtgacctgtgacccctggcatcctgctgagactcccagagttccccggtgcaggcaggaaattgtgagcatcatttcttggatgctgaggacagacacagtgcttgagggggtgggccctgtgatggcaggaccctccctgggactaccccatgtccccacagggtgaacgtgggctgcgggccagccgaggagcgggtgctgctgaccggcctccatgctgtcgccgacatccactgcgagaactgcaagaccactttgggctggaaatatgtgagtcacccacctctgaccccaggctagcctttgacctgaccttccaacacctcctcctgacaagctgtcaccctatagcctttcagattgcataggccgagctcacacaagtcagcatccctgaccacattctctttatcttgcaccttgcaaggggtgtagaacttttctcttaacccatcccttctctcccaggcacttggatccccattagagagttaggatataatcagagtcaccatttatggaatgtttatgtgccttgcactgttgtgtgcctggcgtctattatctcattcaatcattgcagtgatcctctaggtagaagctattattatctctacagaagaagacagggaggcccagagatgttaggtaacttgcccaagatcacccaactggtaagtaacagaatagggaccagaatctgagttggttggttggtttttttttttcactccaaacccttggtcaccagcttatattgtcatttagagtatcagaaaaattgccccagactctgcaacaacatggagcttgggttcaccagcctccctttccatagtcctcattgccactgctgctgtccagggtctgatttcactaccctgagtctcatttccttatctctcagtggaagataaagccactgcctagcacccaggattgttacagggatcagattagatgctcaggaagatgctcttgggacactgcaagggacaggattcttcaggcgtcgcttggaactgtggtgcctctgtgaggtggatgtcccaggcagagccagccagccagccctgacctgagctcgctgctgaccctgccacagattggctgtgtgtctctggacaggtggcttggccactctggacctctaccaaataaagagctggccggccaggcacagtggctcacacctgtaatcccagcactttgggaggccgaggcgggtggatcacaaggtcaggagattgagaccatcctggctaacacggtgaaaccccatctctaccaaaaatacaaaaaaaaaaaaaaaaaatcagctgggtgtggtggcgggcgcctctagtcccagctactcatgaggttgaggcaggagaattgcgtgaacccaggaggcagagccttgcagtgagcggagacagagcgagactccgtttcaaaaataataataattaataaagagctggcctaaacaagaggtcaaaaactcaagtgccaggctgggtgtggtggctcacgcctgtaatcccagcacttttgggagtctgaggcaggtggatcacctgaggtcaggagttcgagaacagcctgactaacatggtgaaaccccatctctactaaaaatacaaaaattagctcggcgtggtggtgggcgcctgtaatcccagctactcggggccaaggcagcagaatcacttgaacccgggaagcggaggttgcagtgagccgatatcgcgccgttgcacttccagcctgggcgacagagcaagactccctctcaaaaccaaacaaacaaaaaaacctcaagtgcctgcaaggccaagcagatactgtagatgtgtaaagggtagcatagattggcagggttgggagttgggggcaggctgggcaaactggagtgagcaaggcctacttatattttaatactttaaagttatttttattaaactgtctgctgtccaaacataatacatgttgtaggccaaaatggccatgaagctaccagtttgcaaaccctgaactgtgaaatcttttagccacttccctatcttctctgttggagccatcattagtacttaaaaaagtacctttgagtcagggagttctattctactctgtgtttgtgagaaatacggccctgcccctctgggccacagtttcctcatatgtaaaatggggccactcatgtccacttcccaaccccagtgccttgtggtgagactgttgctccggggatgacggtcccgcccctcctttcaggaacaggcctttgagagcagccagaagtacaaagaggggaagtacatcattgaactcaaccacatgatcaaagacaacggctgggactgacccccgctcccccgacgcatgtggctccagcccggcctggccgccagggagcgccactggcttcccgccacccgaagggagctctggaccctcagagcccctgcagaggacggatctagctcctgtatatatattttattgcatgcactgtgaccttggggggagaacagaagggggacgacgcccccgcacctcctgcgatctggctggcttggatctcgtttttaacccgttcctgccccacctgccctatagttatggcctgtgttctgctctcctggtcccagtgcaccgtctgctctgtgaactcctcccaccaggcccttcttaccccacgcgtgtctgtccccctcgttctgtagcgtttgtacataataaaacaatggagtggagacagctcaggctcgcgtgtaatccgggaagggggagctcaagcggagatttccgcccctatagacctgtgcggttctgagccccggcggggcatggggtaggcacagccgtccaagctgggtctccgggaaccgggacggtttcactgctggcggaggtcctgagcccactctggctgcctacgccgtgacctcggctgatctgcgtctgctcatctgcagcgtttggccgccgcctaggggcagcgtcccagggaggcaaccgcgccgccggcctcgcagccccctcgcggtcggactgcaactcccagcggcccccgcgtggtccgtccggctccttcgggcgcgcctcagcgctgagcctgccgggaagtgtagttccgagggttccccagcgcgggaccttcgggaaaccctggcgcgaggcgtcagaagctgtcggactgtgagcgccttcgaactttggaggcttggctcgkgatggaggtttttttagcatggggaccagggaggactacggtgctcgggactgggctgcggcctcctcgcggccccgagtgycctgtgaaatcagctcaggccgcgtccctctagcctgcactttccctctgttcacgctgcttccctccagggcccggcctccaagtgaaggggggcggagggyggtcacctgccagaaggtctggggcgccaaggtgtgtcccgggactcttggctccgtccaggttccaggccccgccccccagcttatccctagccggggctccccaccgtgggaacggggaccagctggccggaagcgccaaactgcgtccctgtccgagccctggggatcartcaagccgaggagttaattatgtaatgagggggcagggggtcgaggctaatgaagcctcccggggtggggagggaggggaggaggggaccgtacccaggtatccgaccccctctcggaccccttcgaggccccaggggtctccaccccagcccaactccagggccccaaagaggggaggggctgtgatcctggatctggaaggggctgagctgtgagctataaagggggcatctcgcagcaccgggggccctaagcagcgagacctgaggccagacggaactacaacatgtaccatccacgagaattgtacccgtccctgggggccggctaccgcctggggcccgcccaacctggggccgactccagcttcccacccgccctagcggagggctaccgctaccccggtgagcgttgggaccagctcctgggtaggagaataggggggctgtggccctcggctggctcctcattcttccccggcttccagaactggacacccctaaactggattgcttcctctccgggatggaggctgctccccgcaccctggccgcgcacccacctctgccccttctgccccctgccatgggcactgagccggccccatcagctccagaggccctccattccctcccgggggtcagcctgagcctggagaaccgggagctatggaaggagttcagctctgtgggaacagaaatgatcatcaccaaagctgggaggtgaggggmtggccagggtccgtgtttctggtgggggtctcttgggaaaggcagagtccctggggagggggctaggactgggtggttcccgaggggctagagctctgcctaggcctagaatctgactatggcctggggcaagggttactctgtggcaggaatcaggagtcactctgtgacaagggttaagggccagtctgtggagtctgtggctgagtttagggaccaatctatggcaagggtcatgggtcagtctggggcagggtcaggaagtccctctgggttataggttagtgtgtggcttagaccagcatccagacaaggacagggggtcaagggccagcccattgaccagcatcagggaaatctggccaggattcgggatcagtatgcaactcgaataggagtcagtatatgactaggtccagggtcaccctagaggcagggacacggtcagtgtttgaccttagatgaggtctttakctggggcaggaactcaagccctagcatggaaagtcctcggccctactgcaggcagggtatattttttctaaagcaaattcatctaagagctgcagattctggtgctggagatcaggggaggagaggagggtggggacaggaagctcctagcaagaaagttagtcacccctgcttctgcaaataggctttgaggggtaggagtcatggctctgttcctaacctgctgtgtgacagatcacttaacccgtctgtcctgtttccccaaatgtaaaatgagacaagaaaaccttccagctctaagattccgccctctggcttcttttttttttttttttttttttgagatggagtctcgctctgttgcccaggctagagtgtagtggcacgatctcgtcagctcaccgcaacctctgcttcctggattcaagcgattctcctgcctcagcctcccgagtagctgggactataggcacacaccaccacacccggctaatttttgtagttttagtagagacggtgtttcaccatattggccaggctggtctcaaacttctgacctcatgatccttccacctcggcttcctaaagtgctgagattacaggcatgagccactgcgcctggccctttttcatttttcagagacagtgtcttgccctgttgcccaggctggagtgcagtggtgcaattgtggctcactgtagtcttgacttcccaggctcaagtgaccctcccgcctcagcctctgtagtaactgggactatcagtgtgcaccaccatgcctggctaattttttaatttttttgtrgagatggggtctttctatgttgcccaggctggtcttgaattcctgactcaagagatcctcccaccttggcctcccaaagtatagggattagaggtgtgagccacagcctccagcctgccctctgggttctaattccacctcctttgatgtttctctgacagctctggggagcccgttgttatgtcccgttactggtgctgggcccacccctggccagtgggtagctccaggcctctcctgtcccctcccttgcacaggcgcatgttccctgcctgccgagtgtcagtcactggcctggaccccgaggcccgctacttgtttcttctggatgtgattccggtggatggggctcgctaccgctggcagggccggcgctgggagcccagcggcaaggcagagccccgcctgcctgaccgtgtctacattcaccccgactctcctgccactggtgcacattggatgcggcagcctgtgtctttccatcgtgtcaagctcaccaacagcacgctggacccccacggccacgtgaggcccaggctgggactccaggatagggttggggggtgctggaagggaggccaagggtgaggcgcagggcagggaatcactcccatttcctccctcccagctgatcctgcactccatgcacaagtaccaaccccgcatacacctagttcgggcagcccagctctgcagccagcactgsgggggcatggcctccttccgcttccccgagaccacattcatctccgtgacagcctaccagaacccacaggtgagtgaccctgcttgagggggtggtggccccctgcccagaccgcagttgctttgaccctgcatgtgtgtccccagatcacacaactgaagattgcagccaatccctttgccaaaggcttccgggagaacggcagaaactgtaagaggtgggagttgttcattcatttgttcatgcattcaacaaatgtttattaatcactcactgtgtgccaggcaccgtgctggacatcagaaatgcagtggtaagtgaaaacattcattcactgactcagcaaatacttatatagtacctgctatgtgccagggacagttccaggcactggagataaaacaaacaaagcaaaccaaagccccggccctcatgcagctgatttctagtggggagagtagacaagcagacaagagaaataaataaaatgtcatctgttaggaagccattctaaagagaagagagaccaggtgtggtggctcacgcatgtaatcccagcactctgggaggctgaggcgggcagatcacctgaggccaggagttcgagaccagcctgccaacatggtgaaaccctgtctctgctaaaaatacaaaaattagccaggcatggtggcaaacgcctgtaatcccaactacttgggaggctgaggcaggagaatctcttgaacccaggaggtggaggttgcagtgagtcgagatcatgccattgcattccagcctaggcaacacgagcaaaacttcctctcaaaaaaaaaaaaaaaaagaaagaaaagaaaactctgtctcaaaaaaaaaaaaaaaaagaaaaaaaagaaaaaggagaagagaaataaaccaggaaaagataggaaggactggggtgaggtattagataagaggcctggaaaggcctcagtgggaagaagacacttgagaaagagctgaaggaagtacgggagggagccaggtgggcatctggcaaagcacactagggagtgggaacagcacgtgcaaaggccctgaggtggggctgtgcctgtggcgtggctgcagtggagtgactaagagtcaggcaggggaggggaagccaggttatgtcggacagtaaaggttccgtaaggccgtgggaactgttccaagtgcagcacctcagagctggcccctgccctcaagtagcttccagtttgtcagaagagacagacatgaaccaaggagtcactccatcaaatgcaaaagcagaactgtgacggatgttatgagggaggggtgtgtgctctcggaggtcagggaggacttccttgaggaacttgcgcttgcagtgaggcaaggataggtttggtggctcatgcctgtagtcccagcactttcggaggctgagatggaaagatcacttgagcccaggagttggaggctgcagtgagctgtgacctgtgactgtgccactgcactccagcctgggcaacatagcaagaccccatctcaaattttaaaaatgaaaagaaaaaggacaggttcagcccgtgaagaggggacagaagaggattccagagagaggctgagagtggagatggggcagaaagatgagctaggtgagactgtgccctggccttgccactgggaaggagtttccactgatactaaacacaataggaaagcatggacaaatttgagcagggacaaaattccagctctgccactttctagttatttaattttctggccttcagtttcttcatctataaaatgggtataatgatggcccctacctgacagggtccctgggagggtgaaatgcctggcaccgggtaagtactgttaccatcaccatggccatcaccatcatcatcatcaycaccaccactgttccccagggagcgagacgcccgtgtgaagaggaarctgcggggcccagagccagcagccacagaggcctatgggagcggaggtgagtgtagtcccgatggcgatggggccaggcctgagacagggatcctccctagcccaacctctcccttccctctccccagacacaccaggtggtccctgcgactccaccctgggtggagacattcgtgaatcagatccagaacaggccccagcccccggggaagccaccgctgccccggcacctctgtgtggtggccccagtgctgaggcctacctcctgcaccctgcggctttccatggggcccccagtcaccttcccaccaggtgagtgggacaggggaccaggcggggctgcgggtccctctgccctgctctgacatccctctctccatgtcaggagccccagcttcccggaggctccagactccgggcgctcagccccctactcggctgcatttctggagctgccgcacgggtcagggggctccgggtacccagcggctccaccggcggtaccctttgccccrcactttctccaagggggccccttccctctaccatacaccgcgcctgggggctatctggatgtgggctccaaacccatgtactgaaccactgctgggcccctctgcctccatcacaaacctcccgctcccttcccccagccctggagccccctcacctccaccggccccatcccccacaccaaatggccgccttgggcctgcccacccaccccctcaacttcacaccttgatttcactcccacccccctstggcttcaaagcctaaccaaggctgctgggagtccagctggggccggcttccccttcccggctctcacctccgtgtgaatggaaggggctctgcctggccaaatggggccacagaccagcatccccacttaccaggcctccccatgggctctggaggggctcaatccccacccccccacacacactggtgcaggccacaccagtctgttgttctgggaccagagtatttttgttaataaaactcaaaagccatccatgctcaggaaacattgggctcctgtgtttggccctgggcggggctgggtgagcaaaggctttgctaggagacccaggcccagatctagacctgtgtttccagctgcctgacctagcacaaaatccactggccctctaggcccatctcctcttcaggaaaatggagaaatcagaatcctgtgattctgtgtgtgcctgtgtgtgtatgctgttaataagataaggctgcccatgagaacagagccctctccctagggctggggaagccagcaggcagcggcccctggaggccctgggcaagctgactggcctgagcctggccctcttggcaggtcggggccctgaggcagtcaaggccctgacgtccaccccaggtcccaggccagcaaccctgtgcattcccaaccaagtctggcacaaacccaaaaaccatttttcttcttttattagaattttttcattttttttctcaaaatttttatctaaaaacaaacagaaaaaagaaggaaaaaaagaaaaaaaaattattggaaacttcatggttcaagtggggagagaggaggaggaacatggagctaggtctccaggcctctccagagaagtcctcaccctcgaagcaccctcttgggggacagcagagccaggacagccccccccacgcccagcctccgtctgaggaagatggcagagtcacagtggtgcgagggccagaagggttggagggggcaggggccgggcggggtcacaggaagtagtcggccacgggcttcttggaggggatgccccgtgtctcttggggagcagcctcaaagatgatgaaatctttctggagatgctcgtccagctccaagatggctgccacattcccacagctggaaggcggggcagcagggtcaggagcagctcggctcagatgcccgcccatcccagcccggcccagccggctcaccggtagcagtagttgggtgccgaccacacagtgagcaccgtctcattgaagtgccacttgtaaccttccatcaccagttggtgggcacggcagatcatgtcaatgtcattggctgcgttgaactgggccaccacgtcactgccaaataggtagccggctcctcgggggctcacgccccagcctgtggtgtctgatgcggaaagggagggatggagagggatgtcctcaggcttctctggctgccagcgctgccccttgagggtgagcagcctggcccctccccaagtccaccagaggcccgtgggaccagagcatggggcctgaatatggtctgtgggatggcggggaccaggacagcaaatgtaggggcagataagctccagaggagaaagaacgcccaatgcctggggccccctcataatcacagtgatcatacaatccccgtccaaacagcacataagagtgaaaggggcactcccagagacagaagggcaccctgtgttgtcacagggaggtccggagtgactgtggagcagcggctgcatgtgtgtgtctgcatgtgtgtgtctgtatgtgtgtggctgtgatggagcagaggcctcgtgtgcgtgtgtgtggctgtgatggagcagaggctatgtgtatgtgtgtgtgtgtctgcgctggagcagaggctgcctgtgcgtgtgtgcctgtgacaacaggaactctggctggtcctcagaagacctgactttaaatctcagctctgctctacactagtggaaaacccacaaaatgaggggtctcagggggctaccattctggggttctgacctctgaagaagctgctgtcatgttctaaggccccttcacttcagggagccatgacttggttgtcctccacagccctctgggccatgccccaagccactgtgtgctcaaagcacctgccatgcagacctccctgctcctcctccagggttccagccatttggcaggtggaggacgagtgacagtgaagaccagccctgctccctctctttcccaacccctcctggctgtccctgcctgcccctgcccacatgccctcaccttctgggtcagaccagaggaggtcacacatgggcccatcatgaggcacctcttgctttcggtcgattgtccgaatctgatccagggtctggatggagggggagaggcccccgtgcacgcagaagatctacaggggagagcagggaaagaggacggggctgaggcctgaagcccccctcctctccctgtcccatggagccctgggctggcttaccttgccatcgatgatggctgacaggctgaggtagtcaaagatctcagtgcagtagcgccacacagtcaccgagccgtacttgcgcaggcactcatcgtagaagccatagacctgcgtgatctggcgactctcatggttgccccggatcagtgtgatgcgatcaggatagcgaacctgggggtggccaccaagccagggctggcgcctagacggtctctccacacatccctctctgacctcctcgtgcccgccagcctgccatcctcacaaccactgcccagcacactcctggcacctcttgcctgaatcgtgtggcatcagccacctcccaggcccacacgacccctccagagaatgtaaagctgacccattccctcaactatgaacctaatggctcttctttcacctaccagacacagaccgggtccctagcaaggcacccaggccctttgtcatctggccccacactgcctctcccaccagtggcatcaatgacctgccacattcgcaacagtgagcctctgcccctcccagaatgctgccccgctggcctcaacccccatcaagtctctgaccacccccaaaagcagaatcggtccatcaccagtgacacagctccaaggtggggctggtcacgataggagatgagggcggaacggactaagacaggcccggcccgaggtcgcccaggttgggggtgcagaagccggggactgccaccttaagtgccagcagcaggaggaacgtttcgacgctatagaagccacggtccacaaagtcccccatgaagaggtagttggtctcagggacgtcgccacctacctgtggggaagtagaaagttttgccctgtcgtaaacagtcccctaccccctacctgtttctgtccagcggaggcccttcttccacaaccacccatctaacttggggccccttgcccccactccacgccccaaattaaggctcccaccctcaattacaggggtcttccagtcatccccccgttacatttcacagtgttggccacactcttactctgaacagctctttgaggtcatagaattgtccatggatgtcgccgcacacctggggaacaggaagagtggggttggaactcaagcagtgggagttgccagggactaccctccaaacacccgctgctttagtgagctttatcactcttggctgcacttctacttcctaggaccaaaattctcctctcccaccccaagtcagtctggtctggaaccatacccactgtcctatgctgagtaccaactattctgtaggcaagagctagaactaagtccttccaggtagatgtcccggccccttcctctctctactccccacaaagtacccagaatcaagttactaacacagagccctggagatatgtgagcagaatcactcgccaaataggagtccttctgccctggccaagaatctccactaacaaatccaaagtcccttcccataacccctttcttttctttcctttcttttttttttttttagacggagtctcactctgtcgcctagcctggagtgcggtggcgcgatctcggctcactgcaagctccgcctcctgggttcacgtcattctcctgcctcagcctcccgagtagctgggactacaggtgtccaccaccacacctggctaatttttttgtatttttagtagagatggggtttcaccatgttagccaggatggtctcgatctcctgacctcatgatccacctgcctcggcctcccaaagtgctgggattacaggcgtgagccgccgcgcccggcctgttttttttgtttttttttgtttttttttgagacggagtctccctctgtcacccaggctggagtgcagtggcctgatctcagctcactgcaatctccaactctggggttcaagcgattctcctgcctcagcctcccaagtagctgggattacaggcacgtgccaccacgcgtggctaatttttgtatttttagtagaaacggtttcaccatgttggccaggctggtctcgaactcctaacctcaagtgatgtgcccaccttgccctcccaaaatgctgggatcacaggtgtgagccaacgtgcacagcaacccccacttcttttagcagtgctccgttgaaggtgagggaaaggacagataaaagagcttagggttgggcttatagagcccccaagatgaagaggaaacttcatgtgcctgaaagaccaggcctggctctgcagggacagcaggtactcactgtgactggcgagtccaccctctgcacgttgctctcctctaccaagatctctctggagacaggagaagaccagggtcaccacagccaggccagcccagcccaattcctgaccttttttggggggaggggaggatatgaggcagtcctggaagctccagggggcaggagtgaagcgtacagtctccccaaaacaggctgaccacggcccttcagcatgcaacacccttccgtggccccctgctgccaaaaggacaaagtccaacctcttatcccagcgttccaggccttctgagcaggctgggacttttccagccctgactccccctgccgctccctcttccgcatccaggactcactcctgggaggcgggtctccccatcctctccacagcagagcttaagtcacccttggccaatcacagagcccttctcccaggctatccagacacaagggtaggtgcccagggcaggcccacagtggatgcgccttcaaagtgatgcgctcttggccaggtgcggtggctcatgcctgtaatcccagcactttgggatgccagggtgggcagatcacgaggtcaggagtttgagaccagcctgactaacatggtgaaaccctgtctctactaaatatacaaaaattagccaggcgtggtggcgcgtgcctgtaatcccagctacttgggaggctgaggcaggagaatcgcttgaacctgggaggtgggggctgcagtgagctaagatcgcgccactgcactccagcctgggcgacagagcaagacttcatctcaaaaaaaaaaaaaaaaaagtgaggtgctcttgccatgtgttcagtatttctttatgactatgaggacttaaatattttttatttctccttgcagtgcagtctacttctacttgagtgagcaggagatgaaatcactttgccaggtaagacacccaattttttttttttttttttttttttgagacagagtctggctccattgcccagtctggagtgcagtggcgccatctttgctcactgcaaacctctgcttcctgggtcaagtgattctcctgcctcaacctcccgagtagctgggattagaagcatgtaccaccacgcccagctaatttttgtatttttagtagagtcgagatttcactatgttgcccaggctggtctcgaactcctgacctcaagtgatctacccacctttgcctcccaaagtgctgggattacagatgtgagccactgcacccagcctatagatacccaatttaagcaacactgtatttccaaattttgcctggtaatagcagcagtgaacattcgagctcatactgtgtgccacaaatgttattaagagcttggcaggcaggtactatgatgattcccggtacacagatgaagaaattgaagcagggaaggaggctggcttggtgccagtgacacaggtgggatatgaaccagggaagcctggctctggggtctgactctttatcaagatattctgatgtgggaggcccaactcgcctggcccccctctttctgccaatctcttccctt

SEQ ID NO: 96492 - DNA, 40686 bp, Homo sapiens
ttgtaatggcctggttatttctctctctccatcaccagaatggaagccctgcgaggctggggaccttctccatcttgtttctgctgagtccccaaggccctagacagtgcctcaacagtaactccataaatctttggtgagtgagtcaatgaatgaatgaatgaatgaatgagaaccttgcaacatgcacatgaaagaagcagagcaggccaggcgtggtggctcacgcctgtaatcccagcactttgggaggccaaggcgggcggatcacgaggtcaggagatcaagaccatcctggctaacacgaaaccccatctctactaaaaatacaaaaaattagccaggtgtggtggcgggcacctgtaatcccagctactcaggaggctgaggcaggagaatcgcttgaacccgagaggcggaggttgaagtgagccaagattgcaccactgcactccagcatgggtgacagaacaagactccgtctcaaaaaaaaaagaaaaaagaaaaaaaaaagaagcagagcaggcgagcaggcatgtttctccctcagtaaggaagagaaacctgggtttctattccagctgatccagccatataacctccaagtcactccaacctccgtaagcctcagtgtctacagctgccaagtggcaagacatttgtaaccttctgggctgttattacaaggaaactgaagagggagggacttaaatatactttgtggaaagacagctcaaggacagaaagaacctgccctgtcctccaccctgttaaatcccttcctagctccagcagaaaccagagaggatcagggcctgatgtctccaggtttgaaagttcttgcagccctctgtggggaaggtgggaaggcccagtctatccttacaatgcacctcacccatcctctctcccaaggaggtgatgagtccctggctattcacttcaaatagacagaaggggtagggggcggcatccccaggacagggggccagaaatcattttctaatggagcatctcctctaaggcaagaggtttttttgctttggttttttttttttgagacagagtctcactctgtcacccaggctggagtgcagtggcatgatctcagctcaccgcaatctctgcctactgggttcaagctattctcctgcctcagcctttccagtagctgggattacaggcgagtgccaccacgccaagacaggagttttcagaacccaaggtctcctccttttgcccttctgcccctcagccccaaacctgagacccctctgctgactgcccctggcaaaccagaaggtgattatctgaaaaagcgctccttgccccacaatttacttcaaaactgaaaacatgccagggattagcaccaatcaccatatgcccaagttatgaatttgcttttatcctccccttccatcctagggaaggaatgtcaccactccaagggcaggggctttgctgtctgaatcgctgagctcaaaataatcattcctcaggacggtggtcgattacatttaacatctttaaacccacaaatagaaacaggttgtcttctccaagccaggcttctcccctgaggattctacctcagctaacgctgtggagctatttgcgatgcaaggctctcctgcgtaacactctggagaagccactaaacttccctaagccagcttactccccacttcaggaggaggacagtaacccttatgtgtctacacatacaggcatggataggtggcgaagtgtgatgtcaggttaaaaagggcaagtagaggctgagcccggtggctcacatctgtaattccagcactttaggaggccgaggcaggcagataacctgaggtcgggagttcgagaccaccctgaccaacatggagaaaccctgtctctactaaaaatacaaaattagcctagtgtggtggcgcatccctgtaatcccagctacttgggaggctgaggcaggagaatagcttgaacccagtaggcagagattgcggtgagccgagattgcaccattgcactccagcctgggtgacaagagcaagactcgtctcaaaaaaaaaaaaaaaaagggcaagtagaggctgggcatggtggctcactcctgtaatcccagcactttgggaggctgaggatggcagatcgcttgagcccaggagttcaacaccagcctgggcaacaacatgaaaccccatctgtgtgaaagatataaacattagctgggtgtggtggcatgcacctatagtctcagctactcaggaggctgaggtgggaggattgcttcagtccaggaggtagaggctgcagtgagctatgattgcaccaccagactccagcctgggtgacagagcaagatcgtgtctcaaaaaaggcgggggatagggggacagtagcaggtatgatgaaataacctacatgataccaccccatttttgccaaataatggtaaaatacagcagtgatagtactgtattagtatatgagagatacatgtaaaacacagcaactttgggatagagagcgggtttgtaaagtgattggtactttccatgtatttctatatgtatactttgtaaataatactttttgtaatcagaaaaaacatataggttttaaaaaatacccagctctggatcacctgaggtcaggagttcgagaccagcctggccaacatggtgaaaccccgtctctactaaaaatacaaaaattagctgggcgtggtggcacacgcctgtattcctactactcaggaggctgaggcaggagaattgcttgaacccaggaggtggacattgcagtgagctgagattacaccactgtactctagcctaggcaacagagcgagactccgtctcaaaaaaaaaaaaaaaaaaaaaaccatggctgggccatggtggctcacgcctgtaatcccagcacgttgggcagccaaggcgggtggatcatttgaggtcaggagttcgagaccagcctggccaacatgatgaaaccccgtctttactaaaaatataaaaattagccatatggtagttgtgtgagcctataatcccagctattcaggaggctgaggcaggagaatcacttgagcctgggaggtggaggttgcagtgagcctagatcgcaccactgcactccagcctgggcgagagagtgaaaccctgtctcaaacaacaacaaaaagaaaagaagaggggaggggaggagacgggaggacccagctctggagggaggaaagaaaaaaaaacaacttagttctcagttctcagggttgttgggaaaaacaaaggtccgtaaagaggccctatacctagaacacagttcattcggtgaacggaaaggagctgtgtgagctgttttttcatttagctaactttcatttagctcactttcatttagaagtgctggctatgtgctctacatgttacccacatcacctttctccagctggcaccctattttattttcttcaagtagctttcatcaccaggcattatctgataggttgtttttacctggctgcacatgattcatgccctggaaccgtgcctggccttgagaaggtgctcagtaataaatgttgttgagcaaaaaaatgaatgcaccgatcatacctagatcagggctcagtggggcagggggtaggaatggaactcacagctctggtgggctgggggcagcaagcatccaggaagtgggccgggctaggcagaggaaagttgcaggcttctgcacaggtccagcagcagtctgggggcccggaggaaccttgcttcctgcagggggagctaccgtccgcgcagcagccctgggcctaggtcacagggttcaggatgtggaataggcagcaggtagtgacagccaaggcagctttcccgaggggaaaggaaaaggtttggctggggacaggagaggagggaccccctggtaccacaaaacggatagatgcaagggctaaatgtcaagtgtctcagggtaagagcctgcagatgaagggacaggttaccgggattcctcttccccagagcccaccctttatccccgaccagacccctcaccagcaggcagttcctagtcagcaggactagacccagcagcaacaaatagatgcccacagcgatgaagacgatggcagggatggggagcagcaggggagggctgctgacaggagccggggttggattccacgggctagaggaggcctggacgagtacaggaggaaggggtgacaaggagatggagaggggctgcaggaacacgggaataccatgagggacgaggaggtggctgggagaggaacggccaccagatggtggggagagcgtcaacaggactacaccctgactcattatcttgtgccctgagcctgcctttttccctatcattcccagttcagcaacatcaagcacttcagcattctagagtcttctagggctgattttccttctggaatgcctctccaaagagatctcttgtctctgactcccttgccactcctttaccatccctcagcccacattaccggctcctgtcatccaacctgcaattttgcccctttccacaccagatgtccttgtgtagtatccctccctcccttacaatccgtcaatggctcccagtaactcacttaaaactttttctattatttattttattattattattcttattgagacggagtatcactgtcacccaggctggagcagtggggcaagcttggttcatgcaacctctgccacccgggttcaagcgattctcctacttcagcctccctagtagctgggattacaggtgcgcgccacgacgcccagctaatgtttgtatttttagtacagagggggttttgccatgttggccaggctggtcttgaactcctgatctcaggtgatccgcccgcctcggcctcccaaagtgctgggattccaggcatgagccaccgcacctggtcaatttttttagagacagtgtctcactctgtcacccaggctggagtgcagcggcatgatcatggctcgctgcagcctcgagctcctgggcttaaacgatcctcccacctcagtctcctcagtagctggaattacaggcgacagccaccacgcctggcacttaaaatttatgtcagtgacaaaattcccaatttagccctgcctacctctctccctccccctcttccaaacacacgatagccctagcagttccccaaatgctgcagcctccctctcacccccaggctgtttcctctgccggaaatgccttttctcgtggattacttagtcaactccttatcttgccaggaataccagaaatgtgccctcccgtgggaagtccattcctggactcttcctgacagctctcgtcctgagctggcaggttgtagtctctgttgggtagaagccccctccccagtccgtgctggaagacaggcccattcggggttaggagagggcgctgagggggcccagagaggggaaggggcccggacttacgtccatggggaagggcagagccagtcagtccgggagctgcagaaggaaggttctgggtctcagaggctgagaggcaccgttagaccggggtgcccaccctccttccctttcctgtttggggaaactgaggccatggctgggccggagggtggaattcgggaaggggaatggggggcgggggatccgaggcggcgccttcctcgcaggctccagcgcgccccaggccactcccctcctcagtccccacactccgggcttccccagtcggtcagcacccatcacctgcaccctcgggccgcgggcaattcacggattccgcgccaagctaggtccaatcgtccgagggaccggccccgcccagaagccgttcgcggcatcccgctgttgccatggtgaccagagcggtgtttgtacggcggctgccgaggcccaaactccctcttcccgcctcgcgcctccctcttcccgcctaagcttcaactgtcaccggctctgcgccgccgcggccctcggggctttctcgcggggagcgaaggggaagagcgaatcccgccgccgcccgcctgggtcggatcctcatcagatgccggacgttggaggaggcaccgggttctggggcgccacaggaggattgaacccccaggctacacccaccacttggatgtatctccggccaagccactgagcatctgcaaaagggagaaacgcctgccgctcagggatattgtaaacatcaatgctactttttatattttatttatatttatttatttatttatttatttatttatttatttatttttgagacggagtctcgctctgtcgcccaggctgcagtgcagtggcgcgatctcggctcactgcaacctccgcctcccgtgttcaagtgattcacctgcctcagcctcccgagtagctgggattacaggcgcgcactaccacacccggctaatttttgtatttttagtagagacagggtttcgcaatgttgaccaggctggtctcgaactcctgacctcaagtgatgcgcccgcctcagcttcccaaagtgctgggattataggcgtgagccaccgcgccgggcccggttcttttttactgatttatttattaattgatttatttattttttggagacagattttcgctcatctcccaggctggagtgcaatggtgtgatcttggctcactacaacctatgtctcctgggttcaagcgattctcccgcctcagcctcccgagtagctgagattacaggcgactgccaccacgcacacctaatttttgtatttttagtagagacggggtttcaccatgttggccaggctggtctcgaactcctaacctcaggcaatcccgcccgccttggcctcccaaagtgctaggattactggcatgagccactgtgcccagcctttttttctgaatttttagagatgtggtcttgctatgttgttaaggctggtcttgaactcctgggctcaagcagtcctccagcctcagcctcccaggtagctgggattacaggcataagccaccttcagtaggatctgctgaagcttcctgaaccagtgtgtagggtctcacatttccacagctttgcagttgctgatccctctgcctggaacaccctctgtcttcccctcaaacctcttcctcatccctcaagcacgtcctcagttttgcctctgtgaggtctccctgccaacctcaggcagaggtggctgctttggactgtgaattcccacagcatcctacagatactgttgttctcgcacttctcacaagatacttgaattcctcacttccatgtctggctccacaattagactgcaagtgtctggggcctggtctgagtcatctccgtatcctgagctctagtacttggcctagccctgggagccttggtgaatactcactgattctttttctttctttctttcttttttcttttcttttcttttttttttttttttttgaaacggagttttgctcttgtcgcccaggctggagtgcaatggtgtgatctcagctcactgcaacctccgccctggattcaagcaattctcctgcctcagcttccagagtagctggaagtgccaccatgcccagctaattttgtatttttagtagagacggggtttgtccatgttggtcaggctggtctcgaactcccgaccttaggtgttctgcccgccttggcctcccaaagtgctgggattacaggtgtgagccactgcgcctggcctgtttttttcttttaataaagtagacatggggtctcactatgttggccaggctagtctccaactcctgcctcaaatgatcctcccacctcggcctcccaggttgctggtattacaggccagagccactgcactcagccaatactcactgattctatgaatgaattgaaaccaaacaccatccacgaatgaagcattgttttccacacgtcctaatttccttggctttcaaggcactcagacctccccgtttcattcctaacctttttagatcacacacacacagacacttgcacacacccacacatgcacgctcacacaagcacccctctctatggaggcctccgacttcctaaacgatggctgaatcctggcattttcccctaaaaacaatgccaccatatacctatttttgtccatgttctccaccccaacatacctcaccacagctsctgctcctggggtttcctacaccatgaggcagccacggaaactgccaggggctgtgtccctggatccaaatcttccctcccactgtcaaccatactgaggtggtctcagccaccctcttggccacccctggccctctcagagggcgtttcaagcccagaaaacagaagtctagctgttgctaatgtcaccattattgatcctaaagaagattgtcttcttaggctgtcttccggtttttgtttttgtttttgttttttttgagacagagtctcactcggtagcccaggctggagtgcaatggcacaatcatggctcaccacaacagcctcgacctcctggctcaagggatccttccacctcagtctcccaagtagctgagactacaggtgcatgctacgacacccagctaatttttaaaattttttgtatagacggggtctcactgtattgctcaggctgtttttgaactcctgggctcaggcgatcctcctgcctcagcctctcgaattgctgggattacaagcgtgaaccactgtgcccggccttgggcggtcttattgtctgatggaatcctgaggaccaagttgaggccagttctcacctcagccctacaaaaggcctccaggaacacatattctgcatattctgccaacagagagacttcagccttggcaaggcccctggacacgtccgtggcctgcagtgcccagactcgctggtgctggtgttttgttcctaccatgggctcatacattatgcaggagcacgggcagtgccccaggcttgtgtgttgccaggcaagccaagacaagggatgatgtatgcaccccactttgccaaggccccatttcttttctttctctttttttttttttttgagatggagtcttgctctgttgcccacgctagagtgcagtggtgcgatctcagcgcactgcaacctctgcctcccaagttgagtgattctcctatctcagcctcccaaatagctgggattacagacgcatgccaccatgcccggctaatttttgtatttttagtagagacagggtttcaccatgttggccaggctagtcttaaactcctgaccttgtgatttgtccacgtcggcctcccaaagtgctgggttacagatgtgagctactgcgcctggctgtgccgaggccccacttctatccacatcacaacatttgctgggggcagagaaaaactgacttcacaatagccagctaaccgcaaagtctcctctcccgaagttggaagctggagatgtcagatgtatcatatgtagttccgcacttcccctaggaaagggcagacaggattgtatacttccaataatcgtggggtgggtgggagatcagagatgcagagttcccagaagatgaaagaagcttcagcaggcttggacgtgggaagggacctggcagttctgattctgatctaatactttcagctgcctccaayggacatccaacgatatcatctcccagagattaagaagaggttcaccagcctccttagtataaaatgaaaggcttgtgtttaggtaattaccctgggggaataaagaagcagtgctgagctagagctggtgtcaacagaggcctctccacagactttatcttacttaatccttacaggaggcacgagtggcagaaacaattacttccatcttataggttggaaataataatggcccagttggaaacaaaacgaaaaaaacctttaggccagtgcagtggctcacgcctgtaatcccagcactttgggaggccaaggcaggcggaccacctgaggtcaggagtttgagatcagcttggctagcatggcaaaaccccatctctactaaaaatacaaaaattagctgggcatggtggcaggtgcctataatccaagctacttgggaggctgagacaggagaattgctggaacccatgaggtgaaggttgcagtgagccaagatcgcaccactgcactccagcctgggtgacagacagagactccgcccccaaaaagaaaaaaaaatagctgggcgtggtggtgcatgcctgtaatctcagctactcgggaggctgaggcaggagaatcacttgaactggggaggcagagggcagaggttgcagtgagttgagatcatgtcactgaactccagcctgggcgagaaaaaaaaaaagcctttagaaccaggaaagatctggatttgaattctagttctgccacagtatatctgtgcaaccctggacaagtcaattgacctcactgagcctcagttgtactcatgtggaaagtggggataaccctcagggactggcagggctttctgtgattatttgagaaaatgtatgcaaggcacatggcatagaatgaaggctcattaaaatatatagccaggtgcagtggttcatgcctgcaatcccccagcactttgggaagctgaggtgaaaggatcggttgagcccaggagttcaagaccagcctcagaaacatagtgaactccatctctacaaaaaaaaaagaaaaattagacatgcatgttttctaattttcatgtgtatttatggtccaactacttgggaagctgaggtggaagaatctcttgagcccaggagtttttttgtttgttgttgttggtggtggttttttttttttcttttggaggcgaagtttcactcttgttgcccaggctggagtgcagttgtgcgatcttgactcactgcaacctctgccttctgggttcaagcgattcttctgcctcagtctcctaagtagctgggattacaggcacccgccaccacgcccagctaatttttgtatatttagtagagacagggtttcaccatgttgaccaggctggtcttgaacttctgacctcaggtaattcacccgccttggcctcccaaagggctgggattacaggcgtgagccaccacgccagggctgagcccaggagtttgagactacagtgagctatgattacaccactccactccagcatgggcaacagagtgagacactatctcaaaaaaaaaaaaaaaattataggccacgtacagtggctcacacctgtaatccctgcattttgggaggctgaggcgggtggatcacctgaggtcaggagtttgagaccagcctggccaacatgatgaatacccagtctctacaaaaaatacaaaaattaggctgggtgtggtggctctcacctgtaatcccagcactgcgggaggccgaggcaggcggatcacttgaggtcaggagttcgtgaccagcctggccaacatggtaaaaccctgtctctactaaaaatacaaaaattagccgagcatggcggcacgtgcctgtaatcccagatactcaggaagctgaggcaggagaattgcttgaacctgggaggcagaggttgcagtgagctgagattgcaccactggactccagcctgggtgacagaggaagactccatctcaaaaaaagaaaaaaacccaaaaccaaaaagcaaaaattagccaggcacggtggcacatgcttgtagccccagctactcaggaggctgaggtgggaagattgcttgaccgctgggggcagaggttgcaatgagccgagattgcgctagatagatagatagatagatagatvgacagacagacagacagacagacagacagacagatgacacaacaggcagggcatggtggctcatgcctgtaattctagctacttaggaggctgaagagggaggatcagttgagcccaggagttcaaggctacagggagccatgatcatgccactgcactccagcctggacgacagatcgagatctcatctctaaatatatacattttgaatgactattaatgaatatcacaatgcgtatgtgtatagcaactgtgctttacacagatctcatttaatcaccccagcagccccaggtagaggtgctgctgtttcattgatgaggagcccaaggctcagaggagttgaatcccttgcacaaggatgccaggctagtgactggcagaagcaggacttaggcctggcaatgggacttggtgtgtgctcagtggaggctcagagaggttgtgaaatttggccaaggtcacacagccagtctatgtgagaagaaagggattggacccttagctgtctgactccaatcacctgctgtgccctcagctttttctggtgtgcagatagagggtgggactggcattgcttgggacagtccctaacctgggacaggtaagtaaaaatactaaataataaatgctctggcacgccagccaggacttgccccagagcccaggcggggggaatcggacccttccctgggtatcatgtgggaaacaggccacttctggccacttattgtttacttattcacagcctttgatgatatcacacttgcacacctccgcagggcacccggtggagaggatgagtgaaacagcctgtgggcggcagaacctggaagaacagagaacggtaaactcaaggccaagggtaaattgggtggcgggtctctaaggactgcctgggggtgaaactcacctggggagacaggctaggggaaggaaagatggtggccaaagtcacagaggcttggatgggccctcctatacccctgccctgcactgcccctccacacgtggtggactgcctaatgctctatgttttgtttgtttttgttttgtttttgagacagggtctccctctgtcacccaggttggagtgcagtggcgcgatcatggctcactgtggcctccacctccctagctcaagcgatcctctcacctcagcctcctaagtagctgggactacaggcacacagcaccacgcccagctaatttttttgactttttgtagagaggaggtctcactgtgttgcccagcctggccccatgctttctggctgcacacccaggccaggacaggctggtgtgtctcccttcctctgctgggatgtcctgaacacccattraccacccgacaagggttcagagtatgtggtgcatcccatcttgggtttattttaggtggtatgtcagcaagaagacacacacacacacaaacacacaccacacacacaaacacacacaacacacacacacacaaacacacaccaaacacatcaacacacacaccatacacacaccacataaacacacataccacacacaatacacacacacaccacacaaacacacacaccactcaccacacacataccacatacaccacacacacaccacatacaccacacacacacaccacacataccacacacaccacacacacacaccatacacaccacacaaacacacataccacacacacaaatacacacacaccacacatgcaccacacacacaccacacacactacacaaacacaccacacaccacacacaccatacccacgcacaccacacacacaaaccacacacacacacaccacacacacaaacacacacaaacaccacacacacaccccatacacccaccccacacacaccccaccacacacacaccacacacatcacacacacaccacacacacaccctgaacaagctactctctttctctttccaattccctttcaacgcttctgattactgcaggagaaactctcaatttgctgccagaaaccctttaacacctttctctctgtgcttatctttttgttctttttttttttttttttttttttttttgagatggagtcttgctttgtcgcccaggctggagtacagtgacacgatcttggctcactgaaatctccacctcctgggttcaagcaattcttctgcctcaacctcctgactagctgggattacaggtgcatgccaccacgcccggctaatttttatatttttagtagagatggggttacaccatattggccaggggctggtctcgaacccttgaccttagttaatccgcacccccccgccgcccgccggcctccaaagtgctgggattacaggcttgagccactgcgcccggcctgatctttcttttttgaacaaggagagagccagcctccagttcagaatgagcagctgcccatagtatctagctagaatgttataaaatgtgttttcattttgtatattttttgttaccttctgtttatcacaggtggtactggttttctattttccagagtgataaaaagtttccttttaaagtacatggtagccacagtggcttacttctgtaatcccagcacattgggaggccaaggcaggcagatcgcctgaggtcaggagtttgagaccagcctgggcaacaggttgaaaccctgtctctactaaaaaaaatacaaacaattagccgagtgtggtggcaggcacctgtaatcccagctactcgggrggctgaggcaggagaatagcttaaacccaggaggcggaggttgcagtgagccgagatcgcaccattgccctccagcctgggcaacaagagcgaaacttcatctcaaatgaaagaaaataaagtacatggttagtttagcactgtggctcatgcctgtaatcccagcactctgggaggtgtgaggcaggcagatcacttgargtcgggagtttgagaccagcctgggcaacatggtgaaaccccatctctactaaaaatacaaaaattagccaagtgtgatggcacacacttgtaatcccagctactccagaggctgaggcaggagaatcgcttgaacctgggaggcggaggttgcagtgagctgagatcgcaccactgcactttagcttgggagacagagttaaaaaaaaaaaaaaaaggacatggttagctcatgctaaccatggtggttcacacctataatcccagcactttgtgaggccgaggcaggaggatcgggcgtattgctggagctcaggagtttgagaccagcatgagcaacatggcgaaaccctgtctctaccaaaaatacaaaaaattagccgtgcatggtggtggcttgcctatggtcccagctactcaggaggctgaggcaggaggatcacttgagcctggcaaatggaggttgcaggaagctgagatggcaccactgcattccagcctgggcaacagagtgagaaccccatctcaaaaaataatacatggtgaaaaacaaaacaaaacgcacaacctgtgctctgaaaatcagattacttggttcaaatccccgcttgtgccactttctacctgcatgaccttgagcaagccacacaacctctctgtgcctcaatttcctcatccgaacagtgactgagagtatgtctcacctgacacgtgatttgtgcctataatcccagcacttcgggaggccaaggtaggagaatgcttgaggccaggagtttgagaccaacctgggcaacaaatcgagacccccatctgtaggaaaaacttaaaaaataagctggtagtgatgagcctgagagcctgtagtcccagccacttgggaggctgaggcaggaggatcccctgagcacaggaatttgaggttacagtgagctmatcgtaccagtgtacttcatcaagggagacaaaatgagagaccccgtctcaaaaatcaaaacaaaacaaaaaccccagtatgtctgtcttaagattattgtggatattatgttagttaatatatataaagggcttagattgctgccggatgtctagtaaatgctctataaatgtttgctttttttttcttttggagacggagttttactctgtcaccaggctggagtgcagtggtctgatctcggctcactgcagcctctgcctttcagtttcaagcaattctcctgcctcagcttcctgagtagctgggattacaggcgtgtgccaccacgcctggctaattttttttgtatttttagtagaaatgggctttcaccatgttggtcaggctggtctcaaactcctgacctcatgatccacccacctcggcctcccaaagcattgcgattacaggtgtgagccactgtgcctggcctaatgtttgctcttattaggtcaaatagagaaaaacaacaacaacaataacaacaacaaaaaacacccataactgaccataactgaggtttttttttgtggggaaacaaaggtttggagaagctagaggctgagttaggatattggtaagtttctggattcccagtctaattgccagccatttcaatcttcaataattaatataacctctcagcttccacttaatcacttgcaaaatggaactaatcctatctcattggatgttgggattgatgtgtataaaggcggatcagaggcagggcacggtggctcatgcctgtaatcccaacactttgggaggccaaagcgggtggatcacttgaggtcaggagtttgagaccagcctggccaacatggtgaaaccccgtctctactaaaaatacaaaaattagctgggtgtggtggtgggcgccttgggagactgaggcaggagaatcgcttgaacccagcgggggcagattgcagtgagacaagatcgtgccactgcactccagcctgtgcaaaagagtaaaactccatctgaaaaaaataaaataaaataaaataaataagtaaataaataaataaaggcggctcagaaaatgagcattaggacaatgatgccttctcaactggtataatatcgcccccaagggggcaaaaaacttactctttttaatatggaaaagatatatgtaaatagacataaatatatctgtgttattaaactttcgtgataggcagcgattagaaaaaaaagtgtaaaaagggctccttaggggaacaataatgaaagaaaaattgagaaacactgctctccaaaccaagatttttcccgcttggcttgtttagccactagtgggcagtgaaattggcttaatgggtcatgatcaatatttggtggaaaaatggtctagaaaattccacagggcactgcatatagtaagtcagaatgtgttgtgcaaaggttttccattcaacgtgtgggtgcatgaactgcagtcacaaaataaaagatatctcggctgggcgccatggctcacctctgtaatcccaacacttttttttttttttttttgagacagagtcccactctgtggcccaagctggagtgcagtggcgtgatctcggctcactgcaagctctgtctcccaggttcatgccattctcctgcctcagcctcccaagtagctgggactacaggcacccaccaccatgcccagctaattttttgtattttacaaaaattacaggcgtgtgtaatcccaacactttggtaggccaaggcgggcagctcacttgaggtcaggagttcagaccagcctggccaatatggtgtctctactaagaatacaaaaattagccaggcgtggtagcatgcacctgtaatcccagctacttgggaggctgaggtaggagaatcatttacgcaggaggtggaggttgtagtgagctgagattgtgccactgcactccagcctggacaacagagtgggactctgtctcaaaaaaacaaaacaaacaaacaaaaaataaatacataaagaaataaaataaaagatatctcttgtgggtcactattaaaaaaatttaaagccattgctcaaaaccacaattttctcctctcatattttctctctcagacaagcctgtgcagccttggactgttttgctctcaacaagaagaaatcgacaaggaaaggaagaaatgtaggagagagtccagattccagtgagactcgggcctgactctaaccagctcatggcctgtaaactttcctcccttccacattttcttgtctagggtaagcacaggtgcagaggaaaatgaccatccctggtcacactcagtggctcacgcctgtaatcccagaattctgggaggctgaagcaggaggatcgcttgagcccaggagttgaagaccagcctgggcaacatagcaagatcccatctctagaaaaaaaaacctccccagattagccaggtgtggtggtgcacgcctgtcatcccagctactcaggaggctgaggtggaaggatcacttgagcccgggaggtggaggctgcagtgagctgtgattgtgtcactgcactccagcctgggtgacagagtgagactctgtctcaaatttaaaaaaaaagaaaaagaaaataactgcagaggggtgctactcctcctcactccttctgcctctcctactctcatcccttctcttcccctttttccctctcccaccttctctcctcccctcatgccttcccctctcttcgcctccttttctccagacttggaaggcagcggtcacatttaccgattttgtcatgtactgtatggtctgaagcatgtcattcaacttttctgagactcagatttctcagcagtaaaatgaggaagttatttgtaaggtggcatagatgattaaacgggaacatgtatataaagtatttcagcctggtgcctggcatacagtgggtgctcagaatgacagtaactggctactggctaccgtgtgaagtattgtagtttctatgcattggcatgatttagtcctcacaatgagctatgcaggagctgggcaaatagcagggcaggctgcctggtttcagaccccagctcaggatcttttcatatatatatatatatatatatatttttttttttttttgagacaaagtcttgctgtgttgcccagattggagtgcagtggcaccatctcggatcactgcaacctccgcctcctgggttcaagcaattctcctgcctcagcctcctgagtgattgagattacggatgtgcaccaccatacctggctaatttttgtattttcagtagggatggggtttcgccatgttggccaggctggtctcgaactcctgacctcaggtgatccacccccttctgcctcccaaagtgctgggatcacaggcgtgagccaccatgcctggccgctcttggtttaacttttaattttcagagtcccatccagagggaagaaaataaagtagctaaagaagcaaacactggccgagcatggtggctcatgcctgtaatcccagcactttaggaggccaaggcaaggggattgcttgaggccaggagttcaagaccagcctgagcaacatagcaagaccccatctctataaaaagtacaaagattcctttccatagaacatagctaaaaatttttttttaaatacaaaaattagctgagtgttgtgtgcacacctgtagtcccagctactctggaggctgaggcagaggctaaggaggattgcttgagtccagaagtttgagtctgcaatgaggtaggatcatgccattgcattccagtctggacaacagagtgagaccctgtctcaaaagaatatgaggaagaagccgggcgcagtggctcacacctgtaatcccagcactttgggaggctgaggtgagcagaccacctgagatcaggagttcgagaccagcctgaccaacagggagaaaccccatatctactaaaaatacaaaattagccaggcgtggtggcgcatggctgtaatcccagctactcgggaggctaaggcaggagaatcgcttgaatctgggaggcgacgtttgcggtaagctgagattgcgctattgcgctccagcctggatacctggataacaagagcgaacctccatctaaaaaaaaaaaaaaaaaaaaaaaaaaaaaagagaggaaggaggaggagaaggataagttctgaaaatatgaatgaggatgtctaaattgtattcagtggtgttttttccctcctttttaaaaaagcctttcagttccttaggaaaataagtttatgttttctatatctgcctaacattatagggacaaataaattcagaaaatatgattttaaaaaatttttattcacttcctgactgtttaaccttggacaagttaccaaacctctctgtgcctctgttttctgatctgtaaaacagaggtgcagtaataatccctacccacaaggttgctttggataaatgacttgatatttttaattaaatttttttttttttgagacagagtctcgctctgtcgcccaggctgaagtgcagtggcgtgatctcggcttctcagctcactgcaacctccgcctcccaggttcaagcgattctcctgcctcagcctcccaagtagctgggattacaggcacatgccaccatgcccagctaatttttgtatttttagtagagatggggtttcaccatgttggtcaggctggtcttgaactcctgaccttgtgatctgcccgccttggcctcccaaagtgctgggattacaggcgtgagccactgcgcccagcccttaattgatttttttagagacggagtcgcactctgtggcccaaggctggagtgcagtctcgtgatcaaagctcactgcagcctcaacctcctgtcctcaagtgatcctcttgccttggcctcccaaagtgctggtactacaggtgtgcaccaccacacttggccttttttttttcttttagagtcagagaatgcagatcaatgtctgacctgtagtctaagcagcatttaatgatgtgacactaattattaacccaacctcacagatgaagaaattgaggcccataaaggctttgcccaccatcattcagagaaaggaagagcctaaatttagaattttaaaaactgcagcttcacttaaggggcacacattttaagaggatgcctcgagaatgtttacatatgtatacactggtgatcaatataaggccatttccaacacttcagaaggttccctggggtctcctcccagtcaataccttccccaagttaaacgctgttcagatttttcatgatagatgttttgcttttctgaatttgatgtaaacagagccatacagtgtgtttctttatttgtttctttatttcagcaatagggaagtgaaatgtttctttgattatctgtggactctgaatttgaagtccatgtacacccacagtagaaatggccttctttaccttttatcctacaccgccttttaaatcaataattacttaggactacttttttgggggggcagggtcttactctgttgcccaggatggagtgcagtggtatgatcatagctcactacagccttgaactcctgggatcaagcaattctttccattctttcgcctcatccttccaagtacctgggaccacaggtatatgtcattgcactggactattttattcttcttcttcttctttttttttttttttttgaaacacagtctcgctctgtcgcccaggctggagtgcagtggtgccatctcggctcactgcaagctccgcctcccaggttcacgccattctcctgcctcagcctccggagtagctgggactacaggcgcccgccaacgcgcctggctaaattttttgtatttttaatagagacagggtttcaccgtgttagccaggatggtctcgatctcctgaccccgtgatctgcccgcctcggcctcccaaagtgctgggattacaggcgggagccaccgtgcccggcctattattctaattttttgtagagacaggrgttccactatgttgcccaaactggtcttgaactcctggcctcaagtgatcctcccacctcggtctctgaggtgcggggattccagcctgaaccactgcacttgctgttttttttttattttattatttatttatttatttatttattttttgagacagagtctctgtcgcccaggctggagtgcagtggcgagatctcggctcattgcaacctctgcctcccgggttcaagcgattctcctgcctcagcctcctgaatagctgggattacaggttcccaccatcacgcctggctaatttttgtatttttagtagagacagggtttccccatgttagccagtatggtctcgaactcctgaccgcaggtgacccactcgcctcagcctcccaaagtgctgggattacaggcgtgagtcaccacgcccggccctgcacctgctcttatttcccctctccttttctttctttgagccctstccctgaaacatagctgtccatcaagtcaccaatggattctaattggccaattctaggcaaggcttgctggaaccgccccccagcccccacaggaagcaaatgatagggcacatgtatcaactggcgggccattaggaggatggcaycttctagccactccaccaatggaagagcatactcctgccctccccaactgcctctacagagcagcctcgtgcctttgcagtttgacaccttccttttatcccgagaaggtcccttggaagacacttcaggaaggcaggatggcaggacctggttcccttcatcctgcctgtgcctgctccacacctctgctccccagagtagatgggaggggaggtctttctaaacaaaaatgatatctatgtaaatatatgtagtttcaggcttgcacctgttatttcttttgttttcttttttaatggaacaacaatcgctttggctttattttgttttttcaacaaatgtcattttaaagttccaaatatcttgacaaccccctcccttcctttttccaagttctgggtgctgaggagaaacatcaacctccctttctgtcttccaacctgtccctctgaggtgaggactggggagaaggtagaggtgacttagggtgggcggcgggcggggcatgcagaagatggaaaatggtggagtttaagagtaggaggagctgggtgcagtggctcatgcctgtaatcccagcactttgggaggccgaagcgggcagatcacttgaggtcaggaattcgagaccatcctggccaacacagtaaagtcctgtctctactgaaaatacaaatattagctgggcatggtggcgggcgcctgtaatcccagctactcaggaggctgaagcaggagaattgcttgaacccgggaggtggaggttgcagtgagccaagatcacgccaccacactccagcctgggcaacaagagtaagactgcatctcaaaaaaaaaaaagaaaaaagaaaagaaaagaaaagaaaagaaattgtctaaattgagtgtttaaaacaaaaaattgggataattaggatgtcgaattgccccggatgaggaatattaaaagagtaataaggatgctaggagcttagagaagaggtttgcctggtggctttcaatggccacagatggatgggtctcttggggcttgcctcattgggggtgaagaaggctgctggggggtctgagggtgttgtgttgaggtgttctcatggccgtctttttctgccttcttggctgcaggcaggcatgaccctgctgttcgcagtgggttgcgtcttcttcccgttgtgcttcactgccctgcgctggggcttgcagaaccacaccaacctgcagatggagagacaagaggctgtcctggtagcatccaagtaagaggaccagggtgagggtgtccttcctggggccatggctggtggaactgatcttttactttcagaatgagtttgtggtgaaagcagaagcagagtgtggagtggagctggaatgtggagtcaaaagacaccagcaggctgggcgtggtggctcacgcctataattccagcactttgggaagctgaggcaggtggatcacctgaggtcagtagttcaagaccagcctggccaacatggtgaaaccctgtctgaactaaaaatacaaaaattagccaggtatggtggcaggtgcctgtaatcccagctactctggaggctgagacaggggaatcacatgaactcgggaggtggaggttgtggtgagctgagatggcgccactgcactccagcctaggtgacagagtgagactctgtctcaaaaaaaaaaaaaagaaaaagaaaaaaagacaccaacagtggggtcttttgtgagtcatttaacttctctgaacttcagatccctcactggtaaatgggcttaataataacaccccactttcctttcttcgtggagatgttgtgtgaggatcatatgaatcagcgtctgtagagcaggggttgaaaactgctgcagataatatgagggytgtgggctctgcagggatgatataggctggaggactcaccttctctgctgagggccagtgctgctcagctccagccactgataatgttatatggttagaacgtgggccaatattttcggagttatgattctttgtcattgttgttgagacaggttgagacagggtcttgctctgttgcctaggctggagtgcagtggcacgatcatggctcactgcagccttgaactcctgggctcaagcaatcctcctgccatasctgggactacaggcaatgcaccaccaagcctggctaatttttttttttttttttttttggtagagacagggtctcactatgttgcccaagctagtcttgaactcctgggctcacaggattgttccttctcagcctccgaagtgctgggattacaggcatgagccactgtacccggcctcttctttttttttgagacagagtctcactgtgtcacccaggctgaagtgcagtgacaccaccatgattcactgcagccttgacctccctgacaagtgattctccctgagaatcgggctgactcctgagtttcttggactacaggtgtgcaccaccatgcctggctaatttttgtactttcagtagaggcggggtttctccatgttgcccaggctggtcttgaactcctgggctcaagtgatcctcctgccttggcttcctgagtagctgagactacaggtgcatgtcattgtggtgggctgtctcccaattctttttatttttttgagatagaatctcactctgttgcccaggctggagttcagtggctcaatcttggctcactgcaaccttcacctcccaagttcaagcaacatttctgcctcaacctcccgagtagctggtattacaggtgtgcaccaccacgtccggctaatttttgtatttttagtagagacggggacggggtttcaccatgttggccaggctggtctcaaactcctgatctcaggtgatctgcccactttggcctcctaaagtgctaggattacaggcatgagccaccacgcccaacctcttccaattcttgaatactgataagtaactaagaatttatttaagaactactatactgacaactgcatactggccaaacaaaacatgtctgtgggccggattgggcccttgggctgcagatctatgacctgtgtgacaaagcttaccataaaagtgcagtatcagcaaaccacaggaggcgtaggaggtacacggaacacagattttactagggtgtctacgtggattccctggcagacaaaaaaagcctgtctctactcatccaaagtgaaaccacagttccatgaccagccttgtagtcctcaatcgagtagttacggtggccgcccatcacccagcctccccagcctctgtcctttttgcagttttgctcatgagtggctttggggttatgcaactatggttttttggtttttctgttttcttttaagatggagtctcgctctgtcgcccaggctggagtgcgatggcacgatctcggctcactgcaacctccgcctcccaggttcaagcaattctcctgcctcagcctctcaagtagctgggactacaggcgcatgccaccatgcccggctaattttttgtatttttagaagagacggggtttcgctgtgttagccaggatggtctcgatctcatgattcgccagccttggcctcccaaagcgctgggattacaggtgtgagacaccttgcccggctgcaaccatgggtttgaaacccagctttcatccgggcgtggtggctcccacctgtaatatcagcatgttgggaggcagaggtgggtggatcgcttgagcccaggagtttgagaccagcctggctaacgtggtgaaacttcatctctacaaaaaatacaaaaattagctgagcatggtggtgtgcgcctgtagtcccagctactggggatactgaggtataaggatcatttcagcccggggaggttgaggttgcagtgagccatgatcgcgccactgtactccagcctgggggacagaatgagaccctatctcaaaaaaaaaaaaaaaaaaaaaaccccacaaaatttctaaacctgtttcttctgtaaaacagggataccaagtaagaaccagtagaaatcacctggtactgtgcccagcatgtagtaaaaactcagggagctggatcccctttccccctcccgtgaagggctgaggacaggagctaggtccgctattgtctctacaaccgtctctaaatcagcgtgagacttcttgggtgctttcctacagattgccgctagagggcagcacaaaacagcaaatcccagtccctggcctttctttgggggaggcgaggagtgggctctggcagagaaaggcaaaccatagggttgactattgaacttggagaccaaaggagtttgcataacaggcccttgtcatgctgaagtccacaggacagttgggagcaggatgggaggccagaagtcaaagggggcagtgtctctggctcaggtcccacagctccacccgggcccagtccccaggcctcactttccttatgggccagtgaggagcttgcaccagcccaccccgcagtcctttcccactctgaaactaggctgtatgtggaagttgcagagaaaggggagctagtagcattaaggaaactgaggaaaaagtgaggggtgggaatttagagaaggccaggaggggctggcagtctgaagaacagggcctgggcatcctagggctccctgggacttcctgagaggcagctgccccgcgctctcgccaccgtttccccttcttccactccttgcccctccaacgcctgcaatgagagggctgtgccacttctgaactgggtgacctcagggagcctcaggatcgttgatggccctgtgggaaggacagacgcagtgmcctcggagctcctgcagcagacaggacatgggcagccctgcagcacagtcaggtgccccctctggccaatgtcagcttccttccccgccatcgggtgagggggcctctggctctgaggatgctgtgttgagatgtttttgctcctatcccctccttcagctcttccttctgagaaagcaccacttactccctctcccagggaacgctctcttccgctggaatggccacccaaagctcggacccggggcaggccacagagggatggcttggtgagggaggagatgccaggcatttgcaaagtgctgatgggaagcagggtcaggcccctgtgggggctcagggccccctcccagctggccaaggagccctgggcccccttcctccccaagagaagagctggcccctgtcccctgtccccagcagccccctgtgmcaccgcagctgctgttcctttaagggcctccccctccctctttctctgctccccccatctctgtcgcagccgcggctgtggctcagagctgcatggggagacgccgctgcaggtccggtttctcggtgtctggtcggtgccatcattttcctgcccctcccccgtcctccccaagctggccacttcccctccccctccccctccccaccgagggggcagggggctgggcacggagtctctatgatgatgccatgtgcggtgtctgtgccgggcggcagggactggggcggcagcgagaggaggcagtggagccaggagagcggtggtgaccgctgaccgcttgcccggctgctcctccgctccctcccgcccacctccttcctttggggctggtactcagacccacccccaccccctccccgcctcctcgggccctcccagcctctcacgtaagcctcccctccccacctgcctggtggctccctcccctcccccatccgcatcctcctcctcctgtcccctcttcctctctgtccctcaccaagccatcccctctttgcctctccccatccctcgctggcctgctcctgctccccttctcccatcctcccctcccccgtctctgcccagccagccccctcccgactccccagtttcatcggactccctggccccatcccgtccccgccctggcccctttgtgccccttcycatcgttttctccctccttcccgggcttggcgtcccttctccacccctaactccttccactcggcctccctgccccttcacggcccgcctgcctccctgcccaagtcctgagccaccatgctgaccccgatggtggccgggggggtggtgttccccggactcttcctcctctccaagaacacgctccagcggctgccccagctacgctgggaggaggccgacgcagtcattgtctcagccaggtaaaccactttctttcccctcagcccctgtctgcttcttgggcttctcagggaatggaagggacctggcacttctctggaccctcagcggtgggggactgggagctcctgtgggggtccggggctttacccccaggcttcctctctcctcactgcctgccttgctcactgttctgggagacctcatccagcccggccatctggtctactagtgttcagcccgcctctctcttcttccccgtacaccctcccaccctccaaaacagggccagcwtgcggcgaagacattcctataagacattagggactgaggccagggccagacagctaggtgtcattcagggtgagtgtttgggggccagggatggaggagtggatggtacaactctacacccctagaacagggccagagtgcagagtggaggctggtggcagtcaggagacagtgggaaagtgactggggaactcggggtcacaaagggtccagagtgaggcctgcgtcatgactggacagctaagcggggcaagaaccggcccaggctcccctcgtggggagaggtccaggccagcagttcactctcagtctcacctcaggacagacaccctgcgggcttgagaagagggagactcagtttccacaaatggggaaggaagaaggtggcaaggagtggggtggactgaggaacagcagccgagcgggccggagagccgtgaggtacctgtggtggggcacacctcaggcagcccagccttgggcgaaggcaggcaaggactggcccgagaagtggctgaacgcaaagcgcagtcgttagactagcaacgaggagaaatcaaggcacacgcctcttcccttctgcctttctagcacgcctccctctctcccccaggctggtgtcctctgtccaggccatcatggcctccactgccggctacatcgtctccacctcctgcaagcacatcattgatgaccagtaagtgctgcgagacacccccctgcccaggtgccagtggttggcgtgtacgggtaatcccggaakaccccacatcttggagggaactctgtctgtggtccccaagcccttaacttgggcctgagcaagttaactgcaataaccgcaactcaacacccagggataaatttatcctgtcctgtccttaaaggtcagaaccagggggagaaggagcggggatcagagaggatcctcaaagcgctttctagtcggcttccaggtctcccgtgttgtcgtggttccccacctcctccctgccttccaccccaggaggcagaccccatttccagccagcacccagatggggtgccccctcctcatgccaggctcacccctcagcccttcccataatccaggcatccggcatccactccatgcctgagggagaggacaagggagagatgacacgcacaaggccacacacggccaggcagtgcgggaggggatgagggtgaagaggccaaaatgtggccaggcagctgctgcagtgtctggtggttgccaaaaaggcccagaggtgtgcaggcaggaggcgsggggacggggaggagaggggccctgtccgtggtgctgacggccgccctaggtgacccacgggtggcccgttgcaagttgccttagaggtgcccacaacgccccctttgtagctttcagcaccgcttcccttctgtggcagccactgagtcccagggaacatttggacgcccctgatggggggtgccctgtttctgtttgcctcctcttttcccgaagatgagttgcctcttctgtggtgaggcagcggcccttcctggaagggcttcagcgagaggaattgagttaagtggcagctgcagaggacagttcttggcttaactctttcttcagaccccgcccagggacttggctgcttcttggcctctgcccaccccttccctcccctgctccaagctgagcctgggatccagcacttcctccccagccttcacatgcagaggtcaccgtttagcttctgtaccccctgctccccaggcccccctgtgtctgttcctgtccgtcttccctgctttaatcctcaggtaggtggggaggatccgggttaatccagggcagcagctgttcctacttctgagcacctaattgccaagagggtggggatgggatctaacacctcacatgacagcccagggcctggtggcccctcctggtctcctgcaccagcccagctgtcccatctcccatcacctctgctgggcctgcattctgggcagcttcctgccctgactcctccaggccacttgggacctctctccctgtgttcccgcttcgcgttctctacagctgcccctcccctctcatctttccctgcctctgggccgcagctccacaccactgcaccagtctcaggttcccttttccctggtaccgtccctgctggagaatgggttggctccactcacaggccgcctgcctcaggctccccatcctcagaggcctcagccccaacttctccacagcctcctccacgtgcctcatgtttggtgatggcttctggctgactctgctttcatccctccaccccttgtggggcgagcaccccaggtcctgcctctctgacctcctgcccccaccccaggccagtcttgggactacaggatttaagagaaactgccaatgtgctgactccagaagaaaaatgctgtcttgtctattcatccatttctcgtttttgtttactctccaagtacatggaactttctttgtccttggctccttttgctctgcattttccccttaacgcttggctgtccctgaaaaacaacacaaaatagacaagagattgggtgactttggggcagggcgaacagcgctgacaagacctctcacttgccaacagggtctgtctctgatgcctctcggatcttctggggatggtggggatgacagtgagggctgtggagccacaccgcccatgtcccttccttggccaggttacctagcccctctgtgactcacttcttcacctgtacagtggggatgatggccacacctaccttttacagggttttgggaggggtaaataaggsyatgcatgggaagtttggaagatcgcctgtcccaggaggcaggaatgggcgtccacccctgtgacctctctctccagcactctcgccccttcagctgttgctggtcctaacctcatggtaaggttaggacaaataaccatggcaaggtcccacctgcctgtcctgggcttattttggcactgtatctgtgccttttggtctgtgggcatcttctggtcttttcttttcccccgactatactgcagagagagaggaacatgggtgagttctgagaccacaggtttgaatcccagcaccatctcttactagctgcatgactgtgtgaccttgggcaagtttctcaccctctaccctctggatccctcatctgtacccaagactccgctcctgtccagggctgctgtgctgacccctgagatctgaccccaatcactggtgtcccctttcctccttgytcccccaccccgtctctctgcccaacagacactggctgtcctctgcctacacgcaatttgctgtgccctacttcatctacgacatctacgccatgttcctctgtcactggcacaagcaccaggtcaaagggcatggaggggacgacggagcggccagagccccgggyagcacgtgggccatagcgcgtggctacctgcacaaggagttcctcatggtgctccaccatgccgccatggtgctggtgtgcttcccactctcagtggtgagtcccggggagctgggcgggcggggtgcgggtggcctgctccttggtcctgctggtgctggcaggagcctgggaagccccgggtctgcgtactgacaaccaagcagacccagcgtattcccagggaaagctgtggacaggcagggttcactgagcaccagcccagggcaccagggtgtgggggcagcctggccctgggctggacgatgcccggctgtggctctttggatttgtggttgcacgtctctgagcctcagtttcctcacctgttacataagggacacagtctttctgcaggaccgtgagagggatgcagccaagtcatgcacctgctcctgcacccaggtgttctttctcttttttttctttccaagacggagtctctctctgtcactcaggctggagtgcagtggtgtgatctcggctcactgaaacctccgcctcctgagttcaagtgattctcccatctcagcctccccagtagctgggattacaggtgcccaccaacacgcctggctaatttttttggtatttttagtacagacggggtttcaccatgttggccaggctggtctcaaactcctgacctcgtgatccacctgcctcagcctcccaaagtgctgggattaccggcgtgagccactgcacccagccctgcacccaggtgttctgatgttcagagtcaagcatctcccaaagtgacagaggggaaagaggaagggcgggggctgcccaagaacccagggagagccccagctcctcaccttcctgcctctgtgcccaggtgtggcgacagggkaagggagacttctttctgggttgcatgttgatggcagaggtcagcacgcccttcgtctgccttggcaagatcctcatccaggtgagtgagcatgggagggtgcaggagcccaatggggaggtcacaggaaggggagggaccttcaaggttgctgccaagggctctagccccttcgtcatccccccctcaccccgtgcattttgagcacctggtgcttgtgtcctggcaaagtgtctggtttgggaggagctgcctgctagggtcgcagggaggcagggagagggccaaggggggccgagcccttctgctgccgtggccactgtgtctgtgtctcctcagtacaagcagcagcacacactgctgcacaaggtgaacggggccctgatgctgctcagcttcctctgctgccgggtgctgctctttccctacctgtactgggcctacgggcgccatgccggcctgcccctgctggccgtgcccctggccatccctgcccacgtcaacctgggcgctgcgctgctcctggcccctcagctctactggttcttcctcatctgccgtggggcctgccgcctcttctggccccgctcccggccgcccccggcctgccaggcccaggactgaggccgggggccgggaccctccccctccccacccccacccccgtggagacagggctctggggctgatggctggggttgggagccagggtcctcttgcccggacaaccccaggactgacgatgaccccgaaagggaagaggccccatctctcggggactgagggggtggagagaggggacctcttccccctactctgcccccttcctgcacacccttgcgctggaggaggggagggggcaccgcctcccacccactgagggcaggagggcttgtggggagggacaccaacagggtttcaaggggaccaggagtcagaatgtggggagacgcctctgccaaggccatcccagcccctatgctgccatcccccagggctccccatcacccgagaggagaggacgccccaactaacccccgctggccctcgggcctcccgagtggccggctgcaaccacrgctcctctccagggtaggccagcttgaggaatcttatttattttatttatytacccaaatttgaactagtctgttgggttgggggaaggaggtggctgctacccccaagccttcccagtgctgacaaccccgggggcaggcgagggcgcccagtccctcaccatcggctgcacatcgcgccctcgggccctgccatgtccctggtgctactgacctctcaaggcttcctccaatctggggtcrggggaccctgggaggtgctttacagaccgctaataaaagacgatctgcgtgaacgccaccaaggcccttgccaccaagttctttggggctgggaagggaggaggtggggggcttgggccatgggaaacagaggggacaggatccccagctgctcgctgggcagtcagggaggaggaaagcagggaacttttgctcatcaacaggagaggaggtgggtgtgggtgctcaggttgagtccagagcccttgtccggctctttaggcccctttctggaagtttctgtggggcatggagatcagaggggagaggtcacagcctgccccgctagaactggggtcttcagccgctcccaaggaaggtggtggtgggtggggttggagaaagggggcaggccttacatgtgggtgcagaactggaaaaggagaaagaagaacgccaccaccagcaagcccaccaggatgtgatggaagagcccggggctggaacctgctagacaaacaggacccttaactcccctctgatggcccaatgaagggtctggggctgctctcctccagaccctggcggggagggaggtcccttctcaagctggttcatacctgagttaatgaacacgatgggtttctctccaataaactgggccacagccagcagcctggcttggtctgagtccggataatcgaagaagtcaggtctgtctaagaagcgcggagactctgtccccagggctgacgccgtggcacgcttgggtctgggtgctaggacccaagcaaactctgtgacaacagccaagctgacccctgcctttatctctcgaggcggaagctgacttgggaccctgtgagaccacccagccttattgcagaggctgtggagggtcttgatttccctcagggtcagctgggtgcaccacgacaaggctcgcggttgttggggggtaggtgggaccagcaggatgggagagaagagtggagagaaaatgagagggtgcagggttggcttccgagtccctaagtgggcatcacactttatgctcccagagctgcctgccttcctgctgctcccaagacagcttcttaccagtttctatggcccctagtgcagccagccacacccacaccagcacccatggccacagcctcatgactcctatcatgaggtgggggctctgtgatgtcacagcccagagctgttctgatggcactttggggtgaggggagaaagtgctaggagctgggacccctcccccatccctcactctcatcagaagaggagaggagaagagaggttgggaccagtcttcaccccctggaatgtcgctgatgataaaaccataatggtggcagccccagcatttacaaagaggagggatgcggcacggccatcttgctgaaagcccgaactaaaggaagctgtgtttggacaacaggcacaatttggggtggtggcacagggccacacacctccggttaccccttggatcaaccacaggtaacatttgttttatttattttcatttttttggagacagggtctctgtctgtcacccaggtgggaatgcagtggcgccatcttggctctctacagcctctgcctcctgggttcaagtgattctcttgcctcagcctcctgagtatctgggattacagctttggataaatcccttccttttatctgtctgccaccacacccggctaatttttgtatttttagtagagacagggtttcactatgttggtcaggctggtcttgaactcctcacctcaggtgatctgttcgcctcggcctcccaaagcgcccggcctattttatgtattttcagagacagggtctcactctgtcacccaggctggagtacagtggtatgattactgcagccttgaactcctggcctcaagtgatcctcccacatcagcctcctgagtagctgggaccacaggcatgtgccaccatgcccggctaatttttgcattttttgtagaaatgagggcttgctatgttgcccaggctggtttcgaacttctggcctcaggtgatcctccagcttcggcctcccaaagtgctgggattacaggcatgagccaccatgcccagcaggtagcatttattgaacacctattactatgctggctggaccccatttatggccaagtaccttgcacaaatttgttcatttgctcttgcactgaccctcagaggcaggtactcttttttttttttttttttttttttttttttgagatggagtttcactctgtccgccaggctggagtgcagacgcacaatctcagctcactgcaacctccacctcctgggttcaagcgattctcctgcctcagcctcctggagtgggattacaggcgcgcaccatcactgttcggctgatttttgtacttttagtagagatggggtttcaccatgttggccaggctggtcttgaactcctgaactcggatgatccgcctgcctcggcctcccaaagtgttgggattacaggcgtgagccaccaagcccagcccagaggcaggtactcttgcctcccttatacacgggaggaaatcacggcacagaggggaaaagtagtgtgggcaatgcacacttcctggggggggggttcctctctgaggctcccccttgcatcctatccgcagatccaggggcacagggctctctccgtcctcccccgccccctccttagtgctcagccgggaacgaccctggggttaggaaccgagaggagtagcaggcgtctcccactaggtggcagcagcggccgcgcctgagtccacgctcccaccctaggaaaggcgcagcggggcggactcccgggcctcctcccgcctcttccacaggttgcatccgcggctgcaggaaaacggatggctgggaatggccgtcgggggttggtcagaggaagtccctcggccctttccgaggcacatctcttggccatccacgcgtccttcgcagactccgctccctgcacctccgtttcctcttctgtggccggcggctcccccgtggccaccccatctcccatctctgccacctcccaacagccatttccactcctgcggccccatcccagctaaggagagcgcccttctgattggcaggtgggcctgtctgtcacgggcatgttccatcccacccaagcccaaggacactccagggtttccttagtttcacaacgaaggtgcgtgctcagcggactctgcagacccagtgccgcgacttcccctaaagccaggcgtgtatctgcgcgtgtgaggtgctctgccgcaaccctatgcagagagcaggtgggctaggactcggggtacttgccatgaaccgcttcgagttcctaaacaagtaaaaagcccagagagagaaaaaaagggggcagcggggcgggggtggggaaggagggaaacgaatatctatgggactggctcacgtgggctgcttcccctgtgctgcgctgatggcttccctttttttgagacaggatattgctctatctgtcacccaggctggagtgcagcctcgacctcctgggctcaagcgatcctctcacctcagcctcccaagtagctgggaccacaggcgtgcaccaccacacctgcctattttttgttttgttttgttttgttttttagatggagtctctgtctgttgcccaggctggagtgcagtggcacgatcttggctcactgcaacctctgcctccttggttcaagcgattctcctgcctcagcctcccgagtagccaggatcaaaagcatatgccaccatgcctggctaatttttgtagttttttaaagtagagacggaatttcatcatgttggccagtctggtctcaaactcctgacctcaagtgatctgccctccgcggcctcctaaagtgctgggattacaggcgtgtgcgactgcgcccagcctacttctttttttctttgcagagatggagtcttgctatgttgcccaggctggtctcaaactcctgggcataagtgattctcccaccctggcctcccaaaatgctgggatgacaggtgtgagccgccatgcagatcacttctaagaaaaaggaagggatttatccaaagccacaaggcatgtgagaggcagcagaagggactcagtaatgtggtttttgggccaggcgcggtgctcacacctatgatcccagcactttgggaggccaagatgggtggatcacttgaggccaggagttcgagaccagcctgcccaacatgatgaaatctcctctctactaaaaatccaaaaaaaggctgggcgcggtggctcacacctataatcccagcactttgggaggccgaggcaagtggatcacctgaggtcaggagttcaagaccagcctgaccaatatggtgaaaccacgtctctactaaaaatacaaaaataagccgggtgcggtagcatgcgcctgtagccccagctactcgggaggctgagacaggagaactgcttgaacacaagaggcagaggttgcggtgagcctaaattgcgccactgcactccagcctgggtgacagggtgaaatttcatctcaaaaagaaaaagaaaaaaaaaaagattaactaggcatggtggtacgtgcctatagtcccagctactcaggaatctgaggcaggagaatcacttgagcccggtaggtggaggttgcagtgagccaagatcgcaccactgcactccagcctgggtgacactcgagactctgtctcaataaataaataacctggttcccgacgctgggccagggctcgtgccccaggcccacaggcaactgctccttgaggttagctgggagaagggacacagaacctatggcctttggggttgactttcttttgtttcctcaaatgcttcaaaaacattaagctatctctactagtaaaggccattttgacccaaacaatgcattatccattcacccatttattcatccatgacataaacgtgctgagctcctgctacgcactggctggactccatttatgactcagaaatcaccacggcacggtccctgacctcaagaatgacaagggagagaactcatagatgcgcatcattctagagtagacgggcaactctgggtcgtctacacctgctgtctccactccctcatctttaatggactcttcaatctcttctttttctgagatggagtctcattcagtcacccaggctggagtgcagtggcgcgatctcggctcaccgcaacctctgcctcccgggttcaaacgattctcccacttcggcctcctgagtaactgggattacaggcacccaccaccacacccagctaattttttaatttttagtagagatggggtttcaccacgttggccaagctggtctcaaactcctgacctcaggtgatctgcctgcctctgcctcccaaagtgctgggattacaggcatgagtcacctcgcccagccaattcttcaacctcttctaatctggcttagtccccaccaatccactgaagctgctttgatcaagtccacaaaagagctcataatctgccaaatcaaatggttctctctctttccattccgtctgcctcccagcaggtgcacctgtccctgactcagagcccgggaaccacactcaccagttctcaggactccttctccagccaactcagcatggggccttgtcttgctatctatattctctgcctaggtgatctcatccatactcgtggctttaaataccatctatatgccagtgactcacaaatgtatatttccagcccagacctctccttggagctccagactccgagatgtctgtttgtgatgtccaaatacatctccaaggcaatggatcacaaatggagtcctactccagacctgctctgctcccatcttttcgtctcagtggatggtcccatcattcctctagatggtctgctcaacacagaaacctaggaatcatcctgcttccttatctctcacctaatgaaccccaaattgagacctgttaggccaggttcgggggctcatgcctgtaatccgagaaatttgggaagccgaggtgggaggatcactggaggccaggagttcaaggttgaagtgagccatgatcgtgctgctacactccaagctgggtgacagagaatcccatctgtaaaagataagaataaaaagatctgttggttcaat

SEQ ID NO: 96493 - DNA, 60102 bp, Homo sapiens
gaggatcagttcagcccaagagtttgagaccagattggcaacacagcaagacctcatctctaaaaaaaaaaaaaaaaaaaagttgtttgttttaattagctgggcatggtggctcatgcctgtagttccagctaccggagaggctgaggcaggaggatcagttcagcccaagagtttgagaccggattggcaacacagcaagacctcatctctaaaaaaaaaaaaaagttgtttgttttaattagctggacatggtggctcatgcctgtagttccagctaccggagaggctgaggcaggaggatcacttgagcccaggagtttgagactgcagtgaactgtgatcgtgccactgcattccagcctgaggagtggaatgggaccccaccatctcttaaaaaagaaaaagaccaaatgtaagagcaacaagagctctcaactaagggcaattcatctggagctctggtactttgtcaaaggagtatctgactcttaaggaggaaagtcacattggaacaggtagcacaaaagcagtttagagacatacatgcattgagtcttaatgagacttatgaaggattcagataattttataccttaccttttctctctgactctccaaaaaagggattctttaaattacctccatgagattattgtgaaggaaggcatccaggttgatctaagattaatcatcagagaagaatgttgaagactattcctattgcctttctttcctccctttcccaagccttcaggctcactcactgctctgggttattaacttacctaaaggatgggcaaagaaagcaaacagagcattttttgtgagttttttttttttttttttttttttttgagacagagtctcactctgttgcccaggctgcaatgcagtggtgtgatcttggctcactgcaacttccacctcccaagttcaagtgattcttatgcctcagcctccccagtagctaggattacaggcgtgtgccaccatgcctggctaatttttgcatttttagtagagacggcatttcaccacattggccaggctggtctcgaactcctgacctcaagtgatccgcccacctcagcttcccaaagtgctgggattacaggcatgagccactgcacctggccttttttgtgagattttaacagaaaagaaaaaagctataaggaagacctcctcagagatctggccagaggaatgtcaccataagaccaaatttcagcgttgacatagagccaaaagaatgagggtaattcatcattcttgttaataattgagtcttttatatataaattacacccatgttccagatacagctttccaatctcctttacctgatttggccaaaacatgctgctttgaagttatttttcagaatgcttaagaaaatataacctgaaattatagtcttgattaggtaaatttgcttatatgttgaatactaggatggtgagcttaagaatttgttagcaactcagtattccaatttagtactgcaactttcatatgggagtggcaattgtatgaggtacctttgtagctctacatgtaaaaagcccaaatatttgcagcacttgcctttaagcatttcggcactgtgtaagtcatataaaaattatgcaaaagaaagagcaaaaaccccaactgcccatatccttaaaagaactaattttgacccagtaaatggtatcatcaacaacaatgctttttcagcaatgacaggaagggtagatacagtaaagtgaagatgaaaagaaaaagctgtctgaggatataaatgtcaccctgatgtttcaagcaaacattctagctgtcagtggaatatattccaagacataaagtttctgatcctgtttctggatcagaacaccaaactagctcaaacaggaaagtgttttggcatatgctaacagaatgtcgcttcagcactgtggacttgctgttcagtttaatggcccacctccccaccctgctgaggtcattaaagtgttctaaagccccttcagaactcgaaaatagtttctgttttctgggcaggtgataaatctcattgagctcgacagaaatttaattacactttcttcatgaaaacaccagggatacccattacctggatctctaaagctaaagccttgcagaccccctagcccctgccccggccctgaagttgaaaggttaggtaccaataacaagttctccatcatttaaatggatgggaggcctctttagtgtagtcagcttaaactggactgaaggaaaattgattttggactttggggaagctaagatcattttttaccactgcccagaaatacaccagtcagtttggctccactaacatctcatagaaaatgaaaaagaagtttttctgtttttgtttttgttttttttttatagacttcattgctccactcacaagcaagaataagatgtgtaacaagaataagatggaagtgagcgttgttgaacacctggataagaagtcaaagagagtagggtcttgagataatctcaccattctacagcttcctataatgttgagttcattaatggtttggttagaaaggggaaattaaagtgtagacttctgccaaaaaccagagggaaagctttatttggcctgctgttttcctacttacaaagctgttcattgcaatgtagggtttactgtattttctctagctgcaaatcatctccctgctgaacacaagaaaggctgatgtcaaatgaagcacaacttggaccctcatttcattatccataggtctgatgaaatgcaagccagcctagggaaatggagaaagatccagcagaccagatttcatttaccttgggcccacttcagaataaatcagaaatacagttatacctagctcttagacagagggaaatcctagaaaatcctggggttgccatggaccagaccttgcctcctagtttccctaggcctgaatccaggctattacacaccaggactactcacctggagcaaattcttatttacaaatcctttttttctgagatcaacctctggcattctctgcattgtgattacattgctcatttgatctcttgacaccttctaatttacctcacttaaaaaaaatttaacctgccattggctacatcaactccctctccccctatggagatttcacaacattcattgaaatctttggaaataactgagtttcacaaaatcagggttgaaaatcaaatatacaagttataaaggtatttggctcggggactagtcccagttctcctgaataagagtgcatggatttatcattccatggtgcaaaataagaagctttttgagtgagctcaaatggctcatacctagaacattgctagtagccaggaaaagtcctgggaactgctaacttagctatgtgatgtcccttcatttcctttgcatgtctgcatgtttttgtgtgtgatttgaatttgacttttgtgagctatttttgcatgctattatttgggtttattttataatttaaacattgttttcttcctctgcatctgtgtctttctttttgttattttgttttgttttgttttgtttttactaggcgaccccctcctgcagttccaggacgaccatcctaacccccatcattcatctccttttgtttccaacaacatgtctatccatggtatttaaaagcttttcatttgcactatatgtcgtatgtacataaaaacttttatttttcatccatgtgtataataaaaacaaagtttattctatataaaaatgaagtgtgttctgtttctttttttaaagaagacctaaatttaaaaaagaatttgtttcaactaaaacaaggtaaggtgaatatattatgtgttcctctaagaagcttaattcaaaagttcttaaagcattgtgatttaagacggtctttggtagagactaataatctaccttcaagtgaaatttctgtccaatagaagaataaaaagaaaaagaaaatttatggatgtctagaaaaaacacagaagactaaataattccaatccacctccaggaatcccatttttacttattattgcaccaaaatattttttcctattattgtttttctaaacactcttaagggagataaaatgtaagatcatagaagaaactgtagagcaaaaacacataaacctcataaattctatatggcaaatgtaagggcgaaaaaccacatcattcagaataaaagtacaaggcaaggaaatgttgccaccttgagaagaaagactcttcatgatgtcagtaaagcactagaaaaatggagtccatataagtttgaaggaatagagaactttttattcctctatcctcaaatggtaattctaacactaaaattttaatctataattttttaacaagcatcccaaagatgtatccaaataaaatgtttattatttaggtaatatagtacattccaccaaatatgtgatctgaagccttcccaaaggtttaagatttaattcagaattttattttttgaaaatttatgtggcctaaaatagaacttgaaagtagtccttctcaaatgagatcacttctgaatgtgctccccttcagcatattaagatgatagaaaactacatgacaagagagtcaaaaaaatcattcatcagttctatttacttcacatctgacctaggcaagccctggcaaaggaggtatttggaagatgtgggcaggaacccccagttgtaaaagggagagtcctcattagtaatgctgtttcttcggaccacaaatttttttaaggactgagttctccactcaaaaatgaaaaatcagtttcttggtttaaaatgttcatatggcatgttacattattttaattgtatccccggtccagtgactaccatttaaaatcagtgataactaagaaagttcaaaggctccaaaccaaggcatcaacttaagctcatgtatagcaggaaggaggtgacttgatgtaaaatagcacatagcatgcagtcttttgtcctttccttcccctccagtccaggcatttgatttttaaatcaatattcttagtggatagcattcttcatcccaatagacaaaaatgtacctagatgatttcataccacctccccaaatgaaaaccgaagttgtcaaagagaaggttttcttcaattcattttttaaaagtgtttggtacttttccactttgtcttaaacatggacttatttttatatgcagtgttacacagtttagatgtataaaacttaaattgacctgatgaatgatgagaaggaaaaactccagtcataacagaatgaaatgacaaccttactcagttttccttaacaaagaagtgtgttcccttccttacattctataggcaagaaaaaagagggcaggggaaagggatggggggcagcctggagtaaaattaaattatgctaagatttgttaatatgtatttagtaaatagtatttctatgtttcataatatacctttccccaactcttcttacctccacctccaccctgctatgtttaatagacttgaaaaattactccctttttcagagttgatcataactcaggatagtcaggaagagccaaactattatgcctttagtaaacataatattccttatatattttcattcctttatttatgcatcaaacatttcttgaattcatgataatgtcctggaccctgggaataccagagaagtaacagaataaaagtagcttacaaaatagctaaataagcaattacaatgtagtgctacaataagagaaaagtttggttgtctttccagggagaactgttctgacttcagtactgaagcagctatctgagttttagtatactgttatcaactttacccaacacatgctaatgttccagaacattgtgattttgacttctaacaaagaaaggaatactagaactcatttcagccaatcagaaactgagcttttcattctgaatggaattatatgattcaagatgtaaatcacacagatgttggtagagaaaaaggcatactggtattgaaactgtaaactggcctgtttacttcgtctcytaacaaaaaacactttggattcaggttctccacagcagtcttccactggccacagtgaggggagctaggtttccccagtctccagctagaaaaactcagaacatctaaagatctgaaagatggaaaaaagagaactaaaggtaggaaaaaaataaatgaaacttccaattctttccttatggggttaccctggtaaatgtttgtatgccttggaggccacataaacattgaggggtgtttcaacagacatcctagaagttgaaagccaaaagaaggtaaggaaataacagctgatgttcagttacaggtgaagataattttaatgggtttggggcatgataaatttcaatgctctttatcgtatagtttggaaaaaatgttgtacttgccaacatcttttataactcagcatttaagtatgatttttttaaatcctcagaaaattgataccagattctttagtgcagttccctgagattctgaagtaaaccttctcaactgtgaatgcactttaaaacaatgaatctcagtcacaggaagttaagattgctgagaaagaaaaaaaaacttgtatagacttttataattactagggtctaaatctgaataaatcacattgagcttatgacactgtatgtttcctatttaaagggatatactagctgtctctattaccatagtacaggtgctccttgacttatgatagggttacatctcaataaaccaccacaagttgaaaatattttaagtcaaaaatgcatgcaataccctgatgaacccatgataaagtaaaaaaatcctaagttggggaggacgcagagcaagatggccaaacagaagccttcactgattgttctccatgcacgaacatcaaatttaacaactatctacacaaaaaagcaccttcataagaaccaaaaatcagtgatcacaaagtgatcacagtacctggttttaacttcgtattgttgaaagaagcactgaggaagrtaagaaagacaatcttgaattgctgacaccacccctcccccatcccctggcagcagccacatagtgtggagagagaatctgtgcacttggagggagggcacagcgattgtgggactctagaattcagtgctgccaatacggggcagaacttagctgttgycaatggagggaccatttagaccacccttagccaraggagaattgcccatcccaggtttcagaaastgagttttgactacctccaccaccatgggctaaagtgctctgaggtcctaaataaacttgaaagcctgtctgggccacaacaactgcaatacccaggcaagtcctagtgctgtgytgggctctgagccagtggactggggagcrcacgatctagtaagacaccagccaggatggctaagtaagtgcttacagcacccctcccccaaccccaggcaacacagcttatggctccaaaagggactccttcctttgcttgaggagagaagagggaakagtgaaaaggactttgtcttgcaacttggataccagttcagccagagtaggatagggtactgggcaaaatcctgaggcactcattgcaggccctagctcttggatgacatttctagatataccctgggccaaaagggaactgccttgaagggaaggacccagtcttggcagatttcatcacatgctgaataaagagcctttggaccctgaaaaatcagtagcagtagccaagtactacataccgtgggcctcagctgaaactccgaaatgcactggcttcagatgtgacccagcacattcacaggtctggtggctacgaggagagaccacttctgcttgagaagaacagagggaagaataaaggggactccgtcttgagcttaggtaccagcttagccacagtgggaaagagcaccaagccagctctttgggtccctgattccagtccttggctcttggatggcatctctggacctattctaggccagagaggagcccactgccctgaaggtaagtcactttcctggcagcatccaacacatgctggcagaagagcccttgggccttaagtgaacattggcagtatcccagcagtactcctcatgggcctgtggtggtgttggacatgagaagaaactcctttgcctggggaagagcaggaaagggtgggaaggacttcagtggttcgggtgccaggtcagccacagtagaatacaaaaccaggtagatttctaaagtttccaactccaggccctgactcccagacagcgtctctggactcacccagggcccaggggaacttgattccctgaaggaaaggacacagccttgctggttttaccacctgctgattgtagcgccctagagccttgagcgaacatagatggtagccacgtaatagttacagtgggccttgggcaagacccagtgctatgctggcttcaggtctgacccagggcagtcccagtagtggtggccacaggagtgcttatatcacccctcccttagctccagtcaactcagcacaggaagagagactctgtttctttgggaaaaagtaaaggaagagaacaagagtctctgcctggtaatccagagaattattctggatattatctaggaccaccaaggtggtacctctatgagtctgcaagagccacagcgttactgggcttggggtaccccttaatgctgatatggctgcagtggccaaaaacttagatcataacacccaagtcccttcaaatacctggaaaacattccgaagaaggacaggtacaaacaagcccagaccagacactaacaagcatccacaagcacaggaccatccaggaaaacatgcccttaccaaacaaactaaataagacatcagtgaccaatactgaagagacagagatagtgacctttcagacaaggaattcaaaatagctgttttgaggaaattcaaaaaaattcaagataacacagagagggagaattcagaattctatcaaataaatttaacaaagaaattgaaataattaaaaagaatcaagcagaaattctggagttgaaaaatgccattgacatactgaaggatgcatccatcagaggctgttagcagaattgatcaagcagaagaaagaattagtgagcttgaagccaggctgtttgaaaatatatagaggggacaaaagaataattccaagttgaaccattgtatgtcagggaccatctttatatatttttgttattgtttttgatgctacaagttactattgaatctaaatactgtcaacatattaagatcagactaggtggcaggctattggatgagtcaacactataaactcctactcccatcctcggtttttaatcaaatcaagttttatcatacattatgtcacatcccaattttcagccccagttcacatcttcaatgaacctcatgaacatgagccatgggtagataataaagaaagcctaagcaagccgcagaagaccaaagagacttaaggatctgcaaggcagtaaccaagaagtcactaatgtgggttctgcctctcaaaacagctactaacaaagtattttgatgttccacataacattatcaaaaaattagcctctcaggcttttaggggttatattcccttctcttttttattttgttttttgagatggagtcttgctctgtcacccaggctggagtgcagtggcacgatcccggctcactgccacctctgcctcccgggttcgagagattctcatgcctcagcctccagagtagctgggactacaggtgcctgccaccacacccggctaatttttgtatttttagtagagatggggtttcacaatgttggccaggctggtcttaaactcctgacctcaagtgatctgcccacctcagtctcccaaagtgttgggtttacaggtgtgagccaccgtgcccggcctccttgttcttatctctgagggtacattcagaaggcaatggagagcaagttagagtcaaagagatgattccttctgcctctttttttttcttttaatgacaaaaatattctcagctacatccacaaaatctgctcaatgtcttaaagatctatttattttgcaacttaaaaagagtgtgaggcccacagtgttctcactgaccagagttcaaatgtcactcgggcccagcacaaggccacagggccagcctggagtggcaagcagtgagccaacagagcttgtaaagtagaagcagctcctcttgagccaggtttcgtgggagcctgagggacctcagcattggtaaaatcaatttgttccatcatcctaatagtattatggtcaaagaattacagagctagtctgtttaggacagaagaccttaggatcatactggatgttacttgattctcaatgacagttggttccatttggtggcagaaaaggccatttgtctttctaagccctttccttgggtacttttaccycagcattacctgatgggcataaggaggcagcaccaaatagtgttgccagacttgtggtgctgagcacatgccagccaattgggaaatggctgcttcctgactaccccacctctggggaattatctcattaatcacagtaatatacctggaggaaaatgatgttttaattttttgatgatggttattgttcgtcaagttacaccaacattgatggcatctgtgagttacgaaaggaaaaaaaagcaaaaagtataggcgtggtctaagctagcaggcccaacaagccttcagctgtttctaatctgcctctcccctgcagctgagccctcttggtggccaaaggagtatgccttatcaggcccaaccttccacagaatgttggtcaaaccctggctctcacctaagctctgatcactttgcccaaaatcaaaatttttagagcactacaatgacactgcttgctattagaagtttgcactgttctgaggaggtttgtgatattatccccaaaaggtccttgtcaaaatgcacataacccagagaactagcacattaatcccattagtgagcaataatatgctcatgaggatgtgaaaaggcctacattctgagaacacatctccttcaaggtgaagaggaagcccccaaaattcacccctccctacccacccactcacacgctcactactactatctgccttacacttactggaacttatgtcattaaccttttatcccagcctgtgtcaatcatccaagaacccctggattctaggccactctccacgctaatttccatgcagttctgtatgttcctattctgtcttcccatctctcccaaatttctgtaacccttccactgtctcctctataattcactgcccatgatcaacaaaattccctgtatcttcaacctattctctggatatgcacttcacaatcttactctaacaaaccagagtttctctgaaaggactgcctcccctgcatccttttccaaaggtggcagcttgtctcccacagccctcacactgctgagcctgaagtggggtagttatcctcattttttgttttgttttcagaccattcttctttcctcctcgctaaaacccccagctttgaacctcatggcatcagattacagcactatctatatgaccctatgtgttgcttttaactaccaatgcccaattcattctcccttatttcttgatgattttagctcctgtttcaatgtcactccctccagtgatactcctgttttaattcttggggattttcatacgcttcttggtaatccaccctcaccctgcctctcattttcttgacttcactctttcaatggtctttttttttttcttctacttgagtgctaagtagtgagatcttgcaatgatcttgctctccactctatctcagctactcatttccaaaattaaaaccttgtctttccccactctctcatctctatatcctatctttctagcctacttctattgttttaatctcttggatctccaatctattcacctttatgctgtccctcagccctctgtccttcacccttcttgaggttcactctccttacccaacttaaattgaatggtcaatcattgtcatcatgcccatgcatatatacctgtctcccttgcccttctctcratttgttaaaaccaccattctgggtaaatctaactctctacctactctggtttgcacccatgtaactgtacatggtctggaaagcacacacacaagcaaagaacaaagccaggataactggtttcactttaaattaatcaccaccatattcaagtgagcccttaatactgccaagcagttacactaagcatcccttgttcattcactctcccaatgtcctaagttgtttcacaccttttctctcactcccctatcctcaatctcagctgattccttgcctccaacttccctgagaaaattgaagcaatcagaaaagaactcccaaagactctcatcacctcatctacccatttactaatatcggtattcatctactctgtcttctcacttgttcccatagatcaaccatccctgcccttgtcgaaagccaggctttgcacttgtgcacttatgtactccagaatatttccccagcaattcttccctctctcacaccatcaactaacaactctctaccatttcatttcaatcagggtgcaaacatgctatcatttttttggtcttcactttccctttcagtttctgtcctatttcctggctcccctttgaagcaaaactataaagctgtctatacttgctgctaaatttctcttctattttctcttaaacccacaccaaacaggtttttattccagcactccaacaaaaacctgctcttttaaatgtaaaggtcaattttcagctgtcttacttgctttatcatgtttttatctgatcacatttgatcacccactctctctggagacacattcagcacttggtttgcaggacacagaattctcttgcttttcccttgcctcagtggttttgctgtcaaaatctttttgcttcttcttcgcctcaacattttactttggagttcttggtcctcttctgtctataaccatttccttggtgatctcattcagtctcacagcattaaatatcatttatattgccaacaaatcccgaatttatatctgaatttcatctctctcaaactccaaggtcatatttcctatattcccttcaacatttcaggctgaatgtcttcaagacatttcctatcccacgtgcaccaaactaaactcctaatcttcctccccaaaatctccagttaccatccctctgcccccacctcagttaacaacatatccatatttcagtttgttcaggggaaaaaccttaatttataactcttctctttctttcacactctacatctaatacatcaggtagccccactgtctttactttcaaattacatatagaacgtgactattttccgccacttcctctgccatcctctgttttgagccaccattatcccttgcttgtattactgcaaaagcctccaaatgcttcttcctgtgtctactcttgccctacagcaaccagaatgagcctttcaaaatatgtatcttctttttctccatgaccctccaatggctcctatctcagagtaaaagcctaagctagtagcttacaatgtcatacataatctagcttcccacgttacctctacgacttcgtcttctgttgctcactccacttcagccactccttgctattccccacacatgccaggtattcttctgcccaaaggttttgtagcagctctttcctctgcagctcttccctctgactgggatgctcttccccagggaatctgaattactccctcacttccttcaagtctttggtaaaatgttacctttcccatgagacctactctgacctctttatttaatgctatgccacttttttcttttttccatagcacttactaccttccatttatgtttattatctatctcctcctgctataatgtcagctctactaggtcaagaacctttgtcctttttatttacagatatattccaagcacacagaacagtatttgtcatacagtaagtactcaaaaaatatttattgacaataaattcctgaagccacacactataaaaatctgaatggtagaaggtgagtagagggaagcttatgtagatactaaatattttgttggattttgggggatactgttggatactgggggaagagaataagggataagggaacgatgaggaatttgacaaagcattaaaagcaactgcctaccattatccttcagtcctgggctccattcaggcacaagcacaggctttgtgtaagaaaagcaaagtattagcccaagttggtaacatagccttaggcaatacttaacccactctgagtctcagtctcaactgtgaaatggaaataaaacctcttacaggattgctgtgagaagtaaatacaaatatacacacacacacacacacacacacagacacacacacacatacacacacaacgtgcatagcacgttacctagcacgcattgggtgctctaaaatacaggtgctattatttatcaaaccccagtatgctatttacctcctgaatttatggagacctcagactcattaattcaggtgtagttatttcccaaaccacaattcagcaagaatttcaagactctaattgcatctcttataaaaagggaaatcaatcacttccacaagatggcactgtgtcccagccctgtttccctaaatacaacaggtttgaaattttgtataactatgtaactgatgccctctgctgacttgttttctttttcttgtccttgagcctttggcttggaggatgtaaatgatggctcaatatgcatcctctatatgcttggtatgaattattaaatccacaatgtaacccagctgcccaaagtatttctcaaaagtttactgacaccaatacaatctccacacagaacaccaggcatgttrctacagccagatgcacaagccttctagttacatgccaatcataaatcagctgcatcacgccacaaaataaagtgcacctgtcatcctattgctctacttcttcttaatccctcccataccaactttaatccttaatccttggcaccattttggaagtgtgagcaaagctgcctccccattcctctctccttgatctcacttgccacaccaccctccagccttacctgtaacttagagtgataagaagcagagctgggaggaaggggtgtagagggagaagggcagacagcttcttatgctggcaaatatttggcaggttgggatttaattccaatgctactgtaaacttttcctcctcacctttccccctttcccacacacaccacagtattctctaaaactctaaatcattcatattctacttgcaccctttcagtgtggtttaaatataagagactgactagatcactgaatttaagtgatgagtaacttcccaccacaactgtcatactactttataccaattgttttctaggcctgaatccttgtgccagcagcccacaaagaggcatgccacaggtgagcctcatcatccttctgatggcagcagttaagggctctggattgcttgacattttcttaatagaacgtttaatgaatttttaatttgcaatttttcttaaacctttttttatttatktttgagacagggtcttgctttttgcccatgctggagtgcagtgatgtgaacacaactcactgcattctcgacctcctgggctcaagatctgcctgccttaacttctcgtgcagctgggaccacaggcacgcatcaccacctccagttaattttttaaattttttgtagagacagaagtctcactttgttgcccaggctcgtctcaaactcctgggttcaagcaattttcccacctcagcctcccaaagtgctgagattgcaggtgtgagccattgcgcccagccagatacagcattttttacaaattgaagatttgtggcaaccttgtgttaagcaagtctgtcagtgccattgttccaattgcatgtgctcactttgtgttcctgtgtcacattttggtaattatgacaatattcaaactttattatcatatctgttatgctgatctgtgatcagtgatctttgatgttaccattgcaattgttttggggtaccacaaactatacccatataagagggcaaacttagtggatatgtgtgtgtgttctgactgctccactgaccagctcttccctgtctttcttcctcttcttgggcctccctatttcctgagacacaacagtatcaaaattaagccaattaataaccctgcaatggcttttaactgttcaaatgaagagttgcacatctctcattttaaatcaaaagtagaaatgattaagcttagtgaagaaggcatatcaaaagccgagacaggctgaaagccaggcctcttgtgacaaacagccaagttgtgaatgcaaataaaaagttattgaaggaaattaaaagtggtactcccatgataagaaactaaaagagccttactgttaatacagataaagttmtagtggtctgtataaaaggctaaaccagtcacaacattccctttaggccaaagcataaaccacaacaaggcgctaactcttctcaatttaacaaaggctgagagaggagaggaagctgcagaagaaaggtttgaaactaagagaggttgattcatgaggtttaaggaaaacagccatctctgtaacataaaagtgcacactaaagcagcaagtgctcatatggaagctgcaagttatccagaagatctagctaagaacattgatgcaggcttccattccaagatggccaaataggaacagctccagtctgcagctcccggcgtgatcgatgcagaagacaggtgatttctgcatttccaactgaggtatctggtttatctcactgggcctggttggacagtgagtacagtcgatggagggtgagccaaagcagggcggggcatcgcctcacctggattgctcaagaggttgggggatttccctttcctagccaagggaagccgtgacagactgcacctggaaaaacaggacactcctgccccaaacactgtgcttttcccaaggtcttagcaaccggcagacaaggagattctctctcgtgcttggcttggtgggtcccatgcccatggggccttgctcactgtagcacagcagtctgaaatcaaactgtgaggcagcagcctggctgggggaggggcgtcctccatcactgaggcttgagtaggtaaacaaagcagccgggaagctcaaactgggtggaggccactgcagctcagcaaggcctaccgcctcaatagactccacctctgtaggcaggacatagctgaacaaaagtgagcagacaacttctgcaaacttaaacgtccctgtgtgacagctctgaagagagcagtggttctcccagcacagcatttgaactctgagaatagacagactgcctcctcaattgggttcctgacccccaggtagcctaactgggagacacctcccagtaggggccgactgacacctcatacaggtgggtgcctctctgggacgaagattccagaggaaggatcaggcagcaatgtttgctgttctgcaatatttgctgttctgcagcctccgctggtgataaccaggcaaacagggtctggagtggacctccagcaaactccaacagacctgcagctgagggacccgactgttagaaggaaaactaacaaacaaaaaggaatagcattaacatcaacaaaaaggacatctacaccaaaaccctatctgtaggtcaccaacatcaaacaccaaaggtaaataaaaccacaaagatggggagaaaccagagaagaaaagctgaaaattctaaaaaccagagcgcctcttctcctccaaaggatcgcagctcctcgccagcaatggaacaaagctggacagagaatgactttaatgagttgacagaagtaggcttcagaaggtcagtaataacaaacttttctgagctaaagaagcatgttctaagcaatcgcaaggaagttaaaaaccttgaaaaaaggacagatgaatggctaactagaataaacaccatagacaagacctcaaatgacctgatggagctgaaaaccatggtacgagaactatgtgatgcatacacaagcttcaataggcgatttgatcaagtggaagaaaaggtatcagtgattgagatcaaattaatgaaataaagcaagaagacaagtttagagaaaaaagagtaaaaagaaacaaacaaagcctccaagaaatatgggactatgtgaaaagaccaaatctacgtttgattggtgtacctgaaagtgatggggagaatggaaccaagttggaaaacactcttcaggatattatccagcctagcaaggcaggccaacattcaaattcaggaaatacacagaacaccacaaagataccccttgagaagagcaaccccaagacacataactgtcagattcactaaggttgacatgaaggaaaaaatgttaagggcagccagaaagaaaggtcaggttacccacaaagggaagcacatcagactaacagtagacctctcagcagaaaccctacaagccagaagagagtgggggccaatattcaacattcttaaacaaaagaattttcaacccagaacttcatatccagccaaactaagcttcgtaagtgaaggagaaataaaatcctttacggacaaacaaatgctgagagatgttgtcaccaccaggcctgccttacaagagctgctgaaggaagcactaaacatgggaaggaacaactggtaccagccactgcgaaaatatgccaaattgtaaagactatcgatgctaggaagaaactgcatcaattaacgggcaagatatccagctaacatcacaattgcaggatcaaattaacacataacaatattaactttaaatgtaaatggtctaaatgccccaattaaaagacacagactggcaaattggataaagagtcaagacccatcagtgtgctgtattcaggagacccatctcacgtgcagagacacacataggctcaaaataaaaggatggaggaagacctaccaagcaaatggaaagcaaaaaaaagcaggggttacaatcctagtctctgataaaacagactttaaaccaacaaagatcaaaagagacaaagaaagccattacataatggtaaggggatcaattcaacaagaagagctaactatcctaaatatatatgcacccaataaaggagcacccagattcataaagcaagtccttagagacctacaaagaggcttagactccaacacaataataatgggagactttaacaccccactgtcaatattagacagattaacgagacaaaatgttaacaaggataaccaggattgaactcagctctgcaccaagcaaacctaatagacatctacaaaactctccaccccacatcaacaaaatatacattcttttcagcagcacatcgcacttattctaatattgaccacatagttggaagtaaagcactcctcagcaaatgtaaaagaacagaaatcacaacaaactgtctctcagaccacagtgcaatcaaattagaactcaggattaagaaactcacttaaagccacacaactacatggaaactgaacaacctgctcctgaatgactactgggtacataacaaaatgaaggcagaaataaagatgttctttgaaaccaatgagaacaaagacacaacataccagaatctctgggatgcatttaaagcagtgtgtagagggaaatttatagcactaaatgcccacaagaaaagcaggaaagatctaaaatcaacactctaacatcacaattaaaagaacyagagaagcaaaagcaaattcaaaagctagcagaaggcaagaaataactaagatcagagcagaactgaaggagatagagacataaaaaacccttcaaaaaatcaatgaatccaggagctggttttttgaaaagatcaacaaaattgatagaccgctagcaagactaataaagaagaaaagagaagaatcaaatagacacaataaaaaatgataaaggggatatcaccaccaatcccacagaaatacaaactaccatcagagaatactataaacacctctatgcaaatgaactagaaaatctagaagaaatggataaattcctggacacatacaccctcccacaactaaacgaggaaagagctgaatctctgactagaccaataacaggctctgaaattgaagaaataattaatagcctaccaaccaaaaaaagtccaggaccagatggattcacagccgaattctaccagaggtacaaagaggagctggtaccattccttctgaaactattccaatcaatagaaaaagaaggaatcctccctaactcattttatgaggtcagcatcatcctgataccaaagcctggcaaagacacacaaaaaagagaactttaggccaatatccctgatgaatgtcgatgcaaaaatcctcaataaaatactggcaaatggaatccagcagcccatcaaaaagcttatccaccacgatcaagttggcttcatccctgggatgcaaggctggttcaacatacgcaaatcaataaacgtaatccatcacataaacagaaccaacaaaaaaaaccacaaaattatctcaataaatgcagaaaaggtctttgacaaaattcaacagcccttcatgctaaaaactctcaattaactaggtattgatggaacgtatctcaaaataataagagctactcatgacaaacccataaccaatatcatactgaatgggcagaaactggaagcattccctttgaaaaccagcacaagacaagcatgccctctctcatcactcctattcaacatagtgttggaagttctcgccagggcaatcagccaagagaaagaaataaaggrtattcaattaggaaaagaggaagtcaaattgtccctgtttccagatgacatgattgtatatttagaaaaccccatcatctcagcccaaaatctccttaagctgataagcaacttcagcaaagtctcaagatacaaaatcaatgtgcaaaaatcacaagcattcctatacaccaataacagacagagtcaaatcatgagtgaactcccattcacaattgctacaaagagaataaaacacctaggaatccaacttacaagggatgtgaaggacctcttcaagaagaactacaaatcactgctcaacaaaataaaagaggacacaaacaaatggaagaacattccatgttcatggataggaagaatcagtatcatgaaaatggccataccgcccaaggtaatttatagattcaatgccatctccatgaagctaccaatgactttcttcacagaattggaaaaaactactttaaagttcatatggaaccaaaaaaagagcatgcattgccaagacaatcctaagtaaaaagaacaaagttggaggcatcaccctacctgacttcaaactatactacaaggctacagtaagcaaaacagcatggtactgataccaaaacagagatatagatcaatggaacagaacagaggcctcagaaataacaccacacatctacaaccatctgatctttgacaaacctgaccaaaacaagcaatggggaaaggaatcctgatttaataaatggtgctgggaaaactggctagccataggtagaaagctgaaactggatcccttccttataccttacacaaaaattaattcaagatggattaaagactcaaatgttagatctaaaaccataaaaaccctagaagaaagctaggtaataccattcaggatataggcatgggcaaggacttcatgactaaaacaccaaaagcaatggcaacaaaagccaaaatagacaaatgggatctaattaaactaaagagcttctgcatggcaaaagaaactaccatcagagtgaacaggcaacctacagaatgggagaaaatttttgcaatctacccatctgacagagggcaaatatccagaatctacaaagaacttaaacaaatttacaagaaaaaaacaaccccatcaaaaagtgggcaaaggatatgaacagacacttctcagaagaagacatctgtgctgccaacagacacatgaaaaaatgctcatcatcactggtcatcagagaaatgcaaatcaaaatcacaatgagataccatctcacaccagttagaatggcaatcattaaaaagtcaggaaacaacagatgctggagaggatgtggagaaataacacttttacactgctggtgggagtgtaaattagttcaaccattgtggaagacagtgtggcgattcctcaaggatttagagctagaaataccatttgacccagccatcccattactgggtatatacccaaaggattataaatcatgctactataaagacacatgcacacgtatgtttattgcagcactattcaaaatagcaaagacttggaaccaacccaaatgtccatcaatgacagactggattatgaaaatgtggtacatatacaccatagaatactatgcagccataaaaaaggatgagttcatgtcctttgcagggacacggataaagctggaaaccatcattctcagcaagctatcacaaggacagaaaaccgaacaccacatgttctcactcataggtgggattgaacaatgagaacactttgacacagggtggggaacatcacacactggggcctgccggggggtggggggaggggggagggatagcattaggataaatacctaatgtaaatgacgagttgatgggtacagcaaaccaacatggcaaatgtatacctatgtaacaaacctgcacattgtgcacatgtaccctagaacttaaagtataataataataataataataataataataataaacaaaacgatttatttctactagaaaaaaaaatattgacaaaggtagctacactcaacaatagatattcaatgtagataaaaaagccttctattggaaggtgccatctaggattttcatagctaaagaggagaagtcaatgtctggcttcaaaggacaggctgactctcttgttaggggctaatgtagttggtgacttgacatcgatgctcatttaccattctgaaaatcccagggcccttgaaaattacgtgaaatctactctgctcatgctctgtgagtaaaacaataaagcatggatagcagcacatctgtttacagcatgatatactgaatattttaagccgagtgttgagcctactgctcagaaaaaaaaaagattcctttcaaaatattactgttcatttaaaatttgtttccatgcctgctaacacagcatccattctgaagtccatggatcaaagagtaattttaactttgaagtctaattaagaaatacattttgtaaggctatagctgccatagatagtgattcctctgatggatctaggcattgccattaagaacatttgtaacttgtgagaggaggtcaaaatatcgacattaataggagtttggaagatgttgactccaaccctcatgaattactctgagaggttcgagacttcagcggagcaaataactgcagatgtggtggaaatagcaagagaactagaagtggtgtgtaaagatgtgactgaattgctacaatcatatgatagaactgaagagataagaaattgattactatgagtagcaagaaaagtggtttcccaaaatgaaatctacttctgatgaagatgccatgaacattgtttttgttgaaataacaatttttagaatattacatgaaattgttataaagcagtggcagggtttgagagggttgacccaattttgaaagatgttctactgtgagtaaaatgctatcaaacagcatcatgtgctacagagaaatctttcttgaaaggaagagttgatagatgcagcaaacttcattattgtcttatttcatgaaattgccacagccacctcagccttcagcacctaccacccttatgtcagcagccatcaacatcaaggcaagaccctcatcagcaaaaagattctgattcacagaaggctcagatgattgttcgcatttttagcaagaaagcatttttaaattagggtatgcatattttttagacatgagagtgcacactttatagactttattataatgtaagcataaattttatacacactggaaaaccaaaaaattcatgtgatttgttttattgtaatattagctttattgtagtggtctggaaccgaacctcagtatctccaaggtatgcctgtatatagacagatattggtgcacatatatgtgaatggtatacacactttgtgtgtgtgtacatgtctatatatacacacttatatatgatttatctatctagttttatcacatctctcttcaaaagccccttaacttgccactgactacaggatacaataatgcaaagtattcagcactctcagatttcagtccctcactacagcccatttgtcctgtgctattctccactgccaggatgcatcaggtcctgtgcactctggcacatactgttcattctagctgtaataaccttctccccacagctaccacttttctgtccaaattaagtctactgcctcacccttcatccttgcatctatcccgcaactctccgtctcccaccaccttcacaatgaatttctacaaccaccaaattgtgtaagatcagggactgagtgactccaaatactatacagtgtgacagggaaaagctgaaaatgatagtgcagccatattgtcatcccaccaagaaactattcttgaaagtttgagaaactttctggtcaccaatatgcacgtttgctacctgagttccctaaaattaacaatcacaaatgccttcaaataatacaaatgtattaatacatataaacaaaaactacaatttcatagaactctttactatcttcaaccaccaacacctagccctgttcctgatgtggactatagaataattatgaggcatgcctctattgaggcacaagcccaaaccaggagcaggcagtggacagatgctttgggcttcagaggttagtccctgaaacccttttctcctcattggccagtgtccttggatatagaaagcagtccaattgaccttacagaaaaccaccaattttttttatcacaaaacacaatattcatctgtccaaataaaactctgataaagaatgtgacatgacaagagctgaagacactagttcaaagtcatgtcccagacattcttgagaaatttatgttcaaagaaataaaaacattatattttggaatatgactcccttaacaaaatttctgatttgaaattaattcctagtgataaaaggacagtatagaaacttgccacaaatgaattaccacaggaataaccagctatcttggraggtgcctgctgcatttggcaccttgtctctgctctcttcaggttttcttacatgtcagcttaaacaacatctaatacattagtactagctattacatagtgmtgatgctaatacatagtgcttcgtatcagggattcttcaaagcactttgcatgtatcccatttaccacaattctagaggtagatacttttattcccactttacagatgaaaactgagacatagaacagttgtggcccaagatttgataatttatttccgccttagacaaactggattgctccccattacctacagtatggagcccaaattcatagccctcaaattgctactcaacctcccattctgactttttcccaatatcccctcccaaaagtccccataaccctgaatggccatcaaatattgtcccatcattgtgcccatgctaaggacagatgggcacagtagtagtcttatgttgcctgcaaatgtgtttttagacggattaatttacaagtcagatttcatattaaaaatcagatatacagttattgggatttcttttagaatcctatctggaattctaaaggtctgaagctaggcacaaactgtgaatagatgcagcacaatagcaggtgtctccattggacatctccatagttgttcacagttgccatcagtcacacaaagtatgccagtttcactcgcttccattactgacctggcttctaaaggccttcaccacaatgccctaaaaccatctcttgcctatttaagtctcccctgtcctccaagactaagcttaaatgtcaccgcctctcttatttcctaattattccagctgaaatttatctccagcttctgaattccccctagcattctgcttattgtgacacatcacactctgctttgcaattagttgtgatatgcttccctaagaacaaggtagaaactctgagtcaaggttaagtaaccaattctgtgatcttgggcaacaaaactgagcatagcaccctgtgttctaagatttgagccctagataaataaaagagcattagcacattgaaaagggtagaaagaagtgactttcacacacacacacacacacacacacacttacttcactcttcatgcccctctgtctgcctcctgtttatggaaaaatcatgagacaacttgatggatgtgttatttttttaatagaaaccacatcacttcatatgttacagcatgtaattcaagaggtccccagaaagttttttcatctacaaaataacagaaaggataagcaccctcaccacccaagcctttggttcatwttttttggttttgatctctattctcttaccacaatgacatgctgcttccagaatggaactctgtctttaagttctatactagttagraggctaatctatcagcttgctttaataatgtaatggatgtcctaatttaactgaggaacctggacaagtcttccttgatttcagcttcatcccaaggcccatgaatgttttctttaaaaagctgcaagcgaatgaggtagaatgracacagacatgagatagacatcagcagaagggcaaagagtacggctcccacagcactaatggacagtaggcctcccacggctgaaaatgcaaaaagcagtgtgacccccacatagctccrgggagtacatgcctttagtttcttctgcaacatgggccacagggcaaaaatctgaatggcaaatgtcaccatgatgaaggcatgcagggaccggggaagacgtgatgccaagcatacagaagcaaagatggccatgttcaaggatagtgtgctggatacaatggcagcattggcaccatagtcaaaaaagatgagatggcctaacagcatgaagactgacatggcatagatggtgtcagtgctgacagactctgtaagggtcttcagcactggtgaaaacccataagtgaaagtaatgaagactagggcactcttcaggtcagcccaccgggtctgcccactcttcttccgcccttcacctccatcaatgagatcaaacaaaacatacccaatcagtgaagaagccagrccagtccctaaaagccaatggggggccagaagaccctcatccatataccaccagataaccacaaaaacacaaacactgcacagctgctggatcaccacactggactcaaataccacagcccaatattggtatttccgagcatggatgtttttccggagctcttccaggaatcgccggtccacatagttatcaggaaagggctgtcgctcatacaagaccttctgccacttgacctccttggtgttagtcacaggttgagcatacattatccyttcattcaaactcaggccagtttaatcatcgccctcacagaagtccaggtggttcttgttctttatgaagttttgaaatgagacctccctggaaattccatgctgtgttgatgttctaccaacctttccttgttttcaaaggcaggggctaggcctacaatagatgaatttgtctctgaggcaggacaacacagccaagttcctagaaaaagagagactgtgaacctacgaaagttgtgaaaggtcaagagtagtactgagataaagtcaaatcaactcagtttactaaaagtctgagaaaaatgtatgtggtagtcaccttatgggacattaaaactgcatttcagatttgaaaattataattccttgaataataatagacatctgttagctatcgcttattgagtacctactatgtgctaagtgccttatgtatcttctttcacttaatcctcaccaccttgtaagttagtattagtcctgctttggtaaaaaagctgagattcaagatgcttaagtaactttgccctaaggtaacagagcagagccaggattcaaaccaaagtcttatcccaaagcctgtgtctcacattgtatctccctctaaagcagttcttaactcagtggttcacatatcccttaggtatatcacattgcatgcttatatctggatttgtgtaaatttatagggataatatccatagtttttattggttctcaaaggcatgttatttgtattttttaagttaccaatccaaagacaatagtaagctgcaccatacagaaaggtatgagctctatagtttaaccaaaatcaaagcctcaaagaaactagactcttcttccattagctgagcttagcatcctttaaagagctatcaatctactcaaaacaaggaaactcttgagaggatcgaagaagataatcattcctttttcacaatgagaaaactaagagtcagaaacaccacagccatccggcaaatttgagaaaaaaaaaattcatattgcccgactttatttcttccatgatagaccacaacaaatattgcttggcaagccagacaccgttaccccctctgcagcagggatcccagcccgggaatcttaaggccgccgccggggttggagggtctgcgacgcccaaaagggcagcgcccgcccgcagagtggggctgggaggggacggggtagggtagggtgaccccagggtgcgccttcactctyctggcaccccatttggctttttgggtgggcctcccacttccgccgccgcccctcactcagccttgggtctgcgggaggcagcagaggaaaaggagccccggaaacactgaccgttacacggaacccacctacccgagagttcctagggttgcgcagctgggggacggcggcacccagcctttttcccgcttcggggcgccggggctgcgactgtggccaagcacttccgggtccgccgcaatctccttagcgagggcacccttccccggctggaaccatcgcgacgtgactgctgccccctcctggctgctcgaaggacctccggtctcctctcctggagactggcccaaacccgaatgctctgagcctaggaaggcaaatccccagcaatcccctattgaaagatgggatgtgccatctgaaggactgggtaaggcaagagaggacaaggaaagaggctgggccagtaggtgagagataatggccgcttttgttgcgctcctttattaagtcaggccctcagctgggacktcccgtgcatccatgcgttcattccacagatactgattgaatgcctgcatgtaacaagccatgcttggggtgctcatgatacagccgtgaatgaaacacacaaaaattgctgctctcatgaaactctcttttttggtgcattgacctttacactgattatatcatctcccccctcaaagaggacaaatctaaggctcagataagttgtatttgtccaaagacaggcacctgggaagtagatgaacagagatcaatatccagttgtctatagcttcaaagcttggtttttttcctctttacctcctaaaagaagtgaggacaagattgctaattaaactgagttcatggaaatattaaaggatatataaacagaaggaagtaataaagaaacaaagggatgtagtaaaacacaggatacagtggaaataaaagtcagaaaacatgacccatttactagctcagtgactcaaggcaaatcacactacctgagctttgatttcttcatcagtaaaatggagatgacattatttgcacttggctactttataggatggttaaagagttaaatataaaaatggtttgtaaagtgttcactatatggctgctattagctgactttggccatcgtaatgatagcaatgtttaagtgtgatatattctgtaaaatgttctctatttccctctaggcttctgttccaaaatttgacaagattccttggcttagtgaggccagccttgtaaacaagccattagtgctcagccttcccagaaggtaacctctcagccaccgagggcaaaagttttacgaaacatctcacagaagatgatttcttcttaagggatggggacaattatcagagggcacatttgatccattgagaaactcaagtcaagtgctttaaaaatagaaataatccgggtttctcagaaaaaaatgatcactgagtataggcctggctagaggagatgagatctcaaaatttttccctctccaccactaccactcaacagtataagataatttttcccctagacactgtctctcaaaacacttccatcctctttctcaccccacattttctccactgctgtagtctgaaattttcacatttttaccatcaaaagtctagaacagtaagttcccatctttatagaatagtaactctgtatgtaactttgaggcaccctcctacattcctgttagtcctactccttccaaacaaactactatatgacacataaatctatttttcaaaattgcaggaattacatatctagggagcatttcaactgtctcttgaaataattgggttaccgtgttccttctccatttttgatgaaatggttcctaagtgtagtgataaaccccactctgggaaggggacatggacagaagggtaggtgtgaggtagtgttggggtgaatgagagaaaccagaaagagggcagagagaaagagaaagggcaggcatagaggccattccaaaggcacacgacagactaaaaaggaatgactccttggcattcgaaacagctcgttagaaaagccagactccccaaaaagagtttctcctcctgttgataactaccatgtaccctcctgcccatggataagtgacttcataagcaaattcccatcactgtctccacatccccactttagtaacatgtacctttgctttgtctactgtacattaaaaaaaaatctcattctcagtaaataggtagacggttttagtattttcagaacaaaattcacaagtgctttcaagtgctcgttattcagttgtgttatttttacataattttgaatataacgaaagcagttatcagaggttcaataaactcaaaggcctatttaagaaacaaaagtactaagtgatagagtgcttattaagagttgttaacactgcatggatcagcaygagtaaggacagtctagcatattttaattgagggtgggacacaaactcacaggcccatgacagtcagatgaggggcataatgagtaaagctggcyaaacaggactgcaatgaatgggaaatcacctccccgcttcagcccacccccacgccagcagtgttacctgcaggcatgtgagtccagaggccagatccactgggtcttctaacagtactagaaatctggatgttttatgtgaaattgctagtgtttgatctaatagggtaatatcccaccatcccatactacccccatgcccattagacctgccccagcagcgaagagcaaagtatccttgtgcatggctctcttgcccccagctcccttggtctctaattacacaagcctttggcagagggtggagatcagggagaagggtaggcctagaatacaactgggcatcggcagcacctgttcactttcatagccaggtcctggagggtcagagcagacagtctgttgacagccaactggaaagggagtgggcagtttttcctccagccagccaaacctaagctaggcacaaggagaaattaccttaggcaggcagtgaagctctactcatcgctattctgggaggattggggtagcaatcttaattcttgtttagaaaaatgtaatatacctacctcacaacaaaggtgaccgaacagcacctttgaggtgccctgagctctcaggaggacaagacgggaatgaaaagtcttttgaaaggatggtttaagtatcaaaagatcttaaggattaaaagctcctcatgtgggccaaagctccgggttccaagctgtttatttttggcaaagccccttactgagactttgggagaaagttctcaatgtgccttaagcattacatacccttgagcaaagagttctaatgcagaacagtctgaaaaaagataaaggaacatttagccaaatatgctcagagtaattccaagtgtgcgcaatggaaacacacctacagggttggaggaggtgaggctgggctgtaataagaagtgcctgtactgacccacttccttcaaggactctctcaggtaggcctgacaatttcaaagccacactcatcgtcagtctccaaagcccttcaagtcacactaaggtcatgtttatataagattattgtatgctgaaggagttctaaactggcctcctggtctctgctggtcagcatttgggtgacaagtccaagagagcctattcccatatcaaagacaaagaccccgagggcactcatgtcagacccaccatctctggtcttacagggcccagggaagtgtgaggagaaatgaagcaagaaatgtctcatgagcatcaaactcctttcacatgcctttgttttaaataaacaatggacaatgaaatctttcctcattagagaggaggtgtgttcccggcaaaactgccagcattctgagtttctatttcttggatgccaggggcatgaatggtgcaacacacacagtttatgattatcaggcccctgcaggccttggccccttacactgtaatgaaatgaaccacagtgccaagtgagacagagcgcaggcaggtcaccctgtaaaaggaactggtgttcttgcaacatcactgcttcaactgctaactagaaagaaaaaatgttccaaaggaaaagaatgggtgaagggagaagacattctgtgggaggaaacaggtggattgtttcagggtgcaaggacacaaactccaagaagtcagcccaggtacgaaaggggacaggtgcaggttaaacatcaaaaacttgagtgcagaccctttcaaagaggaaacctgggattcatttcgctcattacacatctactgttgtgaacaatctttatcctgccttgtttgtacagtgtctgacaatccaaaattggttagtgcaaaacaaaagggacagaaaagccaaagtgacataggagggcaaatccatcttttgggagctccccaatggcctgagtgctccagaactgsagtggaagatagctccctgtggtgtcccttgtattctctcagaaacaaccaagggcctggctcttcaaacatgggactgcggttctaacrttctcttgttttaattacttagatatcctcatacctctgcgacttttctgacttcatccaagaagaatatgaatttgccaattttgtttcaagttccagatgttttatctaaggtactaaaaaatttttgttgaaatgaaaccaacagcagttctagaatgacatagaatatgaatacatgtcccatctccttagcacagccctgtgcttggtacaccatcartgttcaataaatatttgttaaatgaaatgaatggccccacccccctcactatgtctcaagtgccttagggtcccagtccactagaactaagaatacaggcataaggttagaatcaacaaaacaggaaactaaaaattagtatggaggaatctgccccaagacttccagggaatgcctatcagcctgtgactggaaccaatctggagtctctactgcctcccccaaaggattgcttatgtctcccacctacaactccctacacctgtggaattttacattaaaaactcctcatttcccctccaccatgaccggctgccaggtgaccctcggtgtcactgtggagcaagcacacaggctacagtgcttgggtagtcagaacctccctgaggtggagaaagagagaaaatatatggtgagataagcaattttttcacctgaaaaattgcacattcctcacagggctgtcataggcagtgcctgaagcagygtcctaaggcactcgacacggtgccccacccagagcaagagctcagtgaatgtgagccacaattattaggagccctggtgtcagtcaatatatgtttacggaggcctttgtatttgctttaatacatcagagatgagtgagtcagccgcagctacacagatgagtgagcagacaggacagggacacaactgagaatgcgtctcagaaacagggcacagcacttgtgagagaaggtgggagcaaaggttacccccaggttgggcaagcagagtggaagtgagggaatgattcaagaggaagtggcatctgcactggacctagaagatactgttttcaagtggagggaagagccaggggtggaggaagaactggaaagagaagagaagattatcagcaaagaggtggagactgagtgtgcaggaggaaatgcctgaagaatatcaaggaattctgagcatacatgaaagggaaacaaggacgcggctgggcccagctaatgcacacagggcccaacagacaagagcagagaggacacattgaaggttttcaacaccggagtttcagggtccaagctttgcttaagagtcatctcttagtccccctaacaccctggacaggcaagtaggtaacatggccaccatgacgtgcactgggtagaggtgggggatgagcggggaggcaggactggcttagcaattgctgcagaaccagcaagaagccttccagtcatcaagtcgctgtgaacttcctatttagacaggtctcacctgccgctgaatgcctcctcatctcaggtttgttctgggtctctgtactgtggcaacctaggcactaggacaccaggccccagcctggctggagtggagaatggggaaggaaagccaatgctaacgaccagtaggagtgagaggccattctccagcagggtatagcggtttttgtggctgcaatattcatagttagccactagatgacagttaagagcaacagcttccagctgcgcagcccaaagggctcctgggaggccagtttcccggctgacccgtgagaagtcccaaataggttgctcttattgggagagaacacaggcccctcagcctcaccctcactctcatcctgttaggggctgaccctccactgatttgcacatgagaaagagtcacccctgcagattgaaacacaagtagggaacccgggatccttgctctgttggggcaccaggccagtacctccagtcatattctttcccgtcacacagacrtcctcaaatttgaatctggctcccagagtctactgcgtgtatgaaggcctgcacgtatgtgccatgaggtaaacgtggattcagcyggcagctgctcccttctggaaagaaactgttgtgtktcaagggagtagaatgtactgtggacaggatctcttccttcattctctaaatcagggacctgacaagaagctgctggcaatccggaggccaactggagaccccggaccctgtgcagaggtgcaaagctcctgccacctggctgcgttcctcttcaccgtcacaggtcaaagggcagaactttaaacacccacttactcctcccctgccccggagcagccccgtgcctgaggcaggtgcacgtgtgcctggagcagtatttcctagtgactagacaaaggggagacaggctcagagacacaataacaggragagggagacagaaagcaagatagaaacacacacacagagatgagggacaaaaaacacaagacaaaaggagaggcaggtctgtcaaagaagaaagatttttagtgaagacaaatgaagcctaaacatttcctcgtttaaacatctactgtggagaagcttcttcattttctcctgccatttgcaggcatccactcacgactcctcaagatgctgagaaacagaaaggtgcatcatgatagttggctaactgggccaaaaggtgactgactcagtgatccaaggcaaaggaacagcaggtgtgtgggggtgacccggaaaactgcagctggagactctgaaatctctttgcccacttgctggtactgggtgtaaattaactagagctcctcagttactaatagattataaaatgccactccaccctctcaattcctgcccccactctctctctactcactttgatctgggtttgttcttccagtctaatgagtcagagtgaagataagaacactatttattttgcttttagcagacctgtggcaaaaagccctggctaaaaagactgtgcagtagcagaggcatagctggggaagatgtataggatgtttactttctattttctcaccactaagaactctctttttattatttctctcacattgactaaattttcaaagctcataactaccaaggaaactacctcatatactcctaagtcattttcatatttatattgcttatgttgatctagtgcatataattacaaatacaatttttaaagagaatattaaatgctattgacctaaaatagtgatggtaataaaaatcaaatttaataagtctgaatgtagggatatggatattattttktatacattttgggtttttttaagtatattcagctttatttttttaaatggctgatattttcagatagaaggaacatgtgtaatatcataaggttttttttgaatattgaaattgttctttgagcactacttttgggattctatgtggtagaaataattctgcctttatatggattctttttttttttttttttttttttgagacggaatctcactctgttgccccaggctggagtgcaatggcacgatcttggctcactgcaacctccgcctcccaggttcaagtgattctcctgcctcagcctcctgagtagctgggattacaggcgcatgccaccacgcctggctaatttttgtatttttagtagagagggggtttcaccatgttggtcaggctggtctcgaactcctgacctcatgatccgcctgccttggcctcctaaagtgctgggattacaagtatgagccaccatgcctggcctttatatggattctaagagtttactcttcccctgaggaaacataatcctttttatccaaaaactttctagccgactgaagttcaatagatgtggtattggacaaatctcttaacctttctgggtcacagctttctcctgggtaaattgaaagatttgaaccaagtgtcctatcaggtctctctcagttaagttacaagtgggaaggagaaaagaaacagaggtgttgaaggaaaggacagaggcaaatgtgtcagtactcctcacagggtgcttgtgaagcctgttttaatcacaagctggtgcttacatttttgttttttatgtgaacaggtgtgtaagagagagaaagaaagggagcgaaagagagaaagaaaggagagtagagggagagggagatggagagaaatatatttctctgtttctttaccaaggrttcaagaaggccatggccttgggccatgagtcagcccttagacaccgcagcagatattgtcctagggtatgaggatgtttccaattgtcaaatgtgtttttggcttctggggactggctgaaatctgcatcataccttggccaggctacacataggttgctgtcactctcctgtcacaactgccatctgctatccagaggacagctgcttgggaaatgagggccccattaacattccagtgcctctggctctagacctgataaaaccagagcattgtactgtgaatgtggacaattccctctccattcctgttattgctgctgagctggtcgtaaggaaaccgagtgagaagggaatgcaacagaagaaaaagaccaaagacctgggtttcagggctgggaaagaaagcaagacagaatggaggaaatgaggcctgcaggacatggcgtctcaaatgtttgcgtygcctttaaagtagcctgtcacagctgccttccacgactcttcaatgccctcatcccttctccagatagaaatggagcagctcttcttggaggccaggcttcagctgatagcaagtctgaggtagagtacagcacagatcaaagattgctttttacctttaaatgtaaagtgtaaagggacaggattagagcatccgcctctgtctttttgaacacaaagaccattatcggtaggggaagggagacttggagagtttatatgattgacaaaagtcacccaagttgtttgtgagccaggactggaacagagctttttgggcgtctagccagtgttcttccccagtgcattacatagaatgaatttgttgtactacaacactaatgttctgtaacgtttccctgaagaccgtgttacaatagtgatcttcatttatatatgtrtttttcgttttatatatttaggttgattgtgtctatatttagacctcataatttaaattgcttacaatgactcattcatttgcccaatgtttgttgaatacttgctgtgtgccaggttctatcataggttctaggaatacaaagatgtgtaaaacatgattcttgctcttaaatataataactctcagcccggtggaggaaataaacacatttaaaatcaagaatagtgcaaatacaaagaaagctagaccaagtttatgatgcaatcaaagaggcaggcacccaactgaggttaggagggtgagaaatggtagcagcccaggagaaaggttttctgaggatgtaacacctacactatgtcttaaatgagtagctatcaaggccaggtgggacaatatataagcatttcatccctcagattctaagagatgacagtcattatgttatgggactctgtactcacatttacagttgtcattaacctagcaagatcttgcaatgcactttggggatcttgcaaataatatctgttgcttgatttgcaatgagctctgagattccacttcctatagggtctaatagtagtcttagcagaaaccagaagtctggaaaaaggtgaaggaaataatttcagtgaagaacttatatctctactaaaaacaaacctgcccaagaattcttccatatctgcctccccttgtccaggtcttcctcatcccttcagactgagtacaaattccacttctaggaagcctttcctgatttctccaatcagaagtggtctctctgttttctgaaggcacagaggtattagtgcctcttgtatgatatctagtgtgtcctaccttaattgcagtttcagaaatgtacctcactctcatacctcaaagatgtgagggatggagggaggagctggagcttcaggggatatcacccccasgggtatcaggaagacatggtagaaagttgaatcagcccaaagcagaggartcaatatccacagacatttcctctctagtctctcttctcactccattcaacctcccaccagacaacctgtccatcccaacctacattcacttacccgaagctgatttgctagattattcttccaggttgttgtatagtgtttcctgggcttgcaacaccctcaccatccttgttcactccacaaacacctacccaagcattgcctgtttttttttacccttctcagacccttccctctctgccccacccccagttaagctcaatgacccctttcagcttcactggagcctcgatatatttctgttgtagcaccttcaacaccatcatacttcttgatgtataggctactggatggtgagcagcttgaggtcacaaactatgtcttatttatttaaatgtctccagtacctaatgaatgggtaaatgaatgaatttgtattcttcttttgtcttccttagaaacttccttccagaaactttgctttattcrtcggtatgacccccgtcacagcaccctttacttggtagcctcacaatagatgtttactgttgaatgaatgaatctagttattcacacacatactttgacataccaacccacaacattgtaatactgagttgattctttttagaatgccctataaaaatgaagtgtattttaaatgtttctcaaaagaatccaactttgttaacagtttttagccctcaaaccccccatgatgcatcacctaagtgccatatgtctctcacaggatgaagctacttgcagaacaatctggcaaaggtcatcctaggagcacacctcaggaactcctcactttctgttcctcctctttctgttccccacacttcccagggcaacaggaatgggtcaaggcacaccatgtagtgatgggccagcaagcggatcaaaggaaagagaagacttcagtcaatagtcttctcactgtggctttcctcttccccatattctgcactttctgtgaccatatctcatgactgatgtcaatgtgaatgaggaaggttaagagagaatcccaaacataagtttagcctcaagttcctatatgcttcctaagcaaacttttatcagagatgcaaatgagaamctcctgaacccaggtgtaaatgctccaaagtcctctctttaatgcttttgcagaaatgaagtcagaataaaaaccagtggttacagtgagcagacacggtgcccctccccttcctccactgattgcttcttcacctactgagacagcctctctttcccagaggattgaggggactcaggactcacacacaagcttgagttctgcttgtggcttcaatcattctgcttaggaggtacagaagggccaaatggtgctggaccatggatgcatgagagctgtttctggcccagagttaaggcatgagaaaggaaggcgatgcttaggaaaggcccgtgaaaaaaagatttgcagaagagaagtcttctcttcattctttcttaggccatcagagatcctcagtctatatggtggagcctttttatgaaatggaaaaaatggcccacctataggagaatgcaacccctcagacacaggtgctcaggctggaaagtagagaccccactgaatttcaggccccagccatctctgccagctgtctttacatgtataccactgcatgcagcagcctcaagaccaccacctagcctatgtctcactccctcctgcctaaactctcggtacctaccagctgcagcacactccagattcaacacccaccctggatggggctgagaccagagtgcccatctctgttttacggaaggaaaaactgttacctctctcacccctccactgctttcctacatctttgctgccctacatgccccaccatttyctcacstctctctgtctctctttcccctcaggccaggaggaaccagtgtgactccatgctgctcagaaaccaacagctgtgctccacatgtcaagaaatgaaaatggtaggcaaggrggaagacagaaatgggcacaggcatctcagggtgcagcactgcccttcccagccaagccctgtggggagagatagtgacggggcccgttgcaaggagggcctagataaaggctgccaaggaggaactgttggtcctrggagcagcatcgactgacagaacatgataaaccttctccgtttcaacaagctaaagggtaaccaggatagatgggccagagtagagatgcaatgagacacttcgccttgggctcctaagtaactacagcctctcagaggcttaggggattatggagctccttctccctccttaatgtagcccccacacaacacataggctcacactcatttctccaccgttacaatcaggagacaaacagcttcatctttgggtttactgttaatttaggtagcacctcaagagaaagactggggagagagtctacagtactttctaggtagtcaggggcggtgtcacctgctttgggtatttgtaacatatagtggagaatggtggtaggggaggaatattaggaaaagaaagaaggaaagcaagggagatgtggagggaacaaagacaaacttctgccatgccatctatcacagttgctgaatcagaggcctgattcaggaaggatgctagactaggctggagttaggccttcggtaatttaagaattagagttagcgctgggatggttgttagcgtcagggtaaggaagaggctttggttaagggttaatttagcaacatggttaggtttgaggtacgagctggagaagggtttcttcaactctgatatcctataattctcctttgacttggggaggaaggtggggctaaatgtgtaggctaaacgtgctttaaaagaatggaagaaaaatagaagatataagaaaagctccttcactgagttcatggcaagtcttaggyccagtcggatgtgaaagagagtggcacttttgtgaaatttttatgtgggatttacaaatttaactgaagctaccggcaaagctgcaccttgatgttgccatctatgttcattttctacataattagggtcactgtgttaaatattagcattggctggagtctgggaaactaggattgggatttctcctggtcttattcctggaatcccttgtgtccacatttagaatgcaccaaccccaggcctaagctggccttggccagctggcacacttgggacatcagcagccgtcctctttctcaagacctcttctctgacctttgcccttgtccaggaatgatagaagtggagccacatgctgcaattttaccatttattgaagcttctaaaaggaagggcttcaaacacaaaagtgcccagggacccttcggtactgctgtcagaacctggtgataaactacagaaagttagaaaataaacatgaaatatccttgcctcactctatgcagtaatacctcaaagtcctcccaaggggagggactgcaggtctgctgtagtcactgtgataccccttctttctcagcagtgagttgaatagaaatactggggaatatataaaaagactcctaggaatagaagggaacttcctcaacctaataaagagcagcttgaaaaactaacagctaacaccctacttaatggtaaaagactggatactttcccctaagattagaaacagggcaacaatgtctgctcctgacacttctactcaacattttactrtacattctagccagaaagataagaaaaagaaataaaatccatccacattagaaagaaagaagtacaactagtctatttgcagatgatatgctcttatatagcgaaagtcctaaggaatgcacagaaaactattagagctaataaatgagtacagcagtgttgaggatacaagatcagtatataaaccttaatttctattaatagcagtgaacaacccaaaaatgaagaaaacaatgccatttgtaatagcatcaaaaattatttaggaataaatttaacacgagaagcacaagagctatacaatgaaaagtataaaacattgtggaaagaaaatttaaaaggcctaaataaatggaaagaaccccatgtttatagattggaacacttaatattgtaaagatgaatatactccgccaaactgatctacatatttaatgtaatcctcaaaatcccagatgccatttttatagaaatttgcaatcatatcttaaaatttatattaaaatgcaagagatccaggatagccaaacaatctttaaaaagaagaacgaagttggaggtctcatacttcttgattttaaaactaactacaaagctatggtcaggactgtgtggtactgccataaagatagacaaatagataaatggaataaaattgaaagttcagaagtaaattcttatgtttataaacaattgatttttgacaaaggcaccaagacagttcaatgaggaaagaatagtattttcaataagtggtacgggggcagctgcatagatacatgcaaaagaatgaatttgtacctcttcctcacaccatgtacaaaaataactcaaaataggtcaaagagctaaatgtaagacctaaaaccataaaactcttagaagaaaacataggtataaagcttcatgaccttggataaggcaatggtttctaagataggacacccaaagcacaaacaacaaaaggatatagataaatcagtcttcataaaaattttaaacttttgttccacaaagaacaccatcaagaacacgaaaagacaacccaaatatttgcaaatcaacagatgaaggattatgtcagataagggactagtatctggaatatataaggaacacttaaaactcaacaataaaaaggcaaacactctagttgaaaagtgagcaaaaagtttcaatagacattctctaaagaagatctacaaatgaccaataaacacatgaaaagatactcaacattatttgttgtaaagcaaatgcaaatcaaaaccacaatgagatacactttccatccactaggatggttgtaataataataataataaaacggtggataataacaagtgttggccaggatgtggagaaattagaagcctcaaaaattgctgatgggaatgtaaaacagtacagttgctttggaaaacagtttgggaattcctcaaaaccttagacacagagttaccatatgacccagcaattccattcctagatatgtacccaagagaactaaaaacatattcacacacaaaattctacaagaatgcacatagcagccatatcttaatagctgaaaagtggaaataacccaaatgcctagggcttgattaatggataaacaaaacgttgtctatctatataatagaatattaatcataaaaaagaatgaaatactaaaacatgctataacatggatgaaccttgaaaacattttgctaagtaaaagaaaccagatgcaaaagatcacatattatactggttccatttatatgaaatgtccaaaataggaaaattcagagacagaaaatagacagtggttgtcaaagattggggagaggagtgagtgagaagcaattgctaataggtatgtggtttctttttggggtcatgaactgtcctaggaataaacaatggtggttgttttacaactttctgaatatactaaaaactactaaattgcacattaagatggtgacttatgatacatgatatcataaacaccgataaaaagaaattagcactaaataaaagcacaaaatagatgaatctcaaaaaaatgtaaataggacctggttatgtaactactcatattcctatgtaaccttgggctagaagctcaatcattcagtgcagaagaaatacctgctgacagttatggttgtgaatcaccagtgatatttgccttggttttatctaggctgtgtttcatcatgtctctgctccaaacagctcatcttccccttaatgcacctattctgtagtccttctgttatctgcattactctctaattaacaccttcaagccccttaaaagtaggaccatcaagctagacaactgtaaacagatattctctaacatatattaaaaaatagtttcaaaataaattaagtttatttcaacaaatattgattgattgtctgccatgggccaggtacttaggtaaactacaaagaaaaaaaaagaaatacataagacctgtctttaaggagtcaacaaataaataaataatgacaacagaatgtaatcaatataaacagaaatagatctgatggggagtgaaggggcagtgaaagtaaatatcaaggaagtcttccttgaagaaaaagactattcagggttttcaagaatgaataggagtctcccacagtacactttttctcaaaaacaaaaatcctgtctttggcaggcagctttgttctgatgcagcccctktagcacagttcattcatacaatagcgctagctggatttaggggatttagaacagcaatcatgctattcaggaggagttacagtttcctgcatcttcccttggagcagagtcaactttagataaatttttgaataaagcagtctgtctctggcacattctcagccacttttatgtttagaaatctctcctcaggttcttactaaagccttggctgcccccactatgcccagaggctctttgttaccagatcagctccttcctctccctctcccatcctttcttcagctaatgagttaggagaacaagctgagtaaacatagtacattcttggcatttgtatagcctttgcattcagtttttttgctattttcaagcacctctaaaggtccttaatacattgtaatttgtaactttgttatgtcataaacttaaatcatgagtcacttggtacaagtcacttagtgagtagagtagttgaacacctgcacccacatctttgtaattgtcattttattattatagctacaataattttcgagaaataacggaaaaatgcttcctagtgaaaacattcttaaaagaaaaccaacatctagtgctaggaacaaatttggaaaagttcaagaaagtgatgtttcttaaccgaaaatactgtaactgtacattgattttaggcctatatgaaagacacctttaaaatttccagtgtgcttcaaggtgggttcattcattcactaatttgatcaaaaatatttcttaaacagacatcgtgttagcagctggaaatacaaaaatagagacaaggtctatgccctcatgaagctgaaagtctattagggaacccagacattacacaagtaaatacaatataaaggttatgagtattttgatccaggaggccctaagaacatagagcggaggactaccgaacagtagtcccggagtcagcagtctctgtgataaartgacagttaacctgagacttgaagaacatgtgtgtrttgggggtgggggcatctaaaccaaccaattttaaagatttactaaatctgtgtatctaatttcaactgatatccagggaaaaacaatgactctgacttgagggaagggtgaaaccctctggtcattcacatcacaaaaggatgtatraaggactttgacatcaaatacaacacaaattcactaaagtggtacattatttatttaaatcaaaatgcagttacaggcaacgttctaaatgagactttcttcttgaggtacaaccaagaacaatgaaaatcccagatgatccaaaagcatcctttgagaattgtatgagttataggtaagtcaacaatttaaatcaggacatgacttaattcttgttatgtctgrggacacaggagagtggattgagaagcctagtaagaggaatgtttaaggaatgcttagggaacaggcttcttgactggttttatttttaggttaaaccaaattattagatcaaaaaagaaagttcacctttttgcttgaacaactactgaaactattgtagaaagtataatcttcctttccaccttcacaagaacaatataagaaacagaataggaaatttctttgataattcagatggaactaaatacaaattctccatgtagatgacatatctaatctgcaagatatgggggattacacataatctttccttagtccaagatgttctctgctacgttttagtaactaaaattcctctttatcagtttgtttggttgttatttaaagctttttttaaatcaagatcgagtataacagatataaaatccaattggaattatgattagtttttttgtgygttttgttttgtttggtttggtttggttttttctttttgagatggagtctctctctgttgcccaggctgcagtgcagtggcgcaatcttggctyactgcaacctccacctcccaggttcaagcaattctcttgcctcaacttcccaaatagctgcgattacagatgtccaccaccatgcctggctaattttttttttcttcttagtggaaatgtgatttcaccatgttggccaggctggtctcaaactccccacctctggtgatctgcccgcctcggcctcccaaattgctgtgattacaggtgtgagccaccaagccccgcctagtttttcaaagagtttttttcttctatatttaactactaggcagggaagaaggactctgtttttactttattacaacatgcaaaacatggactcattctaaacaggacatcaacacaggtcaacttgcattgcaatagatggttggaaagtagacatacactcacctttacatatgactaaccaaaaaagctatatgtaatctaatgcccattttaattttttcctcatacagtcagcaataatgtggaaaaataaataggtttttctgtaaccttatgttgcacaatggtacatgtcctgattccttttatgaccttagggccatttgttccagactcaaatatagacccagatacactgaaaacatgcacccagttcctggccaaggtagacaaagttatggaggaagtggctatttgagcagtacaagctccatcactaataacatttacctgtactgactctacatttttaaagagctcttatatgataaaagtaattctagtaaatattcattatgaactttaaatggaaaactgaagcatctaaaatcagagatttctgagcaaaatttcacccttctgtgaaataacctttcgaaatttgttgccccattttacttatcttgcaagttttgtactttatttaaatacaaaattccagaacattaattagttgtattttaaacaaatagctcttatccctttaaaagtaagaccaaggattaaaccagttctaaaatcatgtcaacatcaaccagacgtatcatgagattgattgttgtattctgtttttcagtgttatggaggaaaacataccacttctgtgtgagacttagctagagtgactataaagcaagggcctggttctacctctaacttttccaaatttgtttctagcactagatattggtttctgttttcatactttttaagtatcactgcatatataggcaaatggaattatcttcactgaaattgtggttttttaaaaagtgactttaattatagccattgcaggaattaaaatataatacttattgaatgaaaagaatgaaggaaaaaaggaagagagggagaaaagatgcaggatagatacatatttgttgaattgtagaatagacagagcttaaactattcagtcctgaacataccatctgcctgtttgcacaaaatggataatagaaggggttttgctttctctttttctcaatctcagtgacaattgattaaagcaaactggcttaactcactatatttttggtagcaaagcaaaaataatctcggaagatctttgtggaagcagaaaccatgaaatgaatgtagagccttagatggcccatcaaagtttacaaatatgtcagtctttagaaattaagcaatttaaactaatgtagaagaggttttggcttatatgcattttcctcaagggtcacctccacagccttggccaccaggagaaataggatgtggtcagggcattttctgtgaaatgggaaggttctaaccaaaatgttttctcagctttactctttaaaggtagattattgatctggaagagttctgtttttttttttttctggaaattgaagaactctttcctttattcctcctattttcagaccacatatgttctgacagtggaataaaacattcaaaatgaaggttttatcaaaaatccatgaaaacaacactaatcaaaaagagattgagaattagtagtctttggatcaatcatcttacattgctagaaagtggccttatcatcaggttaaccggtagtagattcaagagattacgtgtgtttaaaaatgtataaagaggccagtgcggtggctcacacttgtaatcccagcactttgggaggctgaggcgggcagatcacctgcagtcaggagttttagaccagcctggccaacatggtgaaaccccatctctactgaaaatactaaaattagccaggtgtggtggtgtgtgcctgtaatcccaactactcaggaggctgaggcaggagaaccacttgaacctgggaggcagaggttgcactgagccgagatcgcaccactgcactccagcctgggcaacaagcacaaaaactccatctcaataataataataaataataataaataaataaaaataaaaatgtataaagrcacatttctttctaccaagccctagccaattgactaatgtgttttcttgtttcttccaatcagaatgagtcttcatcaacccaaattccagactacacctgagcctttccatgatgacatcccaacaggtttgctttcttttagagtacttatagtgtgaaacacactagaaaaaaatgccatagaatgacagtctaatccctaaaataatttctaaatttcctgagcaaatcctcactttctatccctttctctttcacgtattgtcttttgacctgctggaattggttcacagcccttctttcactccagcaccacctgtgccctcctcaggcctcacttgcccttatacatgtcatgttccttcccaggatctgtccacaacatatggctgaagactttccatggagatggggtacaaacaaaataaaagttcycctattggcagtcctgatggtatcaatcaaaatgggaagggaactgcatctctataccctcagagcggcctcaccaaggccctgaacctttcactccaccagctccctaaaatacctgccttctcccagcagctgcctgtgctattcttatcttcacttgctgttgatagaaacaaggaaagcagctctatttcaggcttcagcattgacctaagtctcagctttagttaaggcaacactgggctggtgaagatggagtgagccattatttggggtaatataattcaagggcttactgcagcacaggctgtcactttagtgactttgtccattttctcatttgctcccatattgactgaagccacttgaatttttctctcatttgatacatacagtaaagaaaatcaggataactttcctcactctatacatatggaaaaatcttttatcttaagaggttgcaggggaactagagccagaactgaaaagatttctagaaaggaaatttgaggattgaagggatgtcttgaggggatgccaaaagggaggaccagaactcaggttacagctgaggtttggggatatccactcgagtggagtgaaagtcttccagtcctaatgaatcgcttcttatgtatmccaaaatattggcctagttcatggctctcatttagccaaagtggaaccaagagcctggagctaagagtacctacccaacgaaagctacccaatctgctgttccctggtctatgatcacctcattcttttgaagccaagagaacatgggtgataggcatgtgcagttgatttcatagttatctgtgccagccacacactcattctgagtttcctttggacctggacttttttcagacctgcattgcaaaggaatgaatcacatacacacacacacacacacacacacacaatcacacacaatcattgtgtgcctttccctcagcaagaatatattttttggtcctagagaacaatgtaacaagatgcctttcatcaatgtattatctctgggagtatacttcaattagcaatttaagagctagattttgtgtgcacaggaacagcatgttatgttcttggatggccctgattcttgtccatagagttcatcctagaacagtaatcttagaggtgggactacagggrgaatagttgtaaaactggctaggagctgaagcttggtagatctactgtttattatagccatggcccttctgagctgactctgctcttgtatgtgctcttagaggtcatgaaaacggcactaggctagaagcgatgagacctcggtaggaatcctagtcttgctatataggcttggcctctgtgttcccacctgtaaaaccagagtagcatgttgtcccactgaaagctagaccttcagcacaagtggtcttcacctttgactgacccaggaaaactgctgacactgccccatccccactggattatagagcttagacatgtccatactgtggtacttgctgcttattgctgaagccaccttccacctgtgctgtgttccctgtggattgctacaaatgccaagtgactgactcatcccagtgaacaacattactgccaatgactgtctaactcaactgttggtcacaatgattgctagcatttttttctggattctgcttatccttacatattatcaataattcttaatgacaactaaggaaatagaaagaacttatctttacaagtgatgcagattccttcatgaatctttgacttgatcccagaatcccatgacacccacggactcttaatctcaataaacattagtacagatgctaaccacctcataggggcctaccacctggcatagtggtatgatatggcacaaagagcactgggttaggattaagaatgtctgggttctggttcttagtccattagtgtctgtgaccttggactgctgttccctcttaattacagtgatgagactgaactggatccaaggtttgtgatcctgtaacatctctagctctcattcagttggactttgttctctggagcttgttccagagaattcagagttccaattctcttagtcactcagcgattcccaatgggaagatgttatttcatgcactggtttacccccattcaagttatatgtcttctggaaaaattgaatattaaccaacttttaataaatcattttgaagaagagatagggtaaggattttaaataaccctaaaataaattatttcacaaaatacagatttcttttgaaacaaaagtactttctgtccctactgtagcctttttataagatcatgtttattccttatttttatttttttaaagaacagaactatatatgtgtccctgaaaagtctcctgagaattgaatcctcttttctctttcactcatattacaacaccagacatgttttatcttcatttttaatttaattggtaatgacgtctaatacttgagttttgtttctgggtactccttttggcctcattgacaagatttgtaaaagtttaaatgttgtgaggggaaaaggcaatttcattaaaagaaattcttaggtgagttttttgttccattttcttaagaaaaaataaaaggtggatttgaaaatcaaattattaggtgaattttaaatctgttttataaggttgaagaagtctttgttggcctgtggttattttgagcttctttaagaatagaatctaagtagtccttatccttctttccttcttgtactgtcatccagaaarcattcactacagactgcccattctgggccccaggacagctgtcttccacggattactgacagaggcctacaaaactctaaaagagagacaacgttcttccttgcccagaaaggaaccaataggcaagacaacgaggcagtgagcggtaggagctcatcwcctcccagactcccagagagaaaataacctcgccaagccaatctttgacactggcaccttctcctcacaattttctctcttctcccaaaagatgatttaattttgccttcctaagattgctggtattctagctcttacctctatgttctttctcacgtctcctaaagacaaaattgtttaatttacatgattataaagatctgtttatgaaaatggaacatggtaactgtctctcattttattttcttaaaggttcttctctacgttaaggtggaaaatgtccttctgtttctaagtcacaagttttctgtgaaagttatttcagctctttcttcaggacaggggccagagatggctccatgaaatccctcatgaattcagcttattaagaataaaggaataggctagatgtggtagcttacacctgtaatcccagcactttgggaggccaaggtgggtggacaaagtggtttaatttacatgattataaagatctgttgatgaaaatggaagatggtaactgtctctcattttattttgttaaagattcctctctatgttaaagtggaaaacatccttctgtttttaagtcacaagttttctatgaaagttatttcagctctttcttcaggacaggggccagagatggccccatgaaatccctcatgaattcagcttattaagaataaaagaataggctaggtgcggtagctcatacctgtaatcccagcactttgggaggccaaggcgggtggatcacctgaagtcaagtgttcaagaccagcctggtcaacatggcgaaaacctgtctctactaaaaatacaaaaagtagccggccgtggctggtagcaggtgcctgtaatcccagctactcaggaggctgagtcaggagaatcacttgaacccagaagacaggggttgcagtgagccaagatcacaccactgcactccagcctgggcaacagagtgagactctatctcaaataaaataaaataaaataaaataaaaatataaaaaagaacaaagatgtggggctgggcacagtggctcaagcctgtagtcccagtgctttgggaggctgaggcaggaggatcacttgaggtcaagagttcaagaccagcctgggcaataaagggagacccctatgtctacaaaagtaaataataataaaaaaaagaataaaggagaaaaagagaagttgccatctagccttatctgtgtttgttaactctggtagatggcagaggatactgtgatgcaatgactggaaaatggcaaggcattcgtcgttgcaaccctgaagcacaggaactgtgccttgccttgcccttctcacgtcacttcctttagtgcctctcatatgtgagaagttcagctaatcctggcttaataaaaaccatacctagtgcatgtattatgtagtttgattactttggttggaagatgtatgcatccagatttgtcccaatctgtgtgtccatctgcagtgtgagggagacaaaagaaaactctaggctggcaaatattatatttataggcacatatgtttcatgtccagcttattggggggggtatatatataaaaagaacacctctgttatttaagaagcaatggtcttgtcttatcgcaagatcctgactaactggaaactggatcaacatgtgagaaccaacctctgcctgactgtatttgaagaatgctaaaagtatcatcagactttgaacacctactgttgacttttctctaatacctctgtcgagtgactagattaaccagataagtgagtaaaaacatcctgacatccctttccctagagggctggagacacaagggtacatcatggagactgggaattcacatagtctggggacccctgggagtctctgaagcccttgcagagtgtctgtgactttacttgaagaatggacttcaaaaatctcaaacaaatggccttgtccttaaattggcctcacttcctgcacaagaaaaaaaaaaaagacaaacaaaaacagaaaaacttgcttgattgtcctgaattcctggtaggctatgattcttggtttcagttcagttggagtttaagaactccaaaaacagtgcccttgaattctgatcccatttcagatagttgtcaaaggagagacacatcacaggtaacaatgtttccttcttttgttgttgttgcagattaatacatccagtgaaaagattgggtgtaactgtacccatgcattatagaggatacatgccccatttgcaattatctggagcttttgaggtaatcagaatattatgtgactagtgagatagaatgcttcctaaatatagtcaagatggcttcatccatagtactgggacatttccaaaatcttgtaaaataaaaaataataatatcatgttgttcggtagtatgatgacagaaaaggttgatctatatcaatggttcttaaacttttggtcttaggaaattttacactctgaaacattgaaaacactaaagaactatttattatattagaaattaaaatggagaaaccttttaaacacttccaatcagctgtcagagtgatgacattatcacacgtcatgtagcctctggaaaactccactacacttaggaagttttccagaggctacttgaggcttcttgagaagaaggataagaaaggaaaataacatcttagtattattatgcgaacaattgtaactcacagacactctggaagggcttcagagactcccaggagtccccagattatgtgaatttccagtctacatgatgtatccttgtgtctctagccttctagggaaagggatgtcaggatgtttttactcactaatctggttaatctagtcactcgacagagatatcagagaaaagtcaacagcaggttttcaaagtctgatgatactttttagcatcatttacctccctttgctcagattgtctacttaaaaactttataaacttcatttggtttctcaaatatagtgggttgaccagttagcacaagaagtctagttccctttgaaatctcatttctctatatgaatgattgttaatttgcttgggctagtgtgaactcattttccagaatctgaggtctaaacctggacccagtgtggcctcagcacactagaaatactccatctgcagcttcattgaatagttagccagctggtgaacttccttttcagtttactcctacaacaaaatcctgagagtaatgggactgagggaagaatttcctaaattgggaagtccaactctgacatacccctccacaggactaacccaatgctatcatttcaatttaaacttgcaaagagatttgcatatatgctgcgtgatttttctctgcaagtagtattatttaaaataaatcttcttactcacaccaactttgcttctatttttcctgtggtagtcaaagttttgactctgccatccctcttagcccaatctttcctgcactgagttggatcgttagaggttataacttgagcttgtcagttattttacctgctgcatgtttttaagcgtcatccaaaagatctctcataaatgggccatggtaatttcttcactatgaaaatctactggtaatgttattcctagttcaaagtaatatacatttcagattaattttgcaaaatggataatcttgggtagatttttgttgttgttttaaggtaaagcctgcttttgctgttttttttttaaacaatgactcttattataataaaagtccactgacatgagtcagatatactctttcatctttcctcaccctaacagggaattttaaaaaaccaatcaatctacaaaattcttttattgccaggaatggagagaaatgctgtatttaggaaaagccatgctgtagcttttaaaaacaaatatttaactcgttgtcacatctagttcccagtttaaccttgggaaatcctacaggcctctactgccatgtgctgtgttcaggatcacttgtattttcccttccccaaactgtcaaagctcaggggagacctgtcaggagccatcacctcccaggccttgtggtagaacacattggagctgcccattgttctgaacatgtctaagaatacataacttcaagtagcctaagtgtaacaagtttaataactgccttgtgtcctcctaaggaaagccctatttagaatgtcccatttgggtgtagttactcaggctgagggaggtcttagggatgagaaaggcattactgaacagagtatgaaagagtttcaagaagaagaggaagcgtgggtcttgtttctataaataaacctataaattctgaagagtcaaggtgaaattagaaaatttagaaatggataaaatttaactaacccttagagaaaacagggatgatcaattctgtttcaaccatctccctctcaaaaacatcttaatttagcactttattaaatattatacctgtttaatacatgtaattcttgtctctctagaaaaatgtataacttaatgaggacaagaacaatatctcatgctgacaccatatccctgcaggagctacccagaacacacttgagagatatttcaaatgaaaaaaaaaatatctattcctaagcttaccaagcaatatggaaaaaaaaatgaagtaaaatccctgaatttgggacagcaaggctataaaggatttaggtattaggatcctgcctttgaggagctaatagtttcaattgtagaataagatatacacacaaacatgcacacaaatgaacacatgtgcaggtcagtatgaaattaggcatgagttataaacagaaacactcagtgattgcagcaaaaagttctccatatcaccaaccgtccagctctctagacaggaacaaagaggcagttgtgtcaacatctcaagaaagtggtcagaagggggaaatagccatattcacccacatgggaagttatcgcttgttctttgcaaagtctttggcaagacatttaactgtctggccagtgaaatgcagaatagtggaatcaggtaccggcagatgtctgctgtttcaaggaaaacttgttcttaaacctcttgggattgtcctccactcagtctgtgtagtggggatcatcctgtagggatgtcacatagccagagtcaggaagccctttcttcctggattctcacattgagaaagatgcatgaagagtaagatatgcataaaaacaacaagaaagacatttggtaacattaattggctccaaggcatggaactgtgtggctggaggacaaaaattggccaagaaagaggatttttcagagtacacccatatttgctcttttaattttgaaccatgtgaatgtttcactgactcaaaaatagaacaagctgaaacaaacaaaaaaatctttttaaaattgccagagggataatctaggtgataagctattaacataactgtttgtcttcctgatactcaaacaacatagtccttgaatacttacaaggtttggacaagtttccagtttaaagaataaactttgtctctggcccttggaagttttgccactgagaggcttctactggcaaatagtaacatttatgtagcattttaaacttttcaaagcactttcacttgtttttcctttctgtttgcattaaatttaccattgttctccccgtttaaaaaaagcaacaatgtttcatacagttctatctatttagcaaatgcaattctttcctggggcacttttaccaaaaaacaaaaacaaacaaacaaaaaaaaaacaaaaaaaatcttttttttttcttcttaagatcccaggttatttgggcagtatgacatggacccagtcattctctctggatccaccccagtgccactcaaattacagcacctagagagtagaatctaaaattctactaatgccctggccaaatgtggctatgagaatcttaacctctcttgttctggatttcctactgcctgaaaaacagactattatggctttagtcttcctagcagctaagtcacattcattctttcacattgacttgctaccaactaaagactttttgtccttctagtgagaattactgttctgacagctttcttcaggctgctaaatttttttacacctatatgcatgcccctatattatttcttattagggtttattcctgctagcttccagccagttaccatctttctgaatctagattccatcattg

SEQ ID NO: 96494 - DNA, 49787 bp, Homo sapiens
  misc_feature (1)...(49787): n = A,T,C or G
aaaacaaacaaaaccagctggatgcaggagcttatgcccacaatcccagcagtttgggaggccaaggtggcagcatcacttgaggccagcagtttgagaccagcctgggctaaatagtgagaccccatctctacagaaactttttaaaaagaaaattagccagggatgatggtgcatgtctacaatcctagtagctacttgggaggctgaggtgggaggatcgcttgagcccaggtcaaaggctgcagtaagccatgatcacaccactgtactatagcctggacgacagagcgaggccctgtttccaaagtaataacaataattttaaaattaaattaaaaaatttttaaatagaaaaactgaagagacgcacccatacacactgcatatgtatgcatgtatacctatatgtatacatgaagggtttgggtttttttgtttttatttatagagatggggtctcaccatgttgcccaggctggtctcgaactcctgagctcaagtgatttttctgcctcagcctcccaaagtgctgagattacaggcatgagccactacacacaaccacatgaagttttatattcaccaaatgtttatgctgatttaattacggaggaaacacaagaccagaaaagtcaagaactaaattcatatacaaagagacataagtaactaatacaactggccgggcgtggtggctcacacctgtaatcctagcactttcggaggccaaggcaggtggattgcctgagctcaggagttcaagaccagcctgggcaacaacggtgaaaccccgtctctactaaaatatgaaaaattagccgggtgtggcagtgtgctcctgtagtcccagctactcaggaggctgaggcaggagaatttcttgaacccgggaggcagaggttgcagtgagccaagatcgcgccacagcactccagcccgggcaacagaatccagtacatgaatttagctcattttattagcatagagtactatgactttagttcctgaaaaaaaggggcaggaggctgggtgtggtggctcatgcttacaatcccagcactttgggaggctaaggcaggaggatcacttgaacccaggagtttgagactagtctgagcaacatagcgagacacagtctctttaaaaaaaaaaaaaggcccaggagaataagggttagctcgaactatcattaacctttattatatattacacattttagactctctagcattgaaaggaaaacttctctgtcaatttttacatgatttttgagaacattttaaataatattaagacaaaaaacatttcaagaagcaaaacacagtggaaagcacacaacagtggaaagctccacagcaaattggagcttcctggtttctgtaggtatttctttttttttttttttttttttgagacagagtctggctctgtcgcccaggctggagtgcaatggcgcaatctcggctcactgcaagctccgcctcacagggtcacaccattctcctgcctcagcctcccgagtagctgggactacaggcatgcgccaccacacctggctaattttttgtatttttattagagatggggtttcactgtgttagccaggatggtctcgatctcctgacctcatgatcccgcccgccttagcctcccaaagtgctgggattacaggtgtgagccaccatgccctgcctctgtaggtatttcataaaaactgtagtgaggcttacaatgagaattatttggggagagaaaatgtgtatgtaagaaaaatctgacatcctctcacttggtgaggggagatgaaactccactaatactgggctaggcactttaatatctgccattcattcatacagcaaatactcattaatgcccactaagtgctaggcatttcgaagacacaatcctgtttacatgctccttactgtcagatgagacaggtaccagacacattaagaaaaattaccaaacatgtagttatatttattgttattataactattgttacgataaaagctacaatacagtatgtgataagagcagaggggcaagctgggaggttagggacgatctgaagaaagaggaggagggaggaaaaggagtgcattccagatgttatctcattaatccctacaactctgagttaagtacctttcccaaggtcacaggactgttaagtgtcagagccaagctttgagatgagattttgagatcagaggcttgctctgtcgcccaggctggagtgcactggagagatctcagctcagtgcaacctctgcctcctgttttcaagtgattctcctgcctcagcctcctaagtagctaggattacaggcgcctgccatcatgcccagctaatttttgtatttttagtagagatgaggtttcactatgctggccaggctggtctcaaactcctgaccacaagcgatccgcccacctcagcctcccaaagtgctgggattacagatgtgcgccaccgcgcctggcctcagaccagatttaaattattccaaagtccatgcttttctactgtgccgtgctgcattttcccacattgctgcttctccccaaaaccatttcctctcaaagttcatggaaaaatgttgactctaccccagattcttagtgccagaattagactctctcctccagactaggcccttggtttttcacctactacctccaaactcattttcacagatctttagatttgggacgctaataaacataattttttcacccagaccataaccatgcacagagacaccactgcaaactgtcaaagtttttaaggttatcacttacttctactacaaataaaataattttatttatttatttttttgagatggagtctcgctccgttgccaagctggtgtgcagtggcgcaatctcagctcactgcaacctccgcctcccgggttcgagtgattctcctgcctcagcctcccgagtagctgggactacaggtatgcaccaccatgcccagctaatttttctatttttaatagagacagggtttcaccatgttagccaggatggtctcaatctcttgacctcgtgatccacccgcctcggcctcccagagtgatgggattacaggcatgagccactgtgtgccacttttttttctgagacagggctttgctctattgcccaggctggagtgcagtggtgcaatctcaactcactgcagcctccacctcccaggttcaagtgattctcctgcctcagtctccggagtagctgggactataggcgtacgccaccatgcccagctaaattttgtatttttagtggagacggggtttcaccatgttggccatgctgttctcgaactgctgacctcaagtgatccacctgcctcggcctcccaaagtgctgggattacaggtgtgagctaccacgccaggccaataaaataactttctggcacacagttttgaaaagtgattcacagattatagggcacaaacctaaggacactggtcaggacaacagttaagaagataaaaataaaagcaactacaaaaagagcaaagaaaatgccacactttcacttctggaatgactttcacattcaccaactctcatctgtgattcagatctctactcaggagagcttcactttcccttcttcctgttcctacttcctctttctcagctcttccatttttaggaatatcaaacttcaaaagaagacttttattacattagatctgttgtgagttacagcaacagaacagtcttataaaaactaaatttggcaagcttcctattcctctactttcttcctgtgatttttttttttttttttttttttgagtcggagtctcgctctgtcgcccaggctggagtgcagtggcgtgatctcagctcactgcaagctctgcctcctgggttcacgccattctcctgccttagcctcccgagtagttgggactacaggcgcccgccaccacgcccggctaaattttttgtatttttagtagagatgggatttcacagtgttagccaggatggtctcgatctcctgacctcgtgatctgcctcccaaagtactgggattacaggcatgagccaccatgcccggcccttcctgtgatttttaatgccggctgaagaacataaaagctagatcttttaacctaagatttaccacaagcagattataaaccacttaaatacagtcatgcttcactgaacgtcaggcatatgtgctgggaaatgcatggttaggtgatttttgccttgccaacattatagggtgtacttacacaaatctagatggtatagcctactaaatgcctaggctatatggtgtacattacagtaacatgctatacaggtttgtagcctaggagcaataggctgctgcatgttactgagtactgcaggcaactataatacaatggtaagtatttgtgtatctaagcatacctaaacatagaaaggatacaataaaaatatgtactataatcttgtgggaccatctcttctacgcagtccttggtctttatacctttatatctgcactgccaccaatactgcgaataacaagctggctacgaaaatcagactacctcagactcagcaagttatacacccaaaaatctctcacgactttcagtttaaaaatatatctacaaatatagacaggaagatggggagagacagcgtgagtgccagtgccaggcactaaccatgtgaagaaagatgaataagctgtggcttacagaagtaaaaactaatttgggaaaagaattcaacattcaaatgcctggtgtgtttcttcatccctaggaacaaatagtaactaatggcaagaccctaaagtacaggataggcagtatggagcccgaggattccaaatactctccaagaaacaacatcgctcatttcttgaagcctggggctgctctgcaaaggtaacaaggcaaagatgttcgaagacttaattatattaatatatcgttcaggatacttatggattatttggagcaatggaaactatgtaaatcaaagcattaccataccgttaattacataggtttataaggtgagtttatattttgggattctctggtagtgatattttacaatataattatacatacagtttgtatagtctgatgagtttcctcactgagggtgaactgctgcgaaatgttttatgattcgtttattgctagtcacgttgttcaaacaacacgtctataagtaacgttccctttgaactgtactgttactagactgtcctgtgttgtaccatcgaaaaccatcgtccaacatgctcttttcccaggaatggcctgaagcacacgagtggaacactgcatagaacttttatataataaaagtactgaacgtctccggcccttaatatccagagcacccacccttggtaaatgacaaaggcaataaccaatcgccaggcagaatcctagtgacttagccaataagaacatgagggtggggctagactaagctcccggtgacttccccgcaccccagagacccaggttgtgggaggctggacgggaattggactccgaggatttcgttacccccggttgtagctgttgtcctcctcattctcgcaatcgctgcagtgctcatggccgttcccgttcccttccatcatctgcggcagcggaggtgccggcggcttcactgctgtctcactctcgtccgccatcttgagttgcgagagcagggctccgcgccccactacatggggggttcctattggacaaggggaatttgcgctgcattctgggttttgtagtttttctggcgaagcgagctgccactaggagcgactctttcccaggaaactgactacaatacccaggaatcacgagggacggctccggtcggattaagaggcggggccactgatacccggaagcctaggcattcggccacgctttgaggaaagaaggggcgcaaggttggtgggaccgacccttgggaaccgggcggccgcctggcatgatgggagttgtagttcgatgctggtttagggtttcaggcgtggaggttccaaaatccgaggtttgmtttcagcctgcccttgccagtgcctgggccgctgggagccgttwttggctgccgttaaggaccgttacgtttcccgggtaagtgaaagggcctgaggcccgcgggtgctacctgcctggagccggaatgccccaggccttcttagagtgggcttttccgcaagaagcctagttgactcctggccgccttcctcactcgggagtctgggcaacctgcggtcattggcagttcaaggtctcatgagaggcagtggatttttttgtgcgaagcactgaccctaagccaggagaccacactgctagggaggcagggctcgccgcctcatcttggcctccaggtacttatcttcgccaagctctttcgcgcacacgtggtccctttaattccccacaagaattttccacaacgaccctttttttcttttcttttctttctttctttcttttttcttttttaaatacggccgccttctgtcgcccaggctggagcgcaatggctcaagatcacagctcactgcaatcaaggtatcctcccacctcagcctcccaagtacctaggactataggcatgagccaccacacccggataatttatatattttttgtagagacgagggtctcgccttgttgcccaggctggtctcgaactcctggcctctaaggatcttcctaccccaaccccgcaaagtgctgggattacagacgtgagccacggcacccagcccacatcaactctttctttaataagtgccagactctgtagtaaggcatttcgtacattatctcatttaatcctctcaacaagtctacaatataggtcctattattattattcaacctttgttttgttttgttttgttttgagacggagtctctctctgactcccaggctggagtgcagtggtgcgatctcggctcactgcaaccttcgcctcctgggttcaagcgattctcttgcctcggcctcctgagtagctgggattaaaggcgcacgccaccacacctggctaatttttgtatttttagtagagacggggtttcaccatgttggtcaggctggtctcgaactcctgacctcgtgatctgcccatttcggcctcccaaagtgctgggattagaggtgtgagccaccrtacctggccatattgacctttttgacagatgaaaaaatgtggccctgagaggttggtaaattgcacagtcacatagctggttaagtggcaaatcggtatacaaatccagatctgtgtgccccaggccctctgaattctttgccaccataaaagtcccattttctgatacactattcactcaaggaaatcagttactaaaaggtaactgtgactccagtgcgtattctatatcaggggaaaaaaggtaactgccacattttaatctgtttttaaccttgattgaatgtttcagtccctgagtctcactcttttgattgagtaatctcgcctaagtgcccaaagacatggttcccattcttggaaatttcctattcgggttgagtgtggtgggtgatgagaggactaattcttaccatcagagtgctccatggccaaaaagggaaatgatctttgcctttgggaaagatctcaacatgggaagaatggcagggcgggaagaaacagttcccatctgactcagggaaagaaaacacaaataaaacacagaactaaatatagtcaactctttctttcttttttttttctgagacggagtctcgctctcttgctctgtcgcccaggctggattgcagtggcgcgattttggctcactgcaagctctgcctcccgggttcacgccattctcctacctcagcctcccaagtagctgggactacaggtgcccgccacctcacccggctaattttttgtatttttagtagagacggggtttcaccgtgttagccaggatgggctcgatctcctgacctcgtgatctgcccgcctcggcctcccaaagtgctgggattacaggcgtgagccaccgcgcccggccaactcaactctgtttttatatcaatggcataagcataagtaattatgatccaaagcagcagataatcctcagtcatttatatttgactttggaaggcagtcaaagatgcccactcagtctgagagctgtcaccacactcaactctccggggtctaagactgctgttcaacgcgattgccctatttgcagctgcagggaaggggggggtcagaggtaagaagaagaataataaagccaggccaggcgctggggcttatgccagtaatcccagcactttgggannnnnnnnnnnnnnnnnnnnnnnnnnnnnnnnnnnnnnnnnnnnnnnnnnnnnnnnnnnnnnnnnnnnnnnnnnnnnnnnnnnnnnnnnnnnnnnnnnnnnnnnnnnnnnnnnnnnnnnnnnnnnnnnnnnnnnnnnnnnnnnnnnnnnnnnnnnnnnnnnnnnnnnnnnnnnnnnnnnnnnnnnnnnnnnnnnnnnnnnnnnnnnnnngcggaggttgcagcaagccgagattgcgccactgcactccagcctgggtgacaaagtgggactctgtctcaaaaaaaataaaaagtaggctgggcgtggtggctcatgcctgtaatcccagcactttgggattacaataataaaataaaagataaaaagatattttgtgtgttatttttatttattattatttttgagactgtctcgctctgtcgcctacgctggagtgcaatggcgcaatctcggcttgctgcaacctctgcctcctggattcaagtgatcctgccacctcagcctccccggtagctgggactacaggtgcgcacccccatgcctggctaatttttgtacttacagtagagatggggtttcaccacgttggccaggctggtcttaaactcctgacctcaggtaatccacctgccttggcctcccaaagtgctggaattacaggtgtgagccaccacgcccaggcttttttttttttttttttttttttgagacggaatctcactgtcacccaagttggagtgcagtggcacaatctcgactcattgcaacctctgccttccaggtttaagcgattctcctgcctcagcctcccaagtagctgggattacaggtgcctgccaccacgcccagctaatttttgtacttttagtagagacagggtttcaccacgttggccaggnnnnnnnnnnnnnnnnnnnnnnnnnnnnnnnnnnnnnnnnnnnnnnnnnnnnnnnnnnnnnnnnnnnnnnnnnnnnnnnnnnnnnnnnnnnnnnnnnnnnnnnnnnnnnnnnnnnnnnnnnnnnnnnnnnnnnnnnnnnnnnnnnnnnnnnnnnnnnnnnnnnnnnnnnnnnnnnnnnnnnnnnnnnnnnnnnnnnnnnnnnnnnnnnnnnnnnnnnnnnnnnnnnnnnnnnnnnnnnnnnnnnnnnnnnnnnnnnnnnnnnnnnnnnnnnnnnnnnnnnnnnnnnnnnnnnnnnnnnnnnnnnnnnnnnnnnnnnnnnnnnnnnnnnnnnnnnnnnnnnnnnnnnnnnnnnnnnnnnnnnnnnnnnnnnnnnnnnnnnnnnnnnnnnnnnnnnnnnnnnnnnnnnnnnnnnnnnnnnnnnnnnnnnnnnnnnnnnnnnnnnnnnnnnnnnnnnnnnnnnnnnnnnnnnnnnnnnnnnnnnnnnnnnnnnnnnnnnnnnnnnnnnnnnnnnnnnnnnnnnnnnnnnnnnnnnnnnnnnnnnnnnnnnnnnnnnnnnnnnnnnnnnnnnnnnnnnnnnnnnnnnnnnnnnnnnnnnnnnnnnnnnnnnnnnnnnnnnnnnnnnnnnnnnnnnnnnnnnnnnnnnnnnnnnnnnnnnnnnnnnnnnnnnnnnnnnnnnnnnnnnnnnnnnnnnnnnnnnnnnnncgtggcattgtggcatgcacctatggttctagctacttgggaggctgaggtgggaggatcgctggaacccaggatcatgccactgcactccagcccggacaacatggcaaggccccgtctctatataaataggaaaaaagggccaggcgcagtggctcacgcctgtaatcccagtactttgggaggccaaggcgggcagatcatgaggtcaggggatcgagaccatcctggctaacatggtgaaaccctgtctctactgaaaatacaaaaaattagccagacgtggtggcgggcgtctgtagtcccagctacttggtaggctgaggcaggagaacggtgtaaaccagggaggcggagcttgcagtgagcggagatcacgccaccgcactccagcctgggtgacagagcgaggctctgtctcaaaggaaaaagggccaggcacggtggctcatgcctataatcccagcactttgggaggccaaggcaggcggatcacctgaggtcaggagtttgagaccagcctggccaacgtggtgaaaccccgtctctactaaaaatacaaaatttagctgggcacagtggtggacgcctgtaatcccagctactcgggaggctgaggcagggagaattgcttgaacccgggaagtggaggttgcagtgagccgagatcgcaccattgcactccaacctgggcgacagagcaagactctgtcttgggaaaaaaawaatatatataaaaaagagtgcaggcagagtgtgactccctgggttctaaatcctggctctgcctctgacttaatgaatgaccttaggcaagtcacttaacctctgagctttgatgtcattatctgtaaaataagacttacatagagagccctaaaagtgtctaggacagaattaatacccacttaattagtatttcccttcccaggaagtcagcattactggtatgataaccaaagaaaagttttcttcatgatgtccatcacagatcaaggcctttgctgtacttccagcatgtcagagataaccttcttttttttttttttttgagacggagctttgctctttttgcctaggctggagtgcaatggtgcaatctctcctcactgcaacctctgcctcctgagttcaagcgattctcctgcctcagcctcctgagtagctgggattacaggtgcgagccaccatgcctggctaattttttgtatttttagtagagaaggggtttcaccatgttggccaggctagtctcaaactcctgacctcaggtgatcccctgccttggcctcccaaagtgctgggagtacaggtgtgagccactgtgcccggccacatataacctttcttctggtggacctacgaagccatgagatagattgtgattcatttattccaacctcgggaacactgatgacttgtcagcctctatggcaggaactggagagtcaggggtagaacagttctagcacagtgcctaagaaagtggggagcacaggctgtccagaggcaggagatcctggggggacatggtggcttagctgaatgttcatcaggacagtaaacaaactggggtggaccttctaggtagaaagtccaggtgcctgagacttgggtgcttttgaggtatggcaatgagaatgatatgacttaggactggagcttagaaagtgaggagtgtgtgcctgtggttccagctattcagtgggaggctgagatgggaggatcacttgagcctgggaggcagaggtcacagtgagccaagatcgtgccactgcactaacctgggtaacagagtgagaccctgtctcaaaaataaataaataaataaataaataaataaacgtacagaaaakaaatttaaaaccaggagccaaaggagtcatctctaatggactcagggttgttcatcaaacaaaatgagaagcagaactgtattccaggcatcatgctaaatgctaaggacacagaggtgactgagatgcaggccactctcaggataaaatgagattgtgtaagtagctacagccagctcaaagtttcttattgccatcctgaatcatgaaagacatatatttgagctgaaaaagcccttgatggcatcacatggaaactccaaagcccaagtttcattatggaggaggtgcctgggttgaaggccctgtagcagcccttcaccctttcctatgggatcttcctggggcagaggtgcagctgcttttggcaaatcggaccacaaggatacctccttggaagacaaggctctcacttgtacatgaatagtyataatactgtaaggcagtatctgagaaaagtagggtcatctggacggtttcctaacactgtgtcccaggaagatccagataatttggggggacaggccaggcctgttcctatccctgtcttggccagccatgattactggtgggagtctgggtatcccttggatgtgtcaggagtagggaaaagggtgagaaccacaggattaggttagctatacattgtttgatcaaggaagggaattgagccattaaatctggctctataaaatagaattagatttgttctgtatggccccacggtttaaaactaggagagatactgcctaagaaagaactttctaactgccaagactggacttgaaaaaataacaactgtcagccaggtgtggtggctcacacctgtaatcccagcactttgggaggctgaggcaggcagatcgcctgaggttgggagttcgagaccagcatggccagcatggtgaaaccccatctctactaaaaatgtaaaaattagcctggcatggtggcaggcacctgtaatcccagctactagggaagctgaggcaggagaatcacttgaacccgggaggcggaggttgcagtgagctgagatcacgccattgtactccagcctaggcaacagagccagactctgtctcaaaaaaaaaaataaataaaactgtcttgagtggcagtgagttccccaacatgggacatgtacatgtatacatggcagagataatgtggaagagattcaaatactggcagggtgtttgtaccaaatggcccttttggacacaagatggaatcctttttattgggtgatggcagtaggtctccttgactgttgaagtcaggaagaaagctttcagggactcaggtgatctgagaaagatgttaaattacttaattcctcaatatactgaatccctactgtgcagggcactgggtattgtagtagtagataggcaagattcctaccttaaaggaagtagagaatagagatacagtttaaggaaagggaagggagacagggtaggtgttaattaaaaacttcctgctggtgaggcaccgtggctcatgcctataatcccagcactttgggaggccgaggtgggtggatcacctgaggtcaggagtttgagaccagcctggctaacatgccaaaccccatctctactagaaatacaaaaattagccagatgtgctgggcatggtggctgacgcctgtaatcctagcactttgggaggccgaggtgggtggatcacctaggtcaggatttccagaccagcccggccaacgtggtgaaaccccatctctactaaaaatacaaaattagccgagtgtggtggtacatgcctgtaatcctagctacttgggaggctgaggcaggagaatcgcttgaacccgggaggtagaggttgcagtgagccgagatcatgccactgcactccagcctgggcaacaagagcaaaactccatctcaaaagcaaaacaaattagctggatgtnnnnnnnnnnnnnnnnnnnnnnnnnnnnnnnnnnnnnnnnnnnnnnnnnnnnnnnnnnnnnnnnnnnnnnnnnnnnnnnnnnnnnnnnnnnnnnnnnnnnnnnnnnnnnnnnnnnnnnnnnnnnnnnnnnnnnnnnnnnnnnnnnnnnnnnnnnnnnnnnnnnnnnnnnnnnnnnnnnnnnnnnnnnnnnnnnnnnnnnnnnnnnnnnnnnnnnnnnnnnnnnnnnnnnnnnnnnnnnnnnnnnnnnnnnnnnnnnnnnnnnnnnnnnnnnnnnnnnnnnnnnnnnnnnnnnnnnnnnnnnnnnnnnnnnnnnnnnnnnnnnnnnnnnnnnnnnnnnnnnnnnnnnnnnnnnnnnnnnnnnnnnnnnnnnnnnnnnnnnnnnnnnnnnnnnnnnnnnnnnnnnnnnnnnnnnnnnnnnnnnnnnnnnnnnnnnnnnnnnnnnnnnnnnnnnnnnnnnnnnnnnnnnnnnnnnnnnnnnnnnnnnnnnnnnnnnnnnnnnnnnnnnnnnnnnnnnnnnnnnnnnnnnnnnnnnnnnnnnnnnnnnnnnnnnnnnnnnnnnnnnnnnnnnnnnnnnnnnnnnnnnnnnnnnnnnnnnnnnnnnnnnnnnnnnnnnnnnnnnnnnnnnnnnnnnnnnnnnnnnnnnnnnnnnnnnnnnnnnnnnnnnnnnnnnnnnnnnnnnnnnnnnnnnnnctcctgcctcagcctcccgataaatgagaccacactgtcaccatgcctggctagtttgttttttgttttttttttttgtagagatcgggggttagtctcactcttgtttaggctggtctcgaactcctgggctcaagtgatcctcccaaagtgctgagattacaggtgtgagccaccgtgcccggcttttatgtattctttcaacaacgctgcacggctgcgattatccccactttgagaggagacaggatgagaggctgagtggcttgctaggcttgtatggacaggatgcgggctctgcaatcacatgactttgtatgagagggcaaatggattaaccgctaaacatagtttcctgttgtgtaaaatggggatgatgatagtatccaccctgcggactgtgcgggctgagataatcccacaaagtgctcttaggacctggcaggtggaaagtgctcatgatcacctctgccaaggctgcacaagtagcgagtggccgagctttatatccgaagttaggaccctgcagttttgcccctctcctctctctccctctccttcccggctccggggaaaggaaaatttatggctccgggtcgggggttgcgggggacctctgtgccgtgctccggggccgagctctccccgccggcctctcccgcgtccgtccggccgccctcccgcccaacctctcccgcccaacctctcccgcgtccgcccgcccgcccaacctctcccgcgtccgcccgcccgcccaacctctcccgcgtccgcccgcccgcccaacctctcccgcgtccgcccgcccgcccaacctctcccgcgtccgaccgcccgcccgcccaacctctcccgcgtccgcccgcccagcccaacctctcccgcgtccgcccgcccgcccaacctctcccgcgtccgcccgcccgcccaacctcttcccggccccgcccgtccaacctctcccggccccgcctgctggccggacgttccggtctgcaggcgcgnnnnnnnnnnnnnnnnnnnnnnnnnnnnnnnnnnnnnnnnnnnnnnnnnnnnnnnnnnnnnnnnnncgggccctggccgcggctgctacgtggggctgccaccgccccgggcgacccaatttcgcggcctagtggggcgtacgggcctcttttgaaagcctgagttacgatgtattgagcgcgtcgtatgcggccagcactaaggcaagtgcttttatatccacggcccattgtcttgacagcaaccctaccaagcaacgtgttatttcctctgttttacggctgaggacgcgcaggaaggtttacagctagaaagggctggagattgtggattcaaactcaggatcagaccaaagccactgcsctttagaactttgcgggccgattgattcttgaatctagcttctgccacttcagttgtgtgaccttggggtatctttccgatcccaagtttgctcatctgaaaaatgggaataaagctacagtatctgtcccatagggtgggtataaagtgctttactgttgagctgagtgatcatctccgattttcagacccctctcctccgcttccctctcccctgggaggccagttaaggttttagtgaaggcccccgggactggggcggcgtggatctcacgcccaccaactagtgagggaggccatccggccacccgtctcttccttccccagctccgcaaaggaggcgttggcatttcaggtgtttgcttacagagttttcaaagatttttcactctcccttagttgtgggaaaatgattcaacctacccaagtgaactttgacattaagtctcaattctaacggtgaggaaatggaagcctttgaatatgttttatgtcttaaacgtgtttgtttttgcaggagggagagtgctcattttacctgaataaatcaagattgagttggtgtggcacagtgctggcataggcctggggaaaggggtgaaatgctagagatctggtagatggatagaaagtggacagacgggttcgggtggtttttgtctcagcagggccctaaattcccaccaaatcctcctctgtctgtcttcaccaaggtctgaatctgtccccttggtaaataacgtttaaatggtctccgagcccctcttggtgcctgtaccttaaggagagaagaagagggctgatagctgaaggcaggcaagccacgaacttagctttgttttgaaaattaccckctgggcygggcacggtggctcacgcctgtaatcccagcgctttggtaggttgaggagggtggatcacccgaggttaggagttcgagaccagcctggtcaacatggtgaaacccccgtgtcaactaaaaatgcaaaaaaattagccggacatggtggtgcatgcctgtagtcccagctactcgggaggctgaggcagaaaaatcgcttgaacccgggaggctgaggttgcagtgagccgagatcgtgccactgcactccagcctgggcaagagagtgagactccttctcaaaagaaagaaagaaagaaagaaaaaattacctgctgggaggccgagcgcggtggctcacgcctggtaatcccagtattttgggaggctgaggcaggcagatcacctgaggtcaggagtttgagaccagcctggccaacatggtgaaactccatctctactaaaaatacaaaaaaattagctgggtgtggtggcgggtgcctgcaatcccagctactcaggaggtcgaggtaggagaatcacttgaactcaggaagcagaggttgcagtgagctgagatcgtgccactgcactccagcctgggtgacaagagcaagactctgtttcacaaaaaaaaaaaaaaaaaaaaaaggaaaagaaaaagaaaattacctgctggcacagttttagattgatagctttagattgaaactttcacatttttattttgaagattacagaggataaaagttctggttaattgtgaatgttgatattttaaaataaagctgttaaaatcctcatttaaacctgcagtgaagtctaaatatacaccatttgatttgatttccctcatcttttgaaaaaaaaaaaaagaaccactttttatttaaccatcgaaatttcaaatcgttctttttttcctttattttttccgagatgggatcttgctctgttgctcaagctggagtgcagtggcagtcactggttactgcacccttgacctgctgagctcaatcctcccaccttagccaccaaagtaactaagagtacgggtgtctgtcaccacatatggctgatttttctttttatttttagtagagacgaggtcttgctatgttgccccggctgactcctggtctcaagtgatccttgcatctcagcctccaaaagtgctgggattagaggtgtaagccaccatgcttggccctttttccttcttgaactcatatttccactttgtttcctcacagaagttttttctaatgtaatagtttttgtttttttgagacagggtctctgtcacccaggctgtagtgcagtggcgggatcacagctcactgcagccttgacctcttgggctcaagcaatactcccaccttagcttccccagtagctgggactgcaggctttcgccaccatgctcagccaattttttttttccaaatgaaagcaagattattaggaaaataatggaataaagaatggctacaccataggcagaacagcccttgtgctgctggttggctatttttatggttctttctttctttttgagacagagtctgtctcactctgtcacccaggctggagtgcagtggcgcagtcttggctcactgcagcctctacctcctaggttcaaatgcttctcaagcctcagcctcctgagtagctgggattacaggtgcatgccaccacgcctggctaatttttgttttgtttttctttgagatggagtctcgctctgtcacccaggctggagtgcagtggcacgatctcggcttactgcaacgtctgcctcccggtttcaagcgattcttctgcctcagcctcctgagtagctgggactatgggcatgtaccaccatgcctggctatttttgtatttttagtagagacggggtttcaccatattggccaggcaggtctcaaactcctgacctcgtgatccgccctcggcctcccaaagtgctgggattacaggcatgagccaacatgcctggcctaatttttgtattattagtagagatgggcttttgccatattggccaggcaggctggtctcaaactcstggcctcaagtgatctgcctcccagagtgctgggattccagctaatttttttttttttccatttttttgtagagacagagtctcactatgttgcccaggctggtcttgaactcctggcctcaagtgatcctcctgccttgacttcccaaagtgctgggattatatgcatgagatactgtgcctgaccatgtaataatacattttatgcctgaaagcctttggtttatcatatttctctgcaacaaaaatacatacaaaattaaaacttttttaaaattgtgttatcatgagtattaaatgtttcttttggattgagttgtcacaattataaaatacacaattgataaaaacaatgttaacaaagttttatttgagtatttctcttaataagctaagtgggccgggnnnnnnnnnnnnnnnnnnnnctcaggtgtttgagactagccaggggccagacgcggtggctcacgcctgtaaacccagcactttgggaggccaaggtgggcggatcacaaggtcacaagttcaagaccagcctgaccaacatgccgaaaccccgtctgtactaaagatacaaaaattagctgggtgtggtggcgtgtgcctgtaatcccagctactggggaggctgaggcaggagaatcatttgaaccgggagccggaggttgcagtgagccaagatcgcgccactgcattccagcctgggcaacagggtgagactccatctcaaaaaaaaaaaaaaaaaaagagactagccagggcaacccagcaaaacctcatctctacaaaaaatttttaaaaattagccgggcgtgttggtgcatgcctgtagtcccagctacttgggaggctgaagtggcaggatcacctgagcctaggagggttgaaacttcactgagctgtgatcacaccactgcattccagcctagacaatggagtaagactctgcctcgaaaaaaataagctgggtggagctttttaaacctcatgtatctatccatgtttatttgtatatttactagagtgagcagagtgcttttttttttctttggctgtaaccattgaaaaagtttcttcatgtaaattaaatacacaggagttgaaggcttttttttttttcagcaatatcactcagttctttgaacaccttctgaattatgggccgaaaaatcacattgaattattaataatctgtcagtccacagttcttttaggtcctcctttaactttcttgaaggccaaggtttagaaaccacctgactcatgcaaggatttgttccttagtcactgtaggcagtcactttcttagcatgaatactgaccttttgaattgccctttctggtgcccaggggattttcaccctgtgggaccgtgcacctcacctcagtatgatttagcatgggtggatggttatgcctttctctgaaacatgggagatgggtgagtgtgaaggaggagctgggtaggagagccagtgggaattgagttggaaatttatgacgctgaaactctacctttgtgcctctcagaaaatcttcacgcatcacctaagtgttctcattctcctgtgtgtaggccacctggcactaccgtgggcaaacatagagctgctttttttttttttttttttttttgagatggaatctcgctctgtcgcccaggctggaatgcaatggcacgatctcggctcactgcaacctccacctcccaggtttaagcgattcttcttcctcagcctcccgagtagctgggactacaggcacgcaccaccacgcctggctaatttttgtatttttagtagagatggggtttcaccatattggccaggctggtctcaaattcctgacctcgtgatcagccctccttggcctcccaaagtgctgggattacaggcaggcgtgagccgccgtgcccagccagaacttcttttaacttccatttcctcactttgagaaagtgctgctcttacactctagttccgcctgctgggaagctcaccttcctaggcactctctcccacattttcctcatcttttagcccaatatattgtcagtccaggaatgtggaggtgggaagtaatgtggaaaggttttgtgattctcattttaaaatagttgatgttgccaggcacagtggctcacgcctgtaatcctagcacttgtgggaggccgaggcaagcggatcannnnnnnnnnnnnnnnnnnnnnnnnnnnnnnnnnnnnnnnnnnnnnnnnnnnnnnnnnnnnnnnnnnnnnnnnnnnnnnnnnnnnnnnnnnnnnnnnnnnnnnnnnnnnnnnnnnnnnnnnnnnnnnnnnnnnnnnnnnnnnnnnnnnnnnnnnnnngtagaggttgcagtaagccaaaaccgcaccattgcattccagcctgggcaacagagcaaggctccgtctcaaaaacaaaaacaaaaaaagttaatgttgagttccagcttgcccatgagctaaatattttgctgcatggtttatgtattaattcaacaagtatcttttttttttttttttttgagacagagtcttgctctgttgctcaggctggagcgcagtggtgcgatctctgctcactgcaacctccccctcccgggttcaagtgattctccttcttcagcttcccaagtagctgggactacaggcacacgccaccacgcccggctaacttttgtatttttaatagagacagggtttcaccatattggccaggatggtcttgaactcctgacctcaagtgatccatctgcctcagcctcccaaagtgctgggattacagatgtgagccactgtgcctggctaacaagtatcttttaagggcctatttgtcaggccctgtttttggcaccttggatacagcagtacccagatttagagagaggcagattgcaagatatcaacacaaagccaagtaatgtgttgggtggtgacacgttggtcagcgctgtgaagaaaaggaggctacaggataaagcaggggtgctgttttatatatttggggacagtttctctstaaggtccccagttcccctgctttctgtccgtgtcctgaccaggctgtgatccagctagctgcagggttgaatccaaactgggtccttgaacattcccaggcacctagatacctagataaaggtgcctatagatatctagatacctagataaaggtgcctatagatatctagatacctagataaaggtatctaggttgttgcccaaaatactgaaagaaactggccctggccctgagccaaattccttaaaccttcatataaactccatgccctgaccctcttgctgtcgacatacctaggtagaacacctcatttctctcgctgtccattgagagcagtggtgcagcccactctgtaaggaagttcccctaatgaatgcttataaatgctttggactgatcaccctggcgattagtggttctttctttagaatcccaaccagccttgtcttgagacagtttagggcattcccttgtgggaactcttctgccacagcttttatttatttatttatttatttatttatttatttatttatttattgatggagtctctctctgtctcccaggctagagtgcaatggcacaatctcggctcactgcaacctctgccttctaggttcaagtgattgtcctgcctcagcctcctgagtagctgggactacaggcacgtgccaccacacctggctaatttttgtatttttagtagagacaggattttgctatgttggccaggctggtcccgaactcctgacctcaggtgacccgcctgcctcagcctccgaaagtgttgggattacaggcgtcagccaccgcacccatccgcttgccacagcttttaaggtgattccagccagttccagacgggggttgggttcagcgggacaggacctgacagtctctgatggggggacgattgggcagagaagggagtgaatggggcagccctctggggaagagccttgtctgggactgtggggacattggggcacaggcctgagggcagtgatgtaggggggagtggttggagatgctgggaggacatagatggcctctttcatgaggcttctgtaggactctccatggacttggcttgtacycactgagatggkaactgttagacggctgtgagcagaggcctgacatgatctgacttgcatttcaaaggatcacactagctgctttgttaggagcaaacaaagtttgttcctaactttggagcaaaggtgcagcaggaaatggctcagaggctgctgcagggcttccgcagcgacatggtggcgctcatgcaccrggggctccttgtgggctgtgcaggtgggaggtagcgctggccgggcactgcgggttggatggagggtgtgagagaggccaggaggattccgaggcttttggcctatacaagtggaaggagggaggagggaggtactgtttagggaaatggagttatgagaaaaacccagaattgtatagaaaaacattcccccaaatccggagggagccgagagaccaaagaatgattcgracaagtccagcttcgtgagtaggtgagcgtattaggacttaaatggagggcactcctcagtggcagcaggacagctctgggcgtccgtgccgcctcccgtctccaggctgcctttaagctaattttctggctctttgcctccggtgtgtgtgatgagactattttccttggtatgtgcccagctatgccctaggatgtttgggttctcagggacacgtgctcctcagctgggcaccatggccttggcttaccgcccagcctgcagggttcaagtggcggacatacatacacccttaagtaacccatcacactacaaatggagtagactgcagtggctgtgacatgtcacacactgagttggggaagatgaggtgactgtgacctatgttgtcacctcatttaatcctgacacgaccccatgagtagtcattacagatcttttttttttttttggagacagagtctcactctgtcacccaggctggagtgcagtggcgcgatctcagctcactgcaacctctgcctcccaggttcaagcgcaaatcctattttatactcaaggaaagagaagctcaggatgctgaattaaattgcctacagccatacagctagttaagggacagagctaatcccaaccaaggtccctttgactctgaaccctctgagaatgtgcagtccctgtgatcctttttttgcataaatggcaacaaagtagtccagtccaaacagcctccctgctcattcatgaaagctggagtgatggtttgtgcttggagagtgctcaagtagagaagagagacctgtcccctccctgcccttggtgttggcaaagggagcagggaggacacagagggaggcagacgccagctcctttccttgtggctctctccaggtaactggcagcctggaggaggtggcggcttaatgggcctagcccacgaagagaacttggacttgaaggtttaaacagcaacctctcaccaataatgaaagattaggagtggggaagccgtatacaaaaatagcacttaatagttaactggaaaacaatatatttttgcaaccactggttcctcgagaaataattgggtcccaaggcaggaaatgactcgttttcatgaatgattatattgatcattggtgcaaaacagatacacccccttaggaaagcagttctgtctggctagtcaggcggccccagtgtgaaatcctgagaggcggcaaggggaggaggacaggggctgcaagccgagggagccaggtcctggcctggcacacgcaggggcgggtctgttgaatgggggatgagaaggaacagaatttgcctccaacataagtcctgagctgtcccaagggaagaaggtgacagagtgagaccctgtctcaaagaagaaaaaaaaagtcacatgaacagaaatgaaagtccaaagcatgacgagtccaaaggagggaaagtaaagggagtggtgagagatggcaggggcatcatttgggttgggggattggatgaggctcctccaaggggatgtgacttgctcccatgctgcttcaggtcctgggtcagacaatgatgtgcctgtcactcttttttttttaagtcaggtcttattctgcacccaggctggagtgcagtggtacagtcatggctcactgcagcctccaactcctgggctcaagcagtcctcccatctcagcctctcaagtagctgagactacagacatatgccatcatgcccagctatttttttttttttaagagacaggatctcgctttgttgcccaggctggcctctaactcctgggctcaagtgatcctcccaccttggcctcccaaagtgctgcgattgcaggcgtgagccaccatgcatggccccccattgctcttgatacccttacccacttaccaccaccacacttactggtactgtgagtttattgttttacccctcccctgctccccccaccaccccttctcgtgcctggtgtctgattggttgacacagtcagtacagggtgactgaagagtagttagccctgaggtgagtctggcagagagaacaccagcacagaggctttggggtcgaaaagagcccgcatgtggctgggcacagtggctcacgcctgtaatcccagcactttgggaggctgaggcaggcagatcacgaggtcaggagattgagaccatcctggctaacatggtgaaaccccgtctctactaaaaatacaaaaaattagccgggcatgatggcaggcgcctgtagcctcagctgcttgggaggctgaggcagcagaatggcgtgaacccgggaggcggagttgcagtgagccgagatcgcaccactgcactccagcctgggcgacagagccagactccgtctcaaaaaaaaaaaaagagcccgcatgttcagggacagaaggaagatcagtgtgacaggcaccaggcatcgtggacagggagtgactgagggagtcacacagggcctggagacctctgtgaagggccaggaggaggcgggagaaggcagtgaaggttttagatgggagtgacatgatcagatgactcctttaagccatgaccctggctaccttggggagaagccaggccgggacgagggggtcaggtcatgaggctactggagtggtcagggcacaggtgctggtggcttaggctaacagagtgggcctagtgggattagaacttggccagacctcccagagcagtagggctttatttagcccattaatttttccctaagagaaacactgccagaggagattctaagacagaccattctctgaatgtatttattcttcttggggctactgggcccaagaagtaaaaactgagaggcaatttggagacacccgatgcaaaagagcccaccacttgtggagcacartagaatctgatcgtcatttcacaggccttagagcttcactgcagagttggagcgcaggcaccagctctaacccaaactccttgcccttttctttgcaccctgctgcctttcactgacatggagaatgagggaaagaaaggatggggtgtggcttccctgggatcagaggcttgcttttctttctggctcctccttggctgatgaatcccatacctgggattggtcccagaatccagcttccatttctcctgcacagtgcattggctccttctctgttactgtggacttggtgttgtccttccgcctccagccaagccagttctgtgaacagcttttggtgttgaggaggaagattcccaggccrccaacagtaatgtcatcccttggtttgccaggggagctttttttttttttttttttgagatggagtcttgctcttgttgcccaggctggagtgcaatggcacaatctaggctcaccgcaacctccgcctcccgggttcaagcaattctcctgcctcagtctcccgagtagctgggattacaggcatgcgccaccatgcctggctaattttgtatttttagtagaaatggcgtttctccatgttggtcaggctggtctcgaactcctgacctcaggtgatcctcccgccttggcctcccaaagtgctgggattacaggcatgagccaccacacccgrcctttttttttttgagatggagtctcactttgttgcccaagctggagtccagagtggcatgatctctgctcactgcaacctccgcttcccagattcaagcaattctcctgcctcagccttccgaataggtgggattacaggcatgcaccaccacgcccagctaatttttgtatttttagtagagatggggtttcgccatgttggccaggctggtctcgaactcctggcctcaagtgatccgcccaccttggccttacagccactgcgcctggccccaggggagcatttattcaccactcccaggagagctctgaaccactgaaggggaggaagaaatcaccagtgtgactctcagcctccctggggagctgcaccgttcttggcactgaaactccagcccctctcactcacaagtgtggggactgaggctcagaggagggaaggcacccggggctcagctgtttcttgtatggagtccttaccaccctgggccaggctggagagaagacttcctgcagtcacatgggtagttttatcacagaattcagagaccaggacccaggactttccacttccagtccacagcctttcattttagccatggttctgggcctagctgattcagattcagtgggctggggtagatggagcctgggtgtctgtaccttttgtaagtttcgcagtaaattcagattatagccaggtttagcacttgctgtgaggaatgtactgcctctgtgtaagcggcagtggaatgtgggaagccagatcggattctggagaatgatgacttgaccagagcagaaagagggtcatgaacacaggtgatcaaaggtggtcgtttgttcatgtgggcctgacagggagctgctggcaggtctaggtgtgacttggaggccgctgggtacctaagcctctatttcctccttgctgagctttgggagcaccgtgggctgcaacttcctccctggcagatcccagtagatctgtgcgcagccaagtgagtgggaaggcactcatacagcaggcccagggccagcaccacctgaccattcctgcttacctgtcagcgctctgttctcagatgttttcatctggtactatctagctctccagttttcccaaggggcaagacttgtgttttcctctggttacccaagagrtccctggcaccgttcctgcagagcacagagatgctcagtggatggtcagtgaaggaatgagctacagaggggcttgttggacaggaacagctgttatttgtcaaggcccttttaagttggggacccggagcctccctgggcgtgtgctcctttgtccgcttggccttcctgatggaggccaagcagctgttggtctgtttccacagacactcggtcaaggcactgagaagggaggatactcattaggtaacccgggaggctggaatttccatctgtgctctggccattgtccacacaccccctcagcccccattctgcaggaagaaaacagtatgataatcaagaaattatttctctttggctctgaatcgatttgcctacaaacagattcatcttccttactttgtctcattagtctaaaggtaaattaatttttcattccttgagtacattaaaggcaggggtctagactaggggttaggagccctgaactgcatccagcctttgataatagctgctggtgggaagtcccctcccttctctggtcctcagtctccactgctgtaaaagaagagttagaatttatcctgagcgctgttacacatcagaactgcctgggtgggcagatcacctgaggtcaggagtttgagccagcctggccaacatggtgaaacctcgtctctactaaaaatacaaaaaaatcagccaggcmtggtggtgcatrcctgtaatccyagctactcgggaggctgaggcaggacaatctcttgaacccaggaggcagagattgcagtgggcccagattgcaccgctgcacgccaccctgggggacagagagagactcttgtctcaagaaaagaaaagaaaagaaaaaaaggccaggcatggtggctcacgcctgtaatcccagcactttgggaggccgaggtgggtggatcacctgaagtcaggagtttgagaccagcctgaccaacatggtgaaaccccatctctactaaaaatacaaaaaaattagccaggcatggtggtgggcacctgtaatcccagctattcgggagtttgaggcaggagaatggcgtgaacccgggaggcagagcttgcagtgagccgagatcacaccactgcactccagcctgggcaacagagtgagactctgtctcaaaaaaaaaaaaaaaaagctcttgaagcttggcgtggtggtttacgcctgtaatcccagtactttgggaggctgaggtgggtggatcacctgaggtcaggagttcgagaccagccatggccaacctggcaaaaccccatgtctactaaaaatacaaaaattagctgggcatggtgacggctgcatgtaatcccaactacttgggagtctkaggcaggagaatcgcttgaaccwgagaggcggaggttgcagtgagctgagatgcgccattgcactccagcctgggcaacgacaagagtgaaattccatctaaaaaaaaaaaaattctttctagattttctatttcaaagcttcagctgagtggctgacattttgtttgtttgttttgtttgtttgtttttacaactgaaccctgtcctttttgtgacctagagggagatcaccagcctcagagagatggaggagaaattattattttttttaatagagagagagccttgctgtattgcccaggctggcctcgaactcctggtctcaagcaatcctcctgcctcaacctcccaaagcactgggattacaggcgtgaacaccgtgcgtggcctagaaatgattgttaaatagttgattaatgtagctaggtctctccatttggatgatgactccgtggtggatagtttcctctctccacctctggctttccggggtgagaatgagcagtggcagatttcaatttctaggttggtcccctgctgccccaagccaggcaccaactcagccacatccaagcagctgcctcccctgtcatttggtgtgtcctcacgggaggcaaactcatttcagtgtaagctcaagcaaagtgtaattaggacagtaaatctgctgcttaacggcaacaaaaaaagtcctatggcagattttacagtcctggagaagtgatttgaggctgaaggaagggtgggagagacctggcctttgatttaattgcttccagcctgggaacaaagtccaagacatggtaacctcatttactccagaaaatgcaccatgactccttaaaagtttatggtgtgatagtctgaggttggaggaatagggacatgatttcatgaaagtctttttttttttcctttctatgccttgcagtggaactgtaactcctacttttcaccctgtatcactatcctcacttccatttttgggatatttaccatttatcaagcaacataccatggactgcagatgcattttctttttctttttttttttctctgagacggagtctcgctctgtcacccaggctggggtgcaggggcgcaatctccgctcactgcaacctccgcctcctgggttcaagcgattctcctgcctcagcctcccgagtagctgggactgcaggcgcccgccaccaggcctggctaattttttgtatttttagtagagacggggttttaccatgttagccaggatggtctcgatctcctcacctcatgatctgcctgcctcggcctcccaaagtgctgggattacaggcgtgagccactacgcccagccaaggcagtcttatgatcctaaacctcattttatggatgagaaaactgaggttcagggaggcaagcggcttgcccggggttgcagcacatgtgagtggaggagctgggtgtgaagaagccatgccccaacctttgtgccgtgctgccgctgcttggtctgaggacgccacaaaccacgacgccagctcaaagtcacaccaccagcatcgcccagcctcctggcctttccctcacattccttcttggcaagagtggtacttttctaaacctcggccttagtggctgccgagccactgcttgcggctcagttccccatctgggccaagaggattgtgcgtctccatctatatcagctacccaggcagtcctagtgctggcgttcaaggggaagtgatccatgggaccttctgtggggaggaggccttggggcaaaagagggcccaggcacctggactctatttgtggtctcttttgcatcttccgtggatggctgcaggcaggccatttctttcctttgagcctcagtctcctagactagaaagtaaaggccagggggaccagtgggcatctgaagagtgctgtgggtctaccacagagagacaggtgtctccttcctctaggaagttggcctccaaggggatcctgcctcgtccaggaagcatgctgcctaacagcacctgaccttgccctgcctgttcagcttttgattgctgaatttatagtgttcgtttgctttttttttttttttttttttttagaaggaatctggttctgtcacccacggctgcagtgcagtggtgggatctcagcttaccgcaacctccacctcccaggttcaagcgatcctcctgccacagccttctgagtaactggaattctaggtgcacgccaccacgcccagctaatttttgtatttttagtagagatggggttccaccatgttggccaggctggtctcaaactcctgacctcaggtgatccacccaccttggcctcccaaagtgctgggattacaggtgtgagccaccactcctggccacatttgccttctttgcgagtgtttttaaaatactggaggcctttcctggagggtttctcctctccagatggccccagagcaccccaagctcaggacatgtccctccccagccaagctgtctccctttacttcctttgcctcctctctcccaattattttggcccaaactgatcagtcccgctggcctctcccaagcaggtccttctggcactcctctggtggaccgcccccatcrgccacacttgccctgctctccagtgattctgtagctcctggctccgtagtctcgcggacagctctctttcctggaagatgtttctggtgggcctgacagggggcattgcctcaggcaagagctcagtgatccaggtgttccagcagctgggctgtgcggtgattgacgtggacgtgatggcccggcacggtgagttggaggggcaggttggggggccgtgcacagcagctccccacgcttccggccttctgccatgcctcctttttttataagtctcagaggaggggaaggctcctgttgaccctggtctgacttctgtctctgccccgtgcttgccttctctgctcttctattttctgtttttagaaaccccccagctgtaccccattaccagcacaagggatcctgtacactctgctcttttccttcactgctttctctaccctcattttgcttttgctccacctgaaagaagcacccgagttcccccatcattttgcccctggtcactgaggtcctctgactggccctgaggcttcagggagtgacccagcttcttcctcctgccacagtcgtgcagccaggataccctgcccaccggcgcatcgtagaggtcttcggcactgaggtcttgctggagaatggcgacataaatcgcaaggtcctgggggacctgatctttaaccagcctgaccggcggcagctgctcaacgccatcacccaccccgagattcgcaaggagatgatgaaggagacgttcaagtacttcctccggggtaagtgccagggcctggggcggggggcggggcctccttccagggccagggcccttctcctctgcagaaagtttggccagggtaggggagctggttatcccagctgatgagttcatactgcttactggcatcccctccacacagagccccgtaccagccccagaggaaagaagcacgttccctcagctcttaaggaggctgacagtttaatgagaagagacacatgaggctttcgagccatgagcccaggaagtaagttggtttttctagtagggatgggagtaataagagctggtgaataatggagccatagatctgagttcaaatcccaaccctgactttctagctgtgtgacttcattgagtgatctcgccctcagctcattttttcatctgtgcagyggggataataatccaacatgaggctgggcacagtggctcatgcctgtaatcccagcactttgggaggccgaggcaggcagatcacttgaggtcaggagtttgagaccagcctggccaacatggtgaaaccccgtccctactaaaaatacaaaaattagctgggcatggtggtgtgcacctgtaatcccagctactcgggaggctgagacgggagaatcgctttaacctgggaggtggaggttgcagtgaaccgagattgcaccctatactcagactgtctgggcaacagagcaagactccgtctcaaaaaaaagaaaaaatccaacgtgagcatgttaggaagactgagggtccaggtcagtgactgtcagttaatcacacatgtaaactgcagtcaggggcaggtttggttctggctgagccatttgggaaagcaagtttgtagactggaaattgggaagggaccaagatggccagggtgggtaggggaaggggagtatttgaaatcagaggcctggggccagttggcaagaaccttcttccaagctatatgccatggttcaagccctgttcttttttattttattttattttnnnnnnnnnnnnnnnnnnnnnnnnnnnnnnnnnnnnnnnnnnnnnnnnnnnnnnnnnnnnnnnnnnnnnnnnnnnnnnnnnnnnnnnnnnnnnnnnnnnnnnnnnnnnnnnnnnnnnnnnnnnnnnnnnnnnnnnnnnnnnnnnnnnnnnnnnnnnnnnnnnnnnnnnnnnnnnnntgctgggatataggcatgagccaccacacctggcctaagccatgttcttcaggacagcattgcacaggggtggcctgatgcttactttacaggttggggtcagtcaccagaagtgggagggagaacagagggcggtggcttgggatctggcaagaggctggcctagggctgctggagatttgcatgccagcctttggcacatgtggcctccagcctgggcctccgagttgaaggcctggttgcctgtcaccccactctcagtcactacactgagactctccttccacgagggtataggggagcctttttttttttttgagatggagtctcgctctgtcaccaggctggagtgcagtggagcgatctcggctcactgcaacctcccttcccgggttcaagcgattcttctgccctcagcctcccgagtagctgggactacaggaacatgccaccaaacctggctaacttttgtatttttagtagagatcgggtttcactatattggccaggctggtctcaaactcctgacctcatgatatgcctgcctcgccctcccaaagtgctgggaatacaagcgtgagccactgtgcctggctgggggagccttttacactgtgaccatggccaagccccttattctgtcatgccttgagtgagcaacctccccccaccctcatccccctgtggccaatacctccctccaaaagagggatgactcgacagacatccatgatgctgaccccaaccccctcccgtccgggctggagctggctcccgcatcttctctgctgaaccagcgtgtgcgctccatctcagcaccatgccgcaggcctcctccctgcctccctcaagaagagtcctccctctggactctttgtgctgcctcctatgttgtgccagtgtccttcccgtcccccacccagagtgaagtcatctgcctttcattcctgccctttctgcattctctcccatgccagttactggtatatctgcagggcttcgaggcggcagtggctctccccttctgaaattaaacatcggataatgtcaccagctccaaagctctttcactgtgtcatccacccagcctcccgcctccccaaccaccaccacttaaataaaagccagagagcccttttgagctcgataaggtgaaaaatgaggacgacagctgtggcttccacagtcccagtttttccctgatgagtataacaaatacaactgtcaaagttggtataatcaaacgtcagataagatcaccagctgttggggacttctctgtgtaggcagacggatgtcttaatagagtcaggatggtttgcagagcttatcagacaggagggatgtgacagctgaatagccctttgctggtgaaccaaatagctgaccacgtactccccagaggggccggagaaaggacagcaaggggagaggaagtgatgggagctgaacaggaaagggagataagaggcccggagaggatctagtcttggcttctgctccaagttagggaggcgcaccacactgttggcctccccctgcaacagtaactatcattttggggcacstagcgagggactggtgaaggagtagtactgcatggttcacatattttcaaggctcatttcatctttaccatcatcctgtgaagtaggtattctttttactcatttacacagatgaggtttacacaaaagggggcccaaggtcacatggtggggaaggtgggggggctaccaaccaaggtgtgtcatcagagcctatggttttaacccccttgttcaactgtgggcttctcttgggcttcctgagcagcaggtcttggggaacaggaaaccaagcagctgagattgccacccccccaccgccattgtccctgcatcactttgagtgcaagtttcccgtgacacccttggaattggtgtgatgtgtgtctggttctgtgcttggaagtgtttggagtgggatgctccaggggtgcagtctcctgccccagccaggccaggggtctctgggcagagaagcattttcctatctcttacccttcttgctctcctggagccctcccagctttgtacacatgcacaggggtcactgacctaaaaagaacgaggagcgtgtagcccacagcagcctacggatgtgctcactcacagtgggtgggggtgctgcccttgactggccttggcttgtggtgggaggtccagccagtgccttttacactgcaggagtgtaatacagttttaggcataactgcccgctctgactccagatccaggccttaccctggctgtaggtctgcctctgatgggagaagcagcttctttctgctgctgccgccccaacgtgagcctctcatggagagttggtagagacagcccaccttggctcttgtcagcagggctgggcctgcacctggctctttggggagaacctatcttttgggtgttttgtttgtttgtttgtttgtttctgagaaataacaacttgagatttaagatcaaggtgaactaaacccttagtgcctgccctgatcacctccttgcctcacacggcctgaggcctctgcttcagcccgcacagtagagcctccctctccctgtgctgtggtggttctcattcgtggaatcctcaccttcaccttctcattttcaagtatcaaaagacctgccccccacttttcaaggccagcacaagtgccagcccttctacaaggtcttccctgatcagctatccagaaataattttctgcagccttctgttctgcacggcattggaaccrgccagtgtgcagggtatgtgtgtccttggaaggcctgcccctctgctgggcgctctggacggtggggcccrgcatatcatcagtcctcagtgtgcrcttgcagaattgaacttgggggatttccaacctctccccaggataccgctacgtgattctggatatccccctgctgtttgagaccaagaagttgctcaagtacatgaagcacaccgtggtagtatactggtgagtgtgtagcatgccctggctggaagggaggaccatgggggtatctgggaaacagcccacatcattttgcactttgccctttccccacggggcggccaagaggcatgkgggtttgggcagcagtgctcagggtctgtagaaaccaacctttgtgcctgacgcggatagtcctgggggcaggtgtgggaagggacagcccgcgggcttctctagtgtttggggagcgctcccccgctgaccattgcaggcacttcagcccagatgcctggcctcgccctgggccactgttactcagtggctccttcttcctcctgtagcacctttattactttgcacagtttacctctcagtgggaggtggtcaggacaggtgttgatattcctattactgaagataaaattaaagagggggcagttacagaatgtgtccagggtcaccctttggcaacacctgttacgaacagaaggtttcgtggaagggactgtcagcccagctaaggaaggcactttgttctcagaattccccaggacacggagccaaccagaatccaggtttgacaaacaggaggatcaacctgtggggggaaaatgagtccctgtcccagtggggtgaragtagatgagtccgcagggtatctctgctacccagaagcttcccggatgccacccacaagtacagcagacacataggtgggcacttggctctgctggtattttgggcataggttggccctcaagggcctaaggcattggaggctcccagcacgctggaggcggagcctgtggtgctcagtgccctgaaaatccccctgcctttccccctgggtccccatgggctgtcgttgaaagcccagtctgaatcccttgagcccaatgcagggacgcaggcatcctctcagctcctgcactgggccgtgctgccttatgtgagtaaacctgcagcctctttgggttcttcattccctgtttgagaggctaactaaggtcaggcaaaccccacgaagacctggaattctctttgccttagtagcacgattggagctttgtatttagggataaaaacattttttttaaaggatcttagaggccgggtgcagtggctcacgcctgtaatcccagcactttgggaggccgaggtgggtggattacctgaggtcaggagttcgagaccagcctggccaacatggtgaaaccccatctctactaaaaatataaaaactagcccggtgttgtggcgggcacctgtaatctcagccgcttgggaggctgaggccagagaatcgcttgaacccaggaggtggaagttgcagtgagcagagattgcaccattgcactccagcctgggcgacaagagtgagcaaaactccatctcaaaaaaaaggctgggtgcagtggctcatgcctataatcccagcactttgggaggccgaggcaggtggatcacctgaggtcaggagttcgagagcggcatgaccaacatggagaaaccccatctctactaaaaatacaaaaattagccaggcatggtggtgcatgcctgtaatcccagctacttgggaggctgaggcaggataatcacttgaacnnnnnnnnnnnnnnnnnnnnnnnnnnnnnnnnnnnnnnnnnnnnnnnnnnnnnnnnnnnnnnnnnnnnnnnnnnnnnnnnnnnnnnnnnnnnnnnnnnnnnnnnnnnnnnnnnnnnnnnnnnnnnnnnnnnnnnnnnnnnnnnnnnnnnnnnnnnnnnnnnnnnnnnnnnnnnnnnnnnnnnnnnnnnnnnnnnnnnnnnnnnnnnnnnnnnnnnnnnnnnnnnnnnnnnnnnnnnnnnnnnnnnnnnnnnnnnnnnnnnnnnnnnnnnnnnnnnnnnnnnnnnnnnnnnnnnnnnnnnnnnnnnnnnnnnnnnnnnnnnnnnnnnnnnnnnnnnnnnnnnnnnnnnnnnnnnnnnnnnnnnnnnnnnnnnnnnnnnnnnnnnnnnnnnnnnnnnnnnnnnnnnnnnnnnnnnnnnnnnnnnnnnnnnnnnnnnnnnnnnnnnnnnnnnnnnnnnnnnnnnnnnnnnnnnnnnnnnnnnnnnnnnnnnnnnnnnnnnnnnnnnnnnnnnnnnnnnnnnnnnnnnnnnnnnnnnnnnnnnnnnnnnnnnnnnnnnnnnnnnnnnnnnnnnnnnnnnnnnnnnnnnnnnnnnnnnnnnnnnnnnnnnnnnnnnnnnnnnnnnnnnnnnnnnnnnnnnnnnnnnnnnnnnnnnnnnnnnnnnnnnnnnnnnnnnnnnnnnnnnnnnnnnnnnnnnnnngcgctccccagaccctttaagcccccattcacccggcagagagcctttgccagagtcctgggtgccactcatgccctgctttcagtgggtgtgggtgtataactcttgagatgttggtgagaggttgtgctggttttcttcaaagggatctaggctttacaaaaataaggactcccttgtggatttctttaactgaaagactacccctggtgcatttgaaattacttaggacatctcctgaagtgtgattataccaaaacatgatttcatgctggtttcttttttttgagacagggctcaggctagagtgcagtggcacaatcacagctaactatagcctcaaactcctgggctcaagcagtcttccacctcagcctcttgagtagctgggattgcaggcatgcagcatcacatctgactaatttttttattttttgtagagattgggtcttgctgtgtggcccaggctggtctcaagctcctgggctcaatgatcctcctcctcggcctactaaagtgctgggattataggcatgagccactgtgcccagccaatttcatgtttttgaaaaatttgtcaattgtggaataagtgggtaaaaatcctattacaacaaattgtaccaagtcttagactaactagaataggaccatttctgagccccaggaagggctgtcggaggtgctgccccacatccaggaggctctgtggtctgggccacaccttcaggaggatgtgcacctactgggagccccaggccatctctaatctcacactagattctcccacccacagatatgtggtctccctgatgaaggctggatttagtccttgttctcagcgaggtgggtattggccccacaatggccacagtacactgaccccgtaacagaggaaatctatagctcgtataattcattttcatggcaagtggctgcatttgtttttggcctcacttggtctgcttcccagaatccctaagaagggaccaaactgccaaggtgggaggatcacttaagcccaggagtttgagaccagtgtaggcaacacagcaagacctcgtctctatatttatttaaaaataaaaaagccaggcgcggtggctcacacctgtaatccagcactttgggaggccgaggcaggcagatcacaaggtcaggagatcgagaccatcctggctaacatggtgaaaccccatctctactaaaaatcaaaaaattagccaggtgtggtggcgggcgcctatagtcccagttactcgggaggctgaggcaggagaatggcgtgaacctgggaggcggaggttgcagtgagccgagatcgcaccactgcgctccagcctaggtgaaagagcaagactccatctcaaaaaaagaaaaaaaaaaaaaaaaaaagtccaggcgcggtggcttatgcctgtaatcccagcactttgggaggccaaggcrggtggatcacctgaggtcaggagttcaagaccagcctggccaacatggtgaaatcccgtctctactaaaaatacaaaaattagctgggcatggtgttgcacgcctgtaatcccagctacttgggaggctgaggcaggaagacctcttgatcccaagagacagaggctacagtgagcagagattgtgccactgcactccagcctgggcaagcgagactccgtctcaaaaaaaaaaaaaatacaaaaattagctgagcttagtggcgcatgccagtaatcccagctactcaggaggctgaggcaggagaatcatttgaacctggaggatagaggttgcagtgagccaagatcacgccactgcactccagcctgggcgacagagtgagactgtctcaggaaaaaaaaaaaaaaaaaaaaaagaaggaaccaaaatgtagtgatcaaacccttccattttataactgggaaaactcaggcctcgtgacaaggcagaaagaccccaaatggtagaaaacagctgctgcaaccccttgtgctcttgtcctcactgaggggctgaagtagctcttagagctagaggggtgttagaggtaaccccgctccagaggactgactgtagcccaaggcaagagagggagtttcctgaggaaggacccagatggtgacctcagggtgggtgaaggaggtattctttgaatttctcttggagttgggagacttgatattgtccgacctaatctgcagtgctgaatcctgtcccacaactaagggggaccaattctcatgtccttgatcctctttgaagcaccttgggcttgtctgtcccacatcatcagtggcattaagcacaagagataccatcttagcacaatccttttactctaaatgttcaggggaggggtatagcagcaaggagagggggtctctgtgatggcccaaggagrtatttttgatactgaagacccaggcccccaggggaactgcaggaagcgtctagctcataggcataggcctttcagtaaaggtcacccatccagggatccaggatgtagctggttccaggtgatgaaatcttcccaccttatgactggggaatgtcaggtctagtagcaaagcaaagagaccccagatggcaaaaaaaaaaaaaaaaaaaaagagctgtggccaaagttccccccttgtttgtattaaggggcttccgtagcccatagagctctgggttcctcacagtgagtggagtggggtgkgaggcagccagtgagcttccaagcctccctccctggctgtgggaccctaagtagcccagagcagggtagggttggagggaagatccagtccccatgctctctgtttcaggctgggcctggcagggctgcctatccctgtaacttggggtgagagggaggcaggacctacagtgcccttttgccctatccttagcgaccgggacacacagctggcacggctgatgcggcggaacagcctgaaccgcaaggacgcagaggcccgcatcaatgcccagctgcccctgacagacaaggcccgcatggcccgccatgtcctagacaactcgggcgagtggagtgtcaccaaacgccaggtcatcctcttgcacactgagctggagcgctccctggagtacctgccgctgaggtttggggtcctcacagggctcgctgccattgccagcctcctctacctgctcacccactaccttctgccttacgcctagtggggcactcaaggcagggagccccaggcctccatctatctccttggaggctgaagccaggtaacacatcctgtttcctctcagccccctccacacacacacacacacacacacacacacacacacacacacacacggactctccgaatcagggctgggcctctgtgccaggccatcccgtctttggagtgtatcctatttgaggtcaagaaatagcctgctgtccttcccaccttccctgagcagcacctacagaacagcaaccgtgatggtgtgtgaaagcaacagtcagagactgctatacatttctgtgggtgggggtagggaatactggctctgtggccctcctcagagctgggaggccaagggttcactgggcttgaatcctctctaagcacctaccccattrtggcctaaacctcctcagtggaccacgggaaatcatgttggaccaagggtttccatgttcaaacagtcaacaaggccctcccctaggttgagatatttttkatactgaaggcccaggccccccagtatggcttgctgccagcaagcagcaaggattctctcgtgggtaacgctgtagccaggcaggaccagcctcttctgggagacccctctccccacgtagggtttgtgtagtgctcccacatcctgcttattgcctgccacccctgcttctcgcctggacctcttggtattccgtgtacaccatccttgctgtttcttgcctctgtgccttcaacctgctgctcctggcctgggataccttttattttcttttatttcttcttccctttttttttttttttttttttttaacctacaactagctctcagttcaggcactgtctaaagccccaggctgggttaggtggtctaggataccaactccccctcaacattttaccttaatccaacagtacagtaattagccgaaacttgcctggtttttcctackagactgtaagccctctagggacagggacagtgtcttattcatctctgtgttcttagtgcagagcctggcccgctgttggtgtttaataaagtgtgttgatctgaaatgccccagaccaaccaagattcccagacttggcttcttcccacactgggctggagtcctcccggagctcagggggaggtgagggccccagaaggtgcacttgccatcaggcttctccctgggtcccaggaggactgcagccaggcccgaggcacctttstgggaggtgggtagagggctgaggcagcgtcacaccttcttgccccgcctccccatctgccttccccaacccaattagaccagcgcagacataagccttccctgccagggcctgcagacttgctgatgtgttgatcctgcagccagaagcctattaaggctagaaatgagtgtgacggatgcaaatgctgtggtggccatacttagtgccccctttcccagagccgcttgtgctgagtctagctcattaacttgctgcaaacccctaaggggcaaagaagggccgggtaaggcagtggtgggctgccaggtgggtggccaggcaggatgagggtggcaggagcctgccacttcctcggtttggtgcgatccgccaggacggagaaaggagagggaaggtatggacccccacagtgccctatcaccccaataattgaggaaatggcacttcctagtatcggcagcatgccaggcactgctggatgtgtaagaccctatagttaacataacactgattatttccatcccaggctcagaaagatggatttggtccaggttgcagagccaggcttctgaactctctcctgtgccctgagcctcttgtcaggaggagctggagcctggggttgggccttgggctcgcattccggctccgcttgccatgtgacctcctgcctttagtttctactcatacatcgttaggcttcatagtggaggacactgaaaacccttagcaaactgtaaagttccagagaattaaccttccctgacccagtgagctgggtttgaagcaggaatgtcagagcatggcaggtgtggagaaacctcgaattcagccctgccctgcccgggcctcgccagagctccctctccagctcctcttgcctccctgccccaggatccccttcccggccttgggggtccaaggcggccttaaaagaaggactactttctccgaaggggacttgaagttgaggccgctcagcaactgcagaggtcgggcctccgggacccaggcccgcgcccgagccggcggcctgccgttcggccggcaggtggcagcaccctcccgggctgggccgggcctccgcggcgggcgctcgccgagcggcctaatcttcctcctcccaggccgcgggcggcctcagactcctgccgagcagctgccgcgggagcacgggccaggtgggcgcggaggctctgcctgaccctgagcgctaactcaaaaggtgcgttgttcgcccacgtcctctgagcctgggctgcgggccctgggtgccaaagggcgtgtcccctgcccacccaccgcgacggcgacgggaccctgcagcctccgcgttccgttccctcactttgggccttagcacccggagcggagcaataagacaccagcgagggtgaagacgcacacgccttctgggcgggggacgaagggcgcaggcaggcctctaaaacacccccacccccaggcccgactggcccgaaggtcattcgcagtttcacagtttacaaagcacgttccagttatccccttgaaatctcccagctgtgtgaggcagacaggtccagaattttacagaggctcagaggttgagccaaggggcctaagtagccaacaggtataaccaccaagcttcttgactcccagtacagtgctcctccggctatctgcactgcccccattatacactttggctctttagtaattgacaactcttcttcaaatgttcattctctctctctcctcatggggggcagggcagaggcagggaaaggtttaggaccttccatgatgagcctccatggctagaaattgaatgggagcaggataggcgcgctgctgagcgcccctagttctcaccaaggcactttaggtcagaaggaaacagtctcagagcaggagggggaatgcgatggcagtgatgacttcaggccatggggtcatataggagtgggcagggagacccccggacatggtgggagagaaggagcaaaaggaaggaggtgatgtggtgctataggttgctttcctgctccttccaggagagacgtggctggtggttcctcatcccacctgcagagctgaggctgcacccagctgggacccaaaccgcctctctttgctccccaccttcccctccgctcccagtcacttagattccaatacaatttccagctaaccagcatgtcgatagaacaagtcgggcggccggattgctggccaattacaggaaatcattctgctccacagctcagcgctcaggaagggagagggagggagggaattcaagggagcaggcgcccagcttacaggctgggaacgggcttcaggcagaaggctgggagtgctgcagccccccacccctgaggggtggggggtgggggaggctcctaggggcaggccagccctaggctcatcctcagcctcatgcggagctctggatccaacttctgtgtgatggggagattggtgccccaagccactaagagagacagagctgggagttgagtgtggttgagggtccggcaagcgaggcatcttagtgtcaaaagggatagaagccgagatagcaggaccaccctctcccagagccctatgcaccaaggagtgggcatctgagggcctggaggctagggtccacacaagcaagacctgtgctctaacagcccgctgtgggccacggggtacctaggaggacaggggaaggggtcgacagggagcgggaaggaaaggggccacagcccacagctgagtgaactagcagcagcctcatctggtgaaggagtaagtcttccaccctggaaggtggggcacagaaatgtgggaaaggccaagggccccctccctcaccttcctagctcctctgcctcagctcctgcctctggccctcaagaaaatttcactcagatgaaaggaccccagctcccctcctctttccttggatctgaatctacctctgccttctatgccgacctggatgcctctttgccagccccacctcctcccatcacatctctcccagaactgttcctgtgccccaggctgccctacccggctgaccagagatgctctgcctgtcgcacagtggtgagctcttcttcccagcccttcccctctaccctcaaaggactggaagattcttgaggaagagaaacttccctgtgggctaacttcacccagtgaatgactattgttgctgtttgtcttgaaccccaaaaaaggcaactgtgacccaatgatctcctcctctgctccaagctgtggccacctcccaggacccctctccaaacccccaggatctcactactcttctcccaattccaagccctccccttcagacccctccaaggttgggtcctgggatggattcactggcagctcttttgccaacccaagagtaaaggggtggacagacatggaagaggagactggctttggagcccagtgcacccagcacccagtggcgctcaggaaagacctgagtgattgcaccgaacaacaaggtcatcttcaaagtttgtttggagaggtgcatagggagaacagggtcagcgccccgcgacgtctccttccccgggttttctagcctagtacacaggctcacactccgcggtggaggtgttggggttggccctgtgtgtgacccccgcttggcacacggtggccacccctccgctcagctgagctgagctaaagccgcggctcccgggctcctagcaccgcctccgccatcccaccctcgggcgctgcctcccgcgggccgggcgcccggtgctcggcgatccggaagagggcgcccgcccggcccacgtccgccgtgtccccgcccggcgcgccgcgctcgccagcccgcgggctccgcgccatcgatcgggccgcagggacccgggtgagccgcctccccacccctcgcttttcgcttttaattgaagtttgtttgagcagagcgcggagcgggcaaaggcagaaaccaaatatttagttgctgcaaattggcacctccagatcaattacccggccagtgtcagggccctcgccgccccccgcgccccgcagaatctcaatgccacgctgcccccgcccgggccgcccgcgccgccctcgccgccctcgccgccctcctccattacactgcacgtttttcatcagctccagccagacatcacccgtggccgcgagggaacagattttcaatgggaaaagttccccgggagggtccttgttgctgattcccgccgcgccctgcgctgtctggcccctgcccccacctggcttgtctgacggagacagcagatgggtggagcgagctcaaagcaaggacttggggtcaggaagaccaggccccgtcataggaactccccttacccgctgggtgaccttggggaagttacttatgctccctgagcctcggagtcccccataacatgggggctcaaccttcaccttgtggggtcaacagcatggagggacagcaccctgcccagggctggcacacagtgactttccacagatattagttctcaccctgctaggggttaaaacaggctctagaatgaaatgagagacagtgagttcgaggcgactcaaccaagccactgaaaaataccaaagggaaagcagcagacagccagcatccccagagtctctggcaggggctggacaggccccaggaccctggtcaagctccatcagggaaagtcctgacccccagcccaagtgcatctgggcacaaccaaaagagaagccgcttttccagtaccaggggtggagaatgagagagccatgatcccaaggccacagccaggcaaggaggccggagggatctgaaaaaggtcaccaagggctcctgacccttgccaagctgagtaccaggaggccagccttgtggcaggggggaatcaggacagctgggctgtagttgaggctttgccttctcctggctacatgttgctagtcaagtacttaacttcaattttcccatgtgtaaaatgcggctgacaccctctacctcccagagcatttgtgaggagcaaatgaagtatgggagaggggaggaaactcacaaccagcatgaagaagatggggccaagtttgtgtgggagtctcctttcccatgctcaacactgctcccatcccaagagcccctgagggaactggagtcaaatgcctagcctggcatttttaactgtctgctctgccagagtgacagggcctctgggtgggaggagaggttaggggaagactgtgagcctcaggcttagtgctttgagagccctttttaaagaatgaggctcctcctctgccagcactaccccccagctgtcccgcccccagggtctcagtgcaagagtcagccccacctggaggaaagttattttcccatcaaatcctgaatccaggtggaaaggcaaggttgatatggaatccagagcctcagttccctgccaatgggaagcaaactcactccttgattttcccatctgtgaaatgggaccacagccagtaattatgaggtgctatttgaactggtgggtaatctcttttattattatttatttatttatgtatttattttgaggcagagtcttgccctgtcaccaggctggagtgcagtggtgcgatctcggctcactgcaacctctgcctcctgggttcaagcgattcccctgcctcagcctccagaatagctgggactacaggtgtgcgccaccacgcccggctaattttttgtattttagtagaaacggggtttcaccatgttggccaagatagtcttgatctcctgacctcgtgatctgcccgccttgacctcccaaaatgctgggattacaggtgtgagccactgtgcccggccttttattatttttttaatttttttagagacagggtttcactctagcccaaatgagagtgcagcagagccatcatagctcactgtaaccttgaacttctaggcccaggtgactctcccgaatagctaggattacagatgtgcaccaccatgcgtggctaatttttttctttttttttttttttttagagacagggtcttaccatgttgcccaggctggtttcaaactcctggcctcaagtgatgctcccgcctcgacctcccaaaatgctgggatt

SEQ ID NO: 96495 - DNA, 13927 bp, Homo sapiens
ggagtcggaggcaggtggatctcgtgaggtcaggagtttgagaccagtctgaccaagatggtgaaccaccttctctactaaaaatacaaataaaaaattagccgggcattggtggtgtgcacctgtattcccagctactagggcagctgaggcgggaggatcacttgaactcgggaggccgagattgcagtgagccaaggtggcaccactgcattccagcctggtggacagaaactctatctctaaataaaaagaaaaagaaaaaagaaaattcacttcacaggcagtagatagttataaaaggataatttatgggcgatttcataggggagactgatggaaaaaaaggaagtatacattctacagagctgagcagttcactgcaaaaatcaccagaactgcctttttctccaaaaatattacccataagctattctactactggtttttctagtccttccctctattccaaatcctcaaaattgtccttttccttattgggataattttcctctgcccagatctgggtcctccaccacacttaacactgtctgcaagtgtgtgaattcccattggctttgggccatacaggacacctctagacagactatactgagaagccatgcttggaacggtgcatggggagaggacaggagagggaatttacatacctggctctcactcctggttctttttcttattggtcaaaatttaccccacaggcacgaactcccccacacttctagattgcatcatctgcccctttggcagctgtctgggaagccagatcccacactttgaagtgtagtgtttcatacaatccaaaagtggtagcagaggccaggcgtggtgtcacatgcctgtaaccccagcactttgagaggccaaggcgggcggatcatgaggtcagaagttcaagactagcctggcgagcatggtgaaaccccgtctccactaaaaatacaaaaattagccgggcatggtcgcacgtgcctataatctcagctacttgggaggctgaggcaggagaatcacttgaccctgggaggcagagcttgcagcgagctgagatcgcaccatgacacttcagcctgggtgacagagcaagactccatctcaaaaacaaaataaagcaaaacaaacaaaaaatcaaaaaggtggtagcagaaaccagaaagtccaggtatgtagctaattggcctagttgtacagcagcagccaagggtgaaaactaaatactcccaggcaagccctaagttcaccaagtaattggagtacccatctgtgttagttaattgcctttatctgaaggaaaaataaaactcatatttctgtgacaagcaggtgcttacagcttggagcaaggcatctaggctaaactcccctggtgacagggagacagtgacatcatcttcctcgatgttcacatttcaaaaagacggctccaaggccctaaagaaagacatttatagggaccgggcatggtggctcacgtttgtaatcccaacacttttggaggctgaggctggaggatcacttgaggcctggagttcaagttcaagacattcctgggttatagggtggccagaggcttacatatcaaaggaggaatttacaagtacaaattttttcgaggaaatgctctaaggaaagtgaagtctcttcttgcccttttggcaacaggaaaatctcaattttatgtttagttacccttacaatttcccccttttgttattcttttatagcaacactgcaatattctaattatctccactgctgtttctttctctgcctagtttacagccacctagatatccaacaagtccatagtaagatgcaaagcaaagcaattgtcaagataataatagaatgatttttttttcatgacggagttttcatctcattgcccaggctagagtgcaatggcacgatgtcagctcactgcaacctctgtctcctgagttcaagtgattctcctgcctcagcctcccaagtagctgggattacaggcatgagccaccaggcccagctaattttgtatttttttgtggagatggggtttcaccatgttagccaggctggacttcaactcctcaccccaggtgatctgcccacctaggcttcccaaagtgttaggattacagatgtgagccaccatgcccggtctagaatgaatttttaaattcagtataataatcaccttgtcagggggtggggcgatctttaaacacatcatattggttaattgtgtcaaagtcaaaataaattatagagacaaatccctaaatcaaatgctctatttgggaatcacaaaattacaattcagggcatacacacagactagggtggtcttcagtatgtgcaatgaacaaacagaagttggaagttttattagaaagaaaaatgttacatattgtttagaaatgaggctcattggcactggagaagctggttcatttgcacaatcagctttcacattccctcttttgatgaagatctttcatcaaagtgtttcgcactttgaacttggagggcagcaacagggttgcaggtgtaaaataacgggaaggcgggatgcgtggctaaattgctctgcgtgcacaaagagtaggaggtagggaaaagccactggcttcatccagtggccaggactgggagtttacgttgtagcgtttgaaggacggtgggtcggtatgcagacaaacaagctgaaaaataaacggcgatgtgggacacacacaccgggggtgaaggggtatattaagtggtggctaacaggttgctttttctggatgagtagacagtgtcagtgtgttgggagtgtagggggtgtaggctggggccaggtgctgtagggcctccttggccagggagctcatatttcattctggacatatgggaaaccataagaaggatccgatctgtaaagaccagtctgaagcaatctagcattatatagtaacgttaaaaatacacatatattgggctgggtacggtggcgtgcgcctgtaatctcagcactttgggacgccaaggtaggcggatcacctgaggtcaggagttcaagaccagcctggccaacatggtgaaaccccgtctctactaaaaacaccaaaaattagccgggcttggtagcacgcctgtgatcccagctactctggaggctgaggcaggagaatcgcttgaacccgggaggcagaggttgcagtgagccaagatcacaccactgcactccagcctgggcaacacagtgagactccatctcaaaaacaaaaaacaaacaaacaacaacaacaacaaaaggaatggagcttcccagtagacaagacaaagaaagaaagaaagtaaaaaaggaactcacatctgttgctccctgacacatcagcacctcctgggtatacaatttatccactctctcaatgcattaggaggtagaaaatagaaagggctggtcctttagggcccatcaagtgtcgccccttctagcacctaaacgtcatctccaaccaccttgtacacacacacctacacaaaggaggaaatcttttagggttggtgggagttggggggcagaggagccagtgatacagcccctcagaaactatccgagggcccacagtgtgcatgcacaagctatgtgaggctaactttgctgctgcagagcgaggactcccactctctgtcctgggtatcctctaccgtcattccctacaggtgtgacctcctcatacagtaacctaagcagcaggtggctaggtgaaggagagtgagaagctgacaggtggctggtcccaccacagagtctgcatgatatgacattcccacccaaagacaatgagagaagcccccacgtggctggcgagtcatcattacaattgctcttatgatacattttatcaagaccacaaaagccttgccaattgtgagcggtcattttggaccagaagcagcaggtgaggctgacagagcaacagcacagaaggagccaggtctctggtgaccttggagctaccacactagccctggattacctgcctccaaaagaggaatctgcttccctcctcttgaagccactggtgtttgtggtggggttggtgcgtgcagccaaatcaaatcctgagcaatccatcagatgcttctgtgttggccaatgtgagtgtcagtgaacaggagatacatgggactggtgggtgaggggcatgaataatggtgactgaagggcaaattgggagtaaatgagagcaaggagaggcaaagggcaatggaatggaggtgaatgaacaccagagtggagtggatgtgggccaaagtgagggaatgactatgcatgcattcaattatgaatgaatttgagattatgatgagattaagtaaatgatgggaaatgaggcacagtctcagtggaaaaaaggtgaaagtgggagcagactctgaatgaatggggcaactgaagggggtgaatgtgagtggagtttatgtgagtactgaggattagagtgtgaatgaatggtggttttatgaggcacaagatgaatgaagagaggggaatttagggagacagtaggagtgaatgggggtaatgtgggatggaaagggaagaatggggtgcgggagggacagaataaaagagtggagatggatacatggtagaatgtgaagcaggccgagtttgagtgtgggtgctacgagggagaaggatgactagagatgactgggattacatgggcgttatacagggtagtagcccaggaacgtgggtgcacagggatcccagtgggaatcggcaaatgtgaatgagctgaagagtgcacatgaatggaggtgatgttgggcagagtgagagggaatgaaagtgaagagcagaggatgggtgaacgtgggtattgtgaggcagagagtggatgaaggcttcatggcctcgggtgagtaaagcgaggaaacatggggagcccgatgtgagcaaaagtaacgaatttgaggcacagtgtgacagaatgcgggtactgggaggcagaatggcagccatgaatcaggagcagaatatgagcaagaagagggtgataggggttacagtgggaatagatttaaaggaatgaggcagtgagaggcagagtaagagtaaatggaaacaatgaagagaaaactgagaaagaacagtgactggagtgcagtggtgcgatcttggctcacttagcgtaggctaagtatatgtgggtaacttcagctagtgtttgggagtaatagggacagagctccaggaaatgggggtgttcctgggacagcatctgagagaatagaggtgaaggaggggcagagggggagtgaaggggggaaataatgaggccccgggtcaatgaaagaagctgaaggctgggccacgtgcgagtaagccagagtcatttgatgcaggggcgggaaatagaggcaaagataggaaatgagtctgagtgagagtgagtggggtgaagaaggaatatgacatgaaagaatttgggtaatgctaagtagactgtggggaattgcgataatatgaggcccagtatgggtgaatataagtggctgaaaggcagtgtaagtgaatggaggaacaaaaggcagaatgagaatgaagttgaaaaagcagtcaagcataagaatgtatatgtaatatgccatttgtaatatgaaatgtggggcacattccagtaaattaggatggaacagcactttaagtgcagagaggtgaacaaggtaccaaggatgagtgctatggtttgaatgtgtgccttccaaaattcagatgtcagaaacttaatccccaatgcaacagtgttgggaggtggggcctttaatccccaatgcaacagtgttgggcgatgttgaggcttctgtgttgcgcgttccagaatctaccacttagacctttgctcatagagcccagagttccagaatgcccctaattccgaacaccacagggtgagtctggagcaagtcacctgggagggcttacaggtgccataatgaaggcctggggcactgtggtagtgaccttggccacgctgatggttgtcactgtggatgccaagatctatgaacgctgcgagctggcggcaagactggagagagcagggctgaacggctacaagggctacggcgttggagactgtgagaatccagttgccccaaatcccatccaaaccctgagccacccgccacattcagacccaggccccttcttgtcctttatcacctctccaggcctgggcatgatcccttgagtcactccctgactgactatgctgagtagtttaactaactctaacaccaccaccattattgccttcacaaccatcacctccatctctgccatcaacaccatcactacaatcaatatcatcaccactgttaccatcatgaataccatcgctaccaccatcactgatgtctcaccagaatcaccaacatcaccaccactaaaccaagatcaccaccctcacaactgagatgacaaccatccctgtcctccccccatcctatccttccctattcccaagctctatacctactccctgcctcccttctccctgccccagggctgtgcatggctcattatgagagtggctttgacaccgccttcgtggaccacaatcctgatggcagcagtgaatatggcattttccaactgaattctgcctggtggtgtgacaatggcattacacccaccaagaacctctgccacatggattgtcatggtaagtcagcactggggacccactgaagccctgctgggccctactctcccacacatggagggcaaggttgtttaagccataatctcctgcaacaagagaaaaatgatgggaaaaggagaraagttgcctgagctattaaagacaccatcctctacccctacccagactatcctgagaggttgtttaggacagaagagctcagagctcccaatcctcacccagaatggacactgcagttttcttagactcaggaaacaggaaacttacctccatgtggaacagagttagaaactgtcctgatttggggttgaggttacccaggccccgaggaaagaagcagagtgtctggttctagaaacagaaacagataacctccatgcagaaatgacagaactttccagataagactggtggtgttgaggacaaaatagaatagccgttaaagttgttcagtgttggccaaaatggtggttgaggttgtccaagacaggaaaaaatggagactgaggttatttggggccagcccaaatggaggttgaggttgtccaggaccagacagtatggaggttggggttattcataactagccaacatgacaatctagatcatccaggatcagtcaacatgagttaaggttgtacagaaccagctaacatggtgattaagatcattcataaccaactgacaagagaatcaaggtcatcaagaatcagtcaacatagtggttgaggttcttcaggccccaaggaacccaaaacccttgggccctccattcactgttatcctatccccagtgcaccagaccaccatgtccctctcttccccctcagacctgctcaatcgccatattctggatgacatcaggtgtgccaagcagattgtgtcctcacagaatgggctttctgcctggtaagttcatggggatggcccaggccatgggcagccagggatagtgtcactgccaccccatcaacctgtccacttcatcctctctcctttccttcatttcccaggacttcttggaggctacactgttctggccatgatttatctgaatggctcaaggggtgtgatatgcatgtgaaaattgatccaaaaattcatccatgactcagattcgaagagacagattttatcttcctttcatttctttctcttgtgcatttaataaaggatggtatctataaacaatgcaaaagatgctctgatgtctgactctcttcatttattcaatgcctggaggtaccctcattccgtcacttcctccatgtattcaaagctctaattaagaaataccagatcactcagagtggggaaggaagggaggatagtgttgtgaatcaagagcatgttgttctcctgggttcagaagccatctctaccacctactagctgtgttgccttggaagagatacttaaattctctgagcctcagtttcctcatctgttaaataaggatgataatagtaactacttgatggggttattgggaggattaaatgaattaatatttgtaaaacgcataaagtgcttggtacataagacagttgtaggtttggagatagaggagtgggatgggagagatgaaaattggcttcccttaaaaagaatcactctcggtggggtgcagtggctcatgcctgtaatcccagcactttgggaggccaagccaggtggatcatgaggtcaggagttcgagaccagcctggccaatatggtgaaaccccatctctactaaaaatacaaaaaaaaatttagccgggtgtggtgacatgcacctgtagtcccagctactcaggaggctgaggcagaagaatcgcttgaacccaggaggcggaggttgcagtgagccgagatcgcaccactgcactccagccagggtaacagagcgagactccgtctcaaaaaaaaaaagggtctttatttaaggcagatacagtctcttcaggggagaatgaatctaataggattgtgcttacacaggaagctcagtgggaatcaggagttaaaggtacgtttccccacatcctcccacataacaccattcttccagcccccagcccctctttcatgatcaaagtctgaagtttaaaatgacagagcgggaatgtaggcaaaacattcaatggacacacgtggtaataatttcttcttacagagtgcctgagtgtcactttgtgtcttgagcagagaatttaggaatttcaatttgccattctttgcaatggccagcacctttggaagcagccactcccataaggaagcagtccctcatgttctttgtactctttgattggggtggatactcaagcacctgagaccttgaagtgttcacttcaaccaggataatcacagatgagcatgaaaacagctagctgccactgcatgccaaggaatgcyggagmccccttccttaatgccaactggatttcccccgccttgcaccccaaccagcctaggtaatcaaatctcacatctccctgtgggtccataaagagtgccaacactttgggtactgatttcttgttttttcttattttctttccttctttcctttcttttttcttttctttttctttcttttttttttttttgaaatggagtctcgctctgttacccaggctggagtgcggtggctcactgtaacctctgcctcccgggtttaagcgattctcctgcctcagcttcccgagtagctgggattacaggcgcccactaccacgcctgggtaatttttgtatttttagtaaagacggggtttcaccatgttgggcaggctggtcttgaactcctgacctcaggtgatccacccgcctcagtctcccaaagtgctgggattacaggcgtgagccaccacacccggcctaaagtatatttttaattgttgttttttaatggctatctttaaatctgtaacttcctataatttgataaacccttttgttcttgtatggcacttattctccattatgacaaaacagcgatttttaataatagtagattttattaatttttctatgagagtttggtattaaatctggagacatttttcctgagtatcatttccaaggactatgcttatttaattaattaaattgggtttcctttaatacctgcatctagatttatggtgaggtttggcttccaactgacagccctcataccttcaaggccacaaaaggtgcctctttagctggtcatcagcttgccaggcttctagaaagaataataataatccacactctagcctgtgaatacagctttgtcagaagtaggtctctggtgggactgacttttctttcaagcctatataccagtcagaaagaaattccaagtagatttctttcctacaccctgagcttgagaaaacaaacaaacaaacaaacaaacccaagttgctctaatagaaattggaatgggaaagtgatgataaatataagtgaatttgattgtttaagaaaaatactttaaaagtggggagaggctgggcacggtggctcatgcctctaatccaagcactttgggaggccaaggcgggtggatcacttgaagtcaggagttcgagaccagcctggccaacatgacaaaaacccatctctactaataactcacacacacacacaaatagccatgcgtggtggcacacacctgtaatcccagctactcaggaggctgaggcatgagaatcactttaacccaagaggcggaggttgcagtgatccaagattatgccactacactccagcttgggcgacagagtgaaattgtgtctcaaaaatacataaataaataaaaataaaataggggagagaaggtaaaaataggtttagggagccatgaacaggggaaagggagattagaagggtagcagatccacgatttgtggggagaaggactcaaatagaacgcaaatagccttttaggaaagctggaaacaaatgaggtgaccaagagaataagcagaaggacgaggccagattgtggtgaggctagctcttcaccatctcactccaacattactgtgagagaatagctcacaaaactaacaatttacagttagcaacagaagttcatatcctttaagaagacatttctggccgggcgcagtggctcacgcctgtaatcccagcactttgggaggccgaggtgggcggatcacgaggtcaggacatcgagaccatcctggctaacatgttgaaaccccgtctctactaaaaatacaaaaaactagccgggcrtggtggcgggcacctgtagtcccagctactcgggaggctgaggcaggagaacggcgtgaacccgggaggcggagcttacagtgagctgagatcccgccactgcactccagcctggggcgacagagtgaggctccgtctcacaaaaaaaaaaaaaaaaagaagatatttctgagctttcaaagatgtccagccctcactgacccactgcagtatccttctcatgacttcccatctgcttgcttgcttgcttgcttgcttcctttctttctttctttctttctttctttctgacaaggtctcactctgtcacctaggctggagtgcagaggtgcgatctcggctcactgcaacctccgcctcccgggttcaagcgattcttgtgcctcaccctcccaagaagctgggactacaggcatggccaccatacccagctaatgtttgcatttttagtagagaaggggtttcaccatgttggcctagctggtctcaaactcctgacttcaaatgattcacacgccttggctttccgaagtgctgggattacaggcgtgagccactgtgcctggcctgctcatttctttcttagctgtacaactcaaacttgggacttctctctctgtgatccaaagtcctccttcctccaaagaggcaatcacatctggtttggtcacgggataccctgtaacggaaaatgatacaagacttgggcacgtctgtgtgggctttgggacctcaaaaagttaggaaggcacatattcatgaggctaaatttcacataggagatgaaaatagaaacaccttgttcagtctaggagggattaagcatctttaatccctagaacctgaggtcaaaatattgaagcacttcagagatggaaagttattctactggatataccatgaattactcagagaagccatcctcacccacagagaccagawggctgtagttctgtagtatcacatctytatatctctctatatttctctagaatcacamggtcctctgaggaggatccagtcaattccaccactcctgggtgaaatccgcaagacacatcrtcaaatgacacgatccctgtaacggaatgcttctattcaattggttggataaaaattaaaatgataatactttttaaaataaagaaaatattcttcagagagaagctactctttaaccatttcaaaaagggcttttctgagatattcgcaatacctatatatagcaaaggacttttatactacagaaactataaagaactcctacaaacaataagataaatatagatagataatccagtagaaaaaacagaaaaaaagatttgaacaggtaattcacaaaagaggatatccaaatggccaataaatgtatgaaaaggtgctcaccatcattagtcatcagagaaaggcaaacttaaaccacagtgagataccactatatgccaacagaaaactgaaattaagaccaacaaccttcagctttcctgaaaggctctttgaattcttttttttttttttttttttttgagatggagttttgctcccatcacgcaggttggagtgcagtggcacgatctcggctcactgcaacctccgccttccagtttcaagagattctcctgcctcagcctccgaagtagctggcattacaggcgcccgacaccacgcccggctaatttttgtatttttagtagagtcagagtttcaccatgttggtcaggctggtctcaaactcctgacctggtgatccacccgcctcggcctcccaaagtactgggattacaggcgtgagccaccccaccaggcccagctatttgcattctatttgagtctttctccccctaaatcctggatctgctacccttccaatttccttccaagtgttggccggatgtagagcaactgaagctctcatacattgttggtggaagtaaaatggtgtaggcacttaacagattggtagaatctactaaagctgaacatctaaattaacatctaagttagtttatctaayttatctcatctgcaagaggtagatgatacacctaacctaggatccagcaactccactcttaggtatatatccaatggaaatgcacacatatgttcaccaacacatgcacaagaatactcacagaagcattatttgtaatagctaaaatggaatatccaccagcaggggaatggattaacaagtgtgttatatttatacaaaaggaatagtgaatagtatggaaaaagaacaaactactgacacataaggtaacaaggatggatctcaaaaacattatggtaagtaaaagaagccagacccaaaagaataataatgtataattccatttatatgacattcaagaactggcaaaaataatctatggtgatagaaatcagaaagtcgttagctgtgaatcaagagatagtgattggaagtggcatgatgaaggcttctgggtggcttgtcatttcctgctttttgatacaggtatgggttacaaaggtgttttcacttggcagaagttcattaaaccatatactttatacacttttctctgtatgttctgcttcaataaaaggtctgacccaaaacatttttaactaagttagttttccatacaaggttttaaaaaacagtaagagggccgggcacagtggctcatgcctgtaatcccagcactttgggaggctgaggcaggtggatcacatgaggccaggagttcgaaaccagcctggccaacatggtgaaaccccgtctctactaaaaatacaaaaattagcagggcatgatggcacgtacctataatcccagctactcagtagtctgaggcaggagaatggcttgaacccggaggcaaaggttgcagtgagccaagattgcgccactgcactccagcctgggtaacagagcgagactctgtctcaaacaaaaaaaaaaaaagaaaaaaagaaaaaaggaaaaag

SEQ ID NO: 96496 - DNA, 21452 bp, Homo sapiens
tttcacttctcaaagttgtcttggttccttagttcaacaggtggttaactgtctcagggcaaactgtccaaggaagaactctcaggacagaaactccaaaaacaagagagggtcctgcttgcccctcacactctctccaaaagtaatattagaatcaagagagatggttaacactgcttatctgacaatctggcctccccacacaaattgtaagtcacatgccaatagaatttcacgtctcagaataagacctgagagtcatatattcctcctattaccattctcaaaagcctcaaccactcatattcttacccatggtgagggtaaaacataggaattgccattttgatccgaatgggagaaggaaaaacagtgtcactccaataaaatgaatagcctgttaggataactgcactttgaattttgttcttacttcaaaagtttaaaagaatacctggaaagacctctgagtaacttccacatcactcagtgctggagaaaggggaccaaagactagtgcagtaagggagaaatgggctctcagagggactctgcatcaggccacaaagcaactaggcaactgctgactattgttctccaaacttctaaagtcccgaagaacaaaaaagcaagtgcccagtactcagcttttcaaaaccattaaaatacaaacttcaatgactaaactaatccctgattggctggaatgtacaataaggctgggctttcggccaatcagagttctgtttgttgggagtggactggactctaagcaactgccactcacttggccctatattttctcaaaattcttgtttctctggcactagttaacatgtggatctgaactaaagcactaagagagaacctttctctgtactctacctttgctccagttatgattatctactttgccatctgttagtatcagggttcaattaatttgccggtattgagaattctgtattcctaggtttatcccttccttaacttatttctcctcccatctcccatttcttcacatctgactacacttagtgcacagcaaaaggaaaatagtgtttctcactgatttgggttccaggtcaaagataaattcccactcagtttggaggcttactgaaatgtctaggtgcttgctctgaaacttcaagaggaagattagaaggacacattcctaagaatttaaaaccaggtaaggaagaaagctggggaggcatgcccacaagctcttcagttaagtgaggccacaaactcaaaaacaccatgcaaagctgcagcaaacgaacagcaactacaggaaacctgggacatgaattgagagttcagttgttcccattaacaatctgaatagagaaataaaaggcaaaatcctaatcgcaaagagtgtacaatacctaggtagtaagggcctaataagaattgctcttatttgtgcccatcaggaaaacatacagagaagttaagtttatcagctcaaggaatcaggtaaggatgtcctgactcttaagtctatggatcccttgattcttttagatcttgttgtccagtcacactaggtatatgctgagacacgtaagtgttttctctttgaaaaacaatttgaggttgggtgtagtggcccacgcctgtaatcccagcactttgggaggacaaggcgggcggatcatgaggttaagagatcgagaccatcctggccaacatggtaaaactccgtctctattaaaaatacaaaaattagctgggtgtggtggcacacgcctatagtcccagctactcgggaggctgaggcaggagaatcatttgaacccaggaggcggagtttgcagtgagctgagatcacaccactgcactccagcctggtgacagagcgagactccgtcaaaaagaaaagaaaacaatttgaaatccctcaagtttaccataagaaagactccctatagagatcaagctgtttcccagcccaggagatataacaagagatccttaattcaagacaggtattcccatattaggtaaagcagtcagcaacttcccaggaaaatataaagccttaagttagttgaaatgtgaaacatctgaagtttaaccctctggctcataaatagctttgcctgttttggtgagcaaagagaaataatcttcatgcatagaatcctgatctgttttggagtgccaactaatatatcttttattttagccccaacccttttttttgagacagggtttcactctgtcacccaggatgcagtgcagtggtgtgatcgcagctcactgcagcctcgacctcccccagctcaggtgatacttacacctcagcgtcccaagtagcagggcctacaggtatgcacaatcacaccctgctaatttttgtattttttttttacagagatggggggcgggtttcaccacgttgcccaggttggtctcgaactcctggcctcaagcaatccactggcctcagcctcccaaggtgctggaattacaggcgtgagccaccgcacccagccttaaatgtttttatagagactaagtctcactatgttgcccaggctggtctcaaactactgggcttaagcgatcctctcattttggcctcacaaagtgctaagattacaggcatgagccactaagcctagccttattttagtttcttggctgctgtaagggaaacagaactttgtcagagtgacatgcaaaaaaattgaaatccatctcttttctctacagaaacactaaagctaaggaaataaaacatgtagccatttaaaatgctgcaatcgtgaagtccgtcttaaaagctcctctcattttgcccccctatgggactgtgacaacttagcagcagcaggacatgtcttaagccaagacgtaaggaaggaaggactccttacaaagctggacctcacaaaaacgacccgagagactcattaactcttgatccctaaatgaactggtaggaggaccataacaacagaggcaggaacttggccaaagaactctaaccaagccagacagtaaaagggcatttgtaagggatgcccctatcactgccctctgctatggccacacaagaggaatccaggacacatgaaaaacataaaaccacctccctccaaagcttctaaatctccatcccattttcagcactggaaaaatcatacataaacaaggctttttcatactaacagagcctaatgtttattcttttttttgagacagagtttcgctcttgtcgcccaggttggagtgcaatggcacgatctcggctcaccgcaacctccgcctaccggattcaagtgattctcctgcctcagcctccaagtcggtggggctacaggcatgcaccgccatgcctggctaattttttttttctatttttagtagagatggggtttctccatgttggtcaggctggtctcaaactcccgacctcaggtgatcagcctgctttagcctcccaaagtgctgggattataggcataagccaccgcgcccggccaatgtttattcttctaaggatgtctgatatggcaaaaagttaaactgatttttttgtttatttcacttattttccttttttttttttgaaatggagtctcaccatgtcgcccaggctggagtgcaatggtgtgaccttggctcactgcaacctccgcctcccgggttcaagcgactctcctgcctcagactcccgagtagctgggattacaggtgcccaccactacgcccagctattttttctatttttagtagagatggggtttcaccatgttggccaggctggtctcaaactcctgacctcgtgatccgcccacctcagcctcccaaaatgatgggattacaagtgtgagccactgcacccagccaattttccttttgatttgtgcaaaaaagtggtatataataaataactatgtttaagtctgtcgaaaacagtgctatatatgagaaacataaaagtctgataagaatgcatttttttctttttttaattgatttttttttttttgagacggagttttgctcttgttgcccaggctggagtgcaatggcatgatctcccctcaccacaacctctgcctcagcctcctgactagctgggattacagcatcaccccacctggctaatttttgtatttttagtagatggggtttcaccgtattagtcaggctggtttcgaactcctgacctcaggtaatccacccgccttggcctcccaaagtgctgggattacaggtgtgagccaccacgcccagtcttttttctttttttaattaatttttttctgtcactatttgaactacaggaataatgcatgttgtcatgtttaatttacagttacattttcttagtgacagataaaataatttgcattctgcaatcaatgacttttttttgagatggaatctcactttgtcacccaggctggagtgcaatggcccgatctcagctcactgcaacctccacctcctgagttcaagcgattctcctgcctcagcctcccgtgtaactgggattacatgtgtgtgccaccacgccccgctaatttttgtatttttagtagagacagggttctgccatgttggccatgctggtttcaaactcccgacctcagctgacccacctgcctcggcctcccaaagtgctgggattacaggtgtgagctactgcacccagcctaatgacacttaaattccatgaaataaggtagtttaccttattttgttgtactgctatcaaataccatgttttgtgtgatgtggtcacattacagcataacctattttattatatgtcttcaggttcatttactccaattttatgatagactatcctctaaggctgtgattgaagaaatgtatttgcttaagataggaggctatgaaatgaagtccaaaatagggacactctacatcagagatttacaatgagtagggtgagtttttaaaattacctatggccagcccggcacagtagctcacgcctgtaatcccagcactttgggaggccgaggtgggcggatcacgaggtcaggagatcgagaccatcgtggctaacagggtgaaaccccatctctactaaaaatacaaaaaaaaaaaaacaattagccggatgtggtggtgggcacgtgtagtcccagcaactggtgaggctgaggcaggagaatggtgtgaactcaggaggcggagcttgcagtgagctgaggtcgcgccactacactccagcctgggcgacagagcgagattccgtctcaaaaaataaaaaataaataacctgtggccaaatccctatttacagtataaagaaccactgaactctttccaaatacaagtaaatctctacaattaatttaagctccgtctgcactgggaggaattttgtttcccattgtgcagctctttaatgatgtataagggttgatgatgcttagctttaaatatctaggaagaagtaggaacaacatgaaagctcaaaattaagaacagagactggactctggtgtcctggcttctctgatatcccaggggcctattacactttgtcaggcccctcagctcccagcagatcaggaacttgagatctggctgtggtaaccaccctcaagcttgataactattcattgcgtccgagtacttcttatatttcgaactcattagatagtaaaaatctcagaatcctgatttcagatctcatgaactaattctacatcaccgcctcaaattacccagcctgaagacacaacgggcttggtatgaagatataaagtatgttgcaaagagactgagggcactgtagatatcttgaacaaaagggtcagactaacccgcagctgataaggaaagggctccaaacttctagaaccttcttgtcaattctgctttaggattagaacaagtatgactacccacaactctgttccaaccccacttccaataatctggcctaactgttgccagaatctagagcgttctcgaaaaccactcactcagcagctcccttggctagtccgactggcaatctcgaaccactgcggctgcttcggagtgcyaacagcgcccaagcagttgccctcttccttggtgcttaacttaagaaagaacagtgctgggaaggataaagatcacccaggaaggacaggggaagaggagtctgacgtagagaacacgagataagcccctcgctcttcctttttttctctgtcatctttgacttctgggataaccgggggcaaccaggtcaattatggagacacacaatcacttcgaacccagactagtgatcgctggggtataattacaagggaaaacggggtgaggagagcaaaggttttggagacggaaagtgcagacaggcaacaatgcacagaagttaacaagagaacgcgggggtcgggggcgatgtaaggaagtcgtcatcgacgccgcgccgcttcccccacctcgcaccagacctctgaaattgccctcggagactcggcctctcctataaggacgatcgtcctctcagctggagaacaaggccatgcctcagctcctacgccaggcggaagcgggagaggaaggccgacccccaagagcgccccttcagggggtccatccggccttgatctcagatgggggggtgtttgcggagggcggggcatcgcctcaacagctgggggctgcatcatggcaggaacgagtttccctgagccacggagctgcaggtcgcctcctctactaccctgctacccggttacctcttcgcctcttggtcgtcgagcagctccggctcggtcgccgccattaccacatcgcactccgcggcagccgccatcttaccgccgggaccagagagctgggtgggaggccggcggtgaagagcacttccggttggagcatagagcagctccgcggcgcckcgcccagaagggctccctcgggctcgtctaccagagagaggctccgcttggggccagagcggcctcccgcccccggatgtccacggtggtctccgcgccggggcgggagcccaggggctgtgccggtgcgtaggcggcgccactttacccgtgggtgggaaggcggggtgtaccggtggtagcctctctagggcttggctgctttcagtattccaagagcctcattgccatagcaacttccaatcctagagagtcttcctgaaaggctccgtggagtctgggttgcgtggggaccaggtgacccaagactctgtagggaaggagtccccactgctacctttccgaccttggagtgtgtccacagcttcttcccgggaaagtcaagagacactttgagctcagttcccccagctttcatcgttctctggaagccctgcccartcaagccaggggaacgcagggcgtcttcaccctgcgcctttcatccactccggatctccaaacaccaactggttcatcaccctaatgacgctgacccttttacaaggctcctttcatgtcagccgcctgggagtgccatctcagcattaagcctaggaaagctgacacatggcgccccagaccctgccctggagtttataaggaagctcgcggggtgaggtccttgctcttgtgtccccagtactcccacctcttmtataaactctctactcatcacgcttgccttgccgaatgcggtctggattgagaattcataggggacaagggcacagtttaactgtctttgttgttattccctcacccaaacgactatttgtggagctgaattaaattggagctttctggggttaaattggaggagtatgaggagtagctttacaatgtaaagctaagagtaaamtaagaagagggcaaaggaattttaaaaggatttacctgtttgttccaggaaaacagcatgtgccaatgctcatactctgcctatcccagtgtggagggagctgaaaccacagcgaccactgagtagggagggataggacaagctcactaggttggaaaggaggggtcattcgttgagccaatcactcagccctttccaaaacgcctactctgtgctaggttgtgagggcacaagacttacagaccacctgccctgcctgccagtggctcatagtccagtctaatgctagccaacctgtctcaccatcttcccactttatgttctatctaaggcaactcatttattcccacagctttacttccatctgttgatgactctcaacttttcatatctccaacctagacctttcttcagcttccacagctgtatatccaactatctactggatatctcttgtatgtttcacaaatccccaaggcttaccatatttaaatttaactttttcattgtctacccacacctcaacaacagaaaaaacaaatgttggatgtaattattatctttcctaaattccgtatcttgttaaatggattaaaccattctcactcttggcttccaatttgttgccaagttttgttgattctcctaccaaatatttcccaaatctatctccacctttccatcccgattcaggcgctcatcatttttttaaatcttggaataggctgggtgtggtggcatgcatctgtagtcccagctatttgggaggctgaggcaggaggatcacttgagcccaggagttagaggctgcagtgagctatgatcacaccaatgtactccagcatggagaaaagagcaagaccctgtctcaaaaacggcaacaacaacaacaacaaaacaacagaaaaaaaaacttggaatacatcaatagtctcctaatcggtctctaatttcatctctgttcagtcttccctcttctgccagagtgaccttcctcagggactgatcatgtctcttcattggcaatggctttccattgccgtcaatttgatctctttggcctaccacacaaagcctttgattatctgtttctttttttaaataatttaatttgagtaccaatatttaggtcctttctaccaccaatattgaacccaagttctcatagtttcagaaaatgccatgacttgtagccgtttcctccaccctagaacaccctttcccccaggcccttcagtgtctgctgactcaacgttaaatgcccttttgctgtgctccacagcacctcagtagttgttagacatctagcttctctagaccgtgagttctgatgggcagccaccatgtctaactcgtccactttctctcagtatatggccctgcaccaggcacagacagatgatgctcagaaaacatttgacgaataaatgattgagtaaacgaagagttactgtactctgatcgcctttacagagagaacatctgggcctcagagacaccagaacacccagcggcccgcgtccagggagtctagaaccttgggctcccgcgcacacccaggccaggtcctggccgtcattctcccgccggcctctgggggagctgcgcggtccgcgctctctctccgctgccggaattcgtcttgcctgacggaagctggggagcgggcaggcggcgggggcggggcctggaggagcctacaccgactctggaggaagactggagcctttgcggcggcgctgcccctcccctggtccccgcgagctcggagggcccggctggtgctgcgggggccccgggaggtacggacctgggaggcgaggctcgtccggcgctaggatcggcctccgcctccgggccgctttaggtggctggtctctgcctctcattccctctgggggctcccccgtgagaaaatctgtggcggaggcacctctggcccactcttatggtgtcctttattgtggggctcgctatatggagagggggtctgtgtcaggagcttcccctggagaggtttctgttagggaccgtctttgggagtgayctatctctgctctctgggggggatctttgtctggagcttttggggggcttgtgtttggaagtttgccttcggggagatatctgtctgggacctcttagggtttctgtatctgagctttctcttttgtgtctgtcagtccaagggcagcaaaaagtatgtcctttctgaagcctttttttccgtaggtttcttcattcttttctctcttgtcttatgttcattttagccatagacttgactggagtttagagggaattgattgttgtccagatgagtcgtacaggaaagcagattgtctttttttgagacggagtcttgctctgccgcccaggctggagtgcagtggcatattcttggctcactgcaatctccgcctcctggattcaagcgattctcctgcctcagcctctcaagtagctgggattacaggcacccgccaccacgcctgactaattttttgtatgtttagtagagatgaggtttcactatgttggccagtctggtctcgaactcctgactttgtgatctgcccacctcggcctcccgaagtgctgagattacaggcgtgagccaccgtgccctgccccagattatcctttttatttgctcagtccccccagggagcagatggcttcagacagccacacaaaacactgttcctgcttaattctccatggggtcatggttaaagagaggaagctgggctgagctccctttactaattggtcctctacatcttgcgcacagaagggaacctggcccagtggccagtgactctcctctccctttatggcagcatttccaagcacctgccctgtgacagatactggctaggtactggggataacaaagacgaataaaataacagcttaccatccagtagtagacatggagacatccgtttcctctgactagcattgggatggtgctgaaaccctggaactatacattcagtttagaactatacattcagtttagaactctcagttatggacgttctgccttctgtttttttggtttttgtttttgtccaccagaaaacatctgctagtaactgccttctgtgttgatgctttctttcctcaccttacccagcgtgcttctgttcttcaaggttgaaaactaagcatggggaagagctgcaaggtggtcgtgtgtggccaggcgtctgtgggcaaaacttcaatcctggagcagcttctgtatgggaaccatgtagtgggtgagtgttgttggagggggaggaacagtggaagaagttgaaaaataaggaataggacttgatcacaacacacacaggctaaaagctgctcctggtggttttcccccctggaagaataaaacttacattgtaacagatcaactctacaacactgaacaaatccggagggagaaagccctatgtccaagataggaaagagaagctgtcatgtcacacttgtgcttagcatggaattagcataaaattaatgtccattggccgggtgcggtggatcacgcctgtaatccgagcactttgggaggctgaggcgggtggatcacctcaggtcgggagttcgagaccagcctaacgaacttggagaaaccctgtctctactaaaaatacaaaattagccgggtgtggtggcacatgcctgtaatcccagctattcgggaggccgaggcaggagaatcgcttgaactcgggaggtggaggttgcggtgagccgagattgcgccattgcactccagcctgggcaacgagagcaaaactccgtctcaaaaaaagaaagaaattaatgttcgttcccctaaacccaaatcatttcagtcctgccaggctgtcaattctctggcctcctcagccccctacattcctttctccccatttggtcagccttaagatgctctcatcactcacatttcccatctctctctccacttcagacagttttctcattttataccaggttcggagatgatcgagacgcaggaggacatctacgtgggctccattgagacagaccggggggtgcgagagcaggtgcgtttctatgacacccgggggctccgagatggggccgaactgccccgacactgcttctcttgcactgatggctacgtcctggtctatagcacagatagcagagagtcttttcagcgtgtggagctgctcaagaaggagattgacamatccaaggacaagaaggaggtgtgtggcataggcttctggtgggagcctcagtggtcagagagtttgggcggagggctggtttgggaagcctggcatggctccattcttcactccaaggtgagttaggagccagaggtggggtggaggccactgagggtatctttaccctcaggattggctgcatgttgagtctgctcaaccaaagaggcctctttgtggtttaaggggtccctgacctaatgtatgaagcccccatttagttgttgaaggggtcactgacctaatgtatgaagcccccacttagttgtatgaagtccccacatagttgtccttcctgatggttctgtgcttttagctatgaaagcccttcttttgtttgtttgtttgtttgtttgtttgagacagggtctcactctgccacccaggctggagtgcagtggcatgatcacagctcactgcagcctcaacctcccaaggcttaggtggtcctcctgcctcagccccctgctaagactacaggtgcatgccaccacacctggctaagttttgtatttttagtagagatggggttttgtcatgttgctcaggctggtctcaaactcctggactcaagcagtccacctgcctcagcctcccaaagtgttgggattacaggcgtaagccactgcatctggccacgaaggcccttctgttctccagaatcccacagtaagctgcagggttctgggagtgcttcctcacctgttgttgagccagaaactgactgctaataatgagcatgtatgggcaatacagagctggtgatagaactcctaaaaggagggctagatggaggccagaatttgaacagaggaaagagaaaaaaagcaaccatctccttccccacaatgagtggtatggaatctagaaagagatgagatatcagccattgagctttcctctcatagaactcctaggtggttgccagcccccatgtccattcctggttctatggtacattcacaggcctatgctctgtccctcttccccaggtcaccatcgtggtccttggcaacaagtgtgacttacaggagcagcggcgtgtagacccagatgtggctcagcactgggccaagtcagagaaggtgaagctgtgggaggtgtcagtggcggaccggcgctccctcctggagccctttgtctacttggccagcaagatgacgcaaccccagagcaagtctgccttccccctcagccggaagaacaagggcagcggctccttrgatggctgaagagctgccgttcctctttcacgatcccagccccatttcagtgtctggggctctggtagatgtgttgagggcaaagtagaggacaagctgtctttcccagtcagccagggagctccccgccaggccacgccccagccactttgctccctctcacctctgggaagtgcaaatactcttggttgacatccccttcctcagccctcccagcctactccccatcccagcttttagaggatctgctccactgtctcctggggcagttgtgggtcactgtcccttccagctgccccagacaggaagcagagtcaccacgcagcagtgtcccttcttgggtctgagttcctattataggtaggggccccaccctctgggcttcccatcagcgacacacacacacttatggcaccagcctggactccagaaaaagggtgtccaggtattgtgtgtatgcatttagttgtgcacacacaaatatgctcctatactggcattaggcgtctcctcatccctcaccctgacctttctcctgtccttttcttggctggaagaagttggcctcctgggagtgtagttttctgttttaaatcccccacccctggctgggctcagtggctcacccctgtaatcccagcactttgggaggccaaggcgggtcgattacttgaggtcaggagttcacgaccagcctggccaacattgtgaaacsccatctctgccaaaaatacaaaagttagccgggcgtagtggcacatgcctgtaatcccagctacccggggaggctgaggcaggagaattgcttgaactcagaaggcggaggctgcagtgagccgagatcgtgccactgcactccagcctggtcaacagagcaagactccatctcgaaaaaaaaaaaaaaaattccccacccctaccaattgttttacttcctcttcctgctcagggagcagatgggcctcactggttgagatggaatagaataactgggctatgagtcaccagcccactttgtgacccagcaagacctttcccctctctgggcatcagtttctcatctgtaagatgaccagagttgcttagatgatctcctagatcctttccagttctcttgatttcgtaaagccaatggcttctccctctttaaggtgctatgccaaccagccctggaggctgggatctgccgctccctccagccaccagggggcaggagtgcactacctgctgtcagtcaccagagtggccgctcagtgcccagcccgccagcctcgctcttggaggctgctctttatcctgcctgtggttttcagctcagagctggacttctatttataagttacctgtatttatatttatatgcccgctctcatggtgaaggctggacaaggtgctcctctggcccctccttcttacctcagatgcctgaacagaacaaggcaaacccgtagcagcctctcaggagctgacaggtcctctttcggggctcaggagggtgggcacacacccagcggcctgcagagtaagcttattacccacaactgtgcccgctttgtgcttytaaggtgcacacctagcctaggtgagacactgcagccaggcaaccaccgacacacgccccttctcaaagccagaggtgagtggggcaggtgcccggggctgggtgagtggaattaggacacacacaggcttgggcttcaagttcatttattgatgcattggttggacacaataaaaccacaattgttatcaaaaagtttccctcccctccccctttttctggttctcccattggaaatgtctttaaaaaacaaaaaaaagatacagggggatactggcagggtcccatattgtggggtggggagggggcagtgctgcagtggaaaggagtttgtgacattgacattgacagcatgaaaatgggtcttgccagtgcatgtgagactgcctcccaacactcagcttcacagtggcaggggctggttgggagaagggaaagctgaatttagtgctaggaccagtttggagtgggaagctgtaggggaaagctcttcctttgggagctctgcggggggttcggtgttagctgagtccatagtctgagggagacccacacccgccctccaagagttggggttcaggaagtcagagaaaggctaagaagaagagcttctgagggatgagttactccctcaatattaagactgggcttatcagcaagtatcacttgaaccagggaggcagaggctgcatgcagtgagccaagattgcaccactgcactctaacctgggcaacagaatgatactctcaaacagaaaaaaagactgggcccatgaatgcccagaagacaagattaaaacaaaaccctgggcccaaccagaacatcacctcctctcttagtcccaccccttcagagcagatgaagcccccaaaagctttcagaaccagccccactacctccttggctctgccccaccttagcactgctgatcgaaggacttttgggtccccctttctcctccatggtcctctgtcacactcccatggtcaccttgtcctgacagccttgagcctgctgcagctagagaccccatccctatctccagtgaagccccaaagcctaggaatagaggtcagagagtcgtcccctggctaggagaggatggcttgtagaagctaagattcctagagtctggccatgtgggtcttgggtggaggaaagtgagagcaccacatggctggggctgagattttgcatagatctttggggtctgtcagggtgggaaatgcaggcaagcctaggattaaccctggaaggcctgcgaaaggagggtggggacagtccttggaaggcagctgcccttaaaactagcccagctctttctggatcgggcaggacccctgaagctgttcacagtccctgtggcatgtaggaaaccaaggtgtctcaggacaggaggagacaaggagtggctattgggaaatcagctctggcctccccatgagggctaataaggggcaaggacgataggtcctgtggcagggcggacagctcctgctggggtgcgaaacagagctgggcccaggatgggagccgggaagagggtagtggctgctgtaggggcagggcggagggccaggggccctggcagagcacagatggcagtggctgcggtggggagcgggctgggcaggaagcgggctgccaacgtcttggtgagttgcttctgcaaggccagtttagactacacggaaaagaaaggaatggacacagtctccaccccagaaaaccccaccccctccctggggcccatcctcaagctttttgctgcagggaaagcgtgccttttagagttccaaacctaaatcctcctcccttcccacccccaaacattcattccgaagggctttctccaccacctgtcttcctgtccagagggaggaaagtctcagcatgggagaagggaggaggatttacgggatagagatggtctctaggagatgcacgcccacccctcactcttgcccctaagatgactatcccaacccacctccccggaaattcctctgcgcagatcccagttcccaggcctagctctgtcactgcccagcagcctcattgcagggtggcctctttttcctgccccaccgcagcccccccatctggccctcccagcccaccctctcccctcctgacccagtcccagctctgttgcctggagacagataccttgaggatactcacagccagcgctgcgtgcttctgcagcttgctgtgctggctggagggcttgggggtcttcccggccaggcggtctttgtgcctcctgctgctcatgtgctaatggacagacagacagactgggaacaagatgacaaagcccaaggaccccaagaccatcatcctcgactcttccccttcctctatccacagctcatacatccaaagcacacagactgggtcctcaccctggggtaggccctgggaaggggaggtgagtcttggcctttgcccttaattggcccactggcctgctggcctcgcttctccagcctgctctgctgtgccctgcctgctctcttcagggtccctccctctgctgccctgccccccaaccccctcccctggctccaaccccagtcacagcctcacttctcccacctgcttcagttgggtctctgaattgacctggagctgacagagagcacagtggaaggcagggctgggcccctgccggccgccccggccccctgtgactctcttggctttgtgtccggcacctcccctggacaccgggcggccccggctcctccggggagcccctcgctgaccttccatcatccaccggtgcttggctcctggagagggaagaaggcagtctctcagcagcaggaaggggttgcaggggccacagagaccccctccacactcatgcaatttggctctccctgtaagcctcacggctgctctgtgcacacatcgccctccagccacacgtggtttcccctcccagcttctgtcctttcatgccagcccctcctatgaaaggcctttctgcactacaaatagctgccttcccctttgctttgatctcagtcctttccttctgggtgtaatctaaggagagaggcagatgtctcctgtctcctgtggagtgacccttcagagatttagcgaccttcagttcttgctgcctcagacttctcttcccaattctccttccccaaggagtaatgggaggacccagaaacgtccgttcagtaacacacaagcacaaagcctccgccatccaacccttgagcgaagcacccaggaactcaagcctgccctcatctggcgaggcttagcttctgtcccaccctttccctgggctccagctcctgggactactgacctgtgttgtgagcctgaagctgggaggccgagttcactgtcaccttacacgtggggcagtagaggtgccccttctcactcctgccttccccactcatgctgcttcccacggcagctgccgctggctcaggccccggtgcctctctcccaggctctggggagcaaggtgggcaggaggaagaagaggatgaggaggcagcatccaagagctctgagtgggctggctccctgcatgtagggtctggagttggtggtggctggagtggaggcccaagaggaggggctgcaggaactgctgcagagatggaagagtgtgagacccaagatgacgctgcagaccacgatcttcagctctgaccatggaggtggcctggagggcccctggtggatgaccagcactgaattccaggccccacttttctaccaactcactgggcagacttgggcctcagtttccccatctgaaatcattaagttggacacagtggtctcagaaagccctcacagccctcatatccttatttgctaacttaaacagagatcaccaaaaaagatgtactagaatgttcagagaacactattcataatatcataaaactgaaactacccacatgtccaccaacaggagagcagatttttaaaaaacaatggtgcgggctggatacggtggctcatgtctgtaatccgagcactttgggaggccgaggcaggtggatcacctaaggtcaggagttcgagactggcctggccaacatggtgaaaccctatctctactaaaaatacagaattaggcgtggtggcacatgcctataatcccagctactcgggaggctgaggcaggagaatcgcttgaacctgcaaggtggaggttacagtgaactgagatcacaccactgcactccagcctgggcgacagagtgaaacgccatctcaaaaacaaacaaacaaaaaaaaaaaacacagtggtatgggccagacgcagtggctcacgcctgtgatcccaacactttgggaggccaaggttagcagatcacttgagtccaggagttcgagaccagactgggtgacacagcgaaacaccatctgtactaaaaatacaaaaattagccaggcatggtggcacatgcctatagttccaactacttgggaggctgaggcaggagaatcgcttgagagccagggaggtggatgagcctaggtcacaccactgcactccagcctgggtgacagagccagaccctgtctcaaaaaaaaaaagagcttttaagaatttaaattaaaaaaaaatagtggtatgatccacggtggagtactacacagcaatgaaagagaacaaactacagctacacgcaaaaacatggatgaatcttacagatataatgaatgttgatgaatgtttgtgagagatgaataaaaactagataccggccaggcagggtggctcacgcctgtaatcccagcactttgggaggccgaggtgggtggatcacaaggtcaggagttcgagaccagcctggccaatatggtgaaaccccgtttctactaaaaatacaaaaattagctggacgtggtggcaggtacctgtagtcccagctacttggaaggctgaggtaggagaatggcttgaacccaggaagcagaggttgcagtgagccaagattgcaccgctgtgctccagcctgggagacagagcgagactctgtctcaaaaaacaaacaaacaaaacaaaaaaaacccacaaaacaaaacagatacaaaaaaacccctgcacactctatgtttcaccaaaaataggtaaagctgatctatgctgagaaaagtcaggatcgtatttaccatcagaggggttgtagttagttgaatagtgtctcccccaaaattcacatctatctggaacctcagaatgtgaccttatttggaaacagggtctttgaagataaaattagttaagatgaggtcatgctgggttcgggtgggattgatctagtgactggtacccttataaaaagagcttgtggaaacacagggacacacaagggagaatgtggagatggaggtggagattggagtgatgcgtctataagccaaggagtgccaaggaatactggcagccaccaaaggccagaagagaagcatgggacactttctcctctaagcccccaagaaggaaccaatgctgtcaacgccttgatttcagacttctggcctccagagctgtgtgaaaataaatttttgttgttttcagtcacccaggttgtagtctctttttttgggggtgggggtgggcaggggaggttagagacaaggttttgctctgtcacccatagctcactgcagcctcgacctcctgggcttaagcagatcctcctgcttcagcctcctgagtagctgggactacaggtgtgcatcatcatgcctggcaaataaattttttgtagagacagggtcacaccatgtttcccagactggtctcaaactccaggcttaaagcaatcctcccgcctcagcctcccaaagtgttaaccatcacaacatgtgagccaccattcctaacttcacaaatgaagtcatttgtgaaggcagcccttggaaatgaatacttcaaggtaatgaccaggaggaggtgcaagacaagcttctgaggtgctggtaacgtgtttcctgatctgggtgtgttcagcttaggaaaattcatggcgtggtacacttgtgtgcctttgcctgtctgtatggaatactccaacacaagcaaaaagaataagcagaaatctctcaaccccttgtcggaaaccagatttggagtggagacgtgggaaagagaagagctcaggactgacctttactctgtggctctccaggggctccactggccagcgttgggattggggacactacagccccatcctgggcctgggtgtgtggcctctgcttgctcttggcagcctcgacagccttgagttttctggcgtgtttgtggcctttataatgtgcctcggcctggttctggggaggggagggcaagaggtcaccattcactggctgagtccacatgccccatctgtgaactggagcccagcagggggacaggtcaaagggaggcagggctcaggtcacacaaagggcaagtccttgtccttgtcatcatcatcaccatagcacatgtggctctgaggtttgcagaatgtgttctcgcacatgaactccaaggcaggctgcctctggcttcagatctgacccagccacttactaaccacatctttttgttgttg

SEQ ID NO: 96497 - DNA, 58481 bp, Homo sapiens
cattcctggtagatggccaatcagtttttatcgaacctaatagatgggaaggggacaaatggggggacacactagcataatggtagggacagatacgtagggggtagacccatacgacatgaagaagttagctggcctggaacaaagccagggtggattggcctctgcttagttctccttgggctacttctccccatcacccctacccatagtgacttcctgccacgatcctggagatgtggagcacagccgacgcctcatatccagccccaagtttcccgtgggggccaccgtgcaatatatctgtgaccagggttttgtgctgacgggcagctccatcctcacctgccatgatcgccaggctggcagccccaagtggagtgaccgggcccctaaatgtctccgtaagtgtcaattgagtaggagggaaaacctctagctggagataaaagatgctgccctggaggccaagggcatgacaccctcactgcactctgcctgctttgtagtggaacagctcaagccatgccatggtctcagtgcccctgagaatggtgcccgaagtcctgagaagcagctacacccagcaggggccaccatccacttctcgtgtgcccctggctatgtgctgaagggccaggccagcatcaagtgtgtgcctgggcacccctcgcattggagtgaccccccacccatctgtagggctggtgagtgccctgtcacccctcaaaaccctccctggcccatagagctgctctggcaaagatgtccaatgtttagaaccagaaccacctgcccatgccaccttcatgttacccttggtctccccagtctctgccagatccttctgacctggcatcaccaagacaaatgctggagtggcctctccttggacaaatccttcccatgatcatcccactacctcctctccctgccttagtggtttggcccattgggctcactcactgcccttggccctccccttttgttccagcctctctggatgggttctacaacagtcgcagcctggatggtaagtctccacccttgaggccagagaagtggtctccctggtcctggttctcacggctcccaggtcatgggcttcccaaggagggagggcagagaaagagagaggtttgggcctagcaggttaaaaagctccttccctacacccagccagctagagggagctggtagtcagatgcccttgggcagaggtgagagaatatgggctccaggtgacagagacctctgctccagtcacaccctctgtgtcttcagttgccaaggcacctgctgcctccagcaccctggatgctgcccacattgcagctgccatcttcttgccactggtggcgatggtgttgttggtaggaggtgtatacttctacttctccaggtgagtctggcttctctttctgctctgcatacctgcatacctcactcctacccagtgctcctgacttgcaggcttctctgccccacaggctccagggaaaaagctccctgcagctgccccgcccccgcccccgcccctacaaccgcattaccatagagtcagcgtttgacaatccaacttacgagactggagtaagtaaccatgccagccttgccaccctatccaagacccagttctttgcttctttgggcagataaccctgagggtcctgccaagccctctcactttttcccttttcctagggaaggtgaattatggcctggcaaacctaatacaagtttccaactcccagcagtctctttcctttgcaggagacgagagaatatgaagtctccatctaggtgggggcagtctagggaagtcaactcagacttgcaccacagtccagcagcaaggctccttgcttcctgctgtccctccacctcctgtatataccacctaggaggagatgccaccaagccctcaagaagttgtgcccttccccgcctgcgatgcccaccatggcctattttcttggtgtcattgcccacttggggcccttcattgggcccatgtcagggggcatctacctgtgggaagaacatagctggagcacaagcatcaacagccagcatcctgagcctcctcatgccctggaccagcctggaacacactagcagagcaggagtacctttctccacatgaccaccatcccgccctggcatggcaacctgcagcaggattaacttgaccatggtgggaactgcaccagggtactcctcacagcgccatcaccaatggccaaaactcctctcaacggtgacctctgggtagtcctggcatgccaacatcagcctcttgggaggtctctagttctctaaagttctggacagttctgcctcctgccctgtcccagtggaggcagtaattctaggagatcctaaggggttcagggggaccctacccccacctcaggttgggcttccctgggcactcatgctccacaccaaagcaggacacgccattttccactgaccaccctataccctgaggaaagggagactttcctccgatgtttatttagctgttgcaaacatcttcaccctaatagtccctcctccaattccagccacttgtcaggctctcctcttgaccactgtgttatgggataaggggagggggtgggcatattctggagaggagcagaggtccaaggacccaggaatttggcatggaacaggtggtaggagagccccagggagacgcccaggagctggctgaaagccactttgtacatgtaatgtattatatggggtctgggctccagccagagaacaatcttttatttctgttgtttccttattaaaatggtgtttttggaaaaaaaaaaaaaaaaaaaaaaaaagcaatggccaggtgaatgatgctttcttggagggacgggaggtggcagataaatgggatatggacttcaggaccagaaggcatgctagacccaccaatcaatcatcttcagattttattttattactactgtttttgagatagggtctcactctgtcaaccagggtggaatgcagtgactggatcacggttcactgcagcctcaacctccaaggctcaagtgatccacctcagcctcctgaatagttaagactatagatgcaggccaccacacatggctaatttaaaaaaaaattattgtagagatggggtcttactatgttgcccaggctggtctccaactcctgggctcaagtgatcctcccacctcagccacccaaagtgctcagattttattttaaaagaaattattgcatgcagttgaacagggtcccctgtaccaaaagggacagtgcaacagatagcaggcaaaatcagaggccccaatggctgatgttacagggatgtgggagcccaggaaccccactgcacatccacccaatgccttatttcctcctctttgccaggtccagaactacaggctggcacactcccaaatcccttctcaacgccactgatgcccttctcaatgctaactaggctcaggaagtctgatgcatctctccttccccttatttctaagtaagcaaggcttgggaaattagaataggaaacagagactgatccccaaaacatgaagccctaatctggcttggccttacaaaacccttagattgtcaggagcagtggtaatgcagcttacgggcttggatcctaagttaggcaaaggccctaaccatgggctctggaaaaaggtggctgggaggatgtgctcaagtttgccccttccctatgggccccagcacctacaaagatggaaagtgcccagcgttggcccccagtatgcacattccatgctgagaggtgtgccctgcattgctgctctccaagagtgacagcaagaggcaggcaacaggaaattatgggagctcagaaaccagtagagaaaaatccatgaaagaaataatagcagcaaccagcaccttctgcttctacagtcttccaaaagggaagtcttgaccactcatgctgcctacccctggctctagcacaagccaccttgaaggatggagaagctcttgtccatgcagagtgcagtgcctagattagccacaagaggtcacttccaaaggcgtctgtatcccacctgctcgcccctcaatcccccctcaactgtcagggcgggagctctccaaggtgggagcattccttggccccactggcctaacctcatcctgcaagttccaagaggaagaggtgtgaagtttccctggctcttgtcaacagagccaagtcttatttccctcattagcccatagttcctattatcagctgcaattgatggtgttgatcaaagcaaagccttgtccagtggatggatgccaatggcttacttacctgttccataatgcctccaggttaacacagcagcacagctgggccctgagcagtaggaaaaaaagccaaagagagagggcacatgaggttctaaactctgagagcctgtgacataaaatatagccataggagatagaaaatcttgcctctttcatacaaacaatctagctcagccctcccctctctgatggccacatctctggtccacagctcctgaagtttattgttggctcagaatggtagaaagcagagggcagccaattcacatgacattctccaccccaccatccatgaccttatcattctttccaggcaccaagagggtcatcagaaaagcgaaaagtcaggaaaacagaaacctaagactccatacactgacatccccactctgtctaactcatcctccttactgtccccaaagcaagcatagtaattccttagacacagtcgacatagtgtaatggacagtgtctggcttgagaatcaagaaatccaattcttaggtctgccataaatgcactatgtgacctaggcaaatcactgcgcctccctgtgcatctggaaaagaggggattaaatcagatggtctctaaacccttgctagtttgacgactctgagaatgctgtgtcccttaacattaaaagtgggccgagcacagctacgaagcaacaattccaactaaacccctagtgtcaagcacaacgatacaattctcttttccactgcttcatccaccatcaggcagcaataaccaaccgcccatctctgacggcaataccaaggggaggagcgggcgccctgaaaaggagcatgaatccccgcccagaatgcgaggcgggccctcagactacaaatcccggcatgcagcactgacgctctcaaaagtatcccttcctggccggcaaatgactcttccccgggtctatcctaccatagagtgcatcgcacgcacatggaactacagttcccacaatccatcagacctatcgcgattcttgctcccaggatgcaatgcgcccccgttcgccctttagaccctttggcgttgcaaactgggagttggagtccggggtacgcaggtagctgggcgttgtcaggattacaaactctccactttaggcttcctcttgaagagcagatctcagggacagtggtgaagagagggtggtaacgggcaggcggaactctccagtgccaccaccacgcaaggcagggatgctgaggatacaattaactgataaaattatctgtcaggagcgggagagaattaggaaccacagtcatcccacacgcctccaaaagcgtcattttctgtctcaaatggcttttctctttaccaatatggtggcctggtccagccacacccgatggtagaaccaaacggtcaagtacaacatccctaggaatactgctgtcaccgacaggcgaccagctccatccaacaccacaccttgctcctttctgttcatgcctgaggactccaagggcatgatagcccatatcccattaccaaaatggcgaaaggagcagctttcttgtgagggcctgcggaaggcaatacgcctgcgcgggaggcgtctgtgttatggagaggaagggggagcacccccaacacgcctgcgcagaacagagtcgtcttagtttgcacacaaacaccaatggatgaacagtccctagcttcctgcggctgcgccttgacccctacaagctttctcaagcgcctgcgcgagacctmaggtcccgcccttttgtctcagtgcgctggcgcagggcagaaaggtggggcttcggtcctccagacgaatgccagcgcggctgcgcgctggggggtactccctcaccgcggctgcgcgggagccaggccgccggctgtcactgcggttgcgcgcggcgagcgccgatcccggggcgcctgcgcgggtggctttgcgggcgctcgcggtaagtttgcgccaagtgcgcggcagccgggacgcagacggcggcggcggcgagaggcggagcccggggaccaccccccatcaccctccccccagtcacctcacgtaccacaacctcacgtaacctctcaccccccctccgatacccccagccccgggatggcagcgcccgccagccttcccggccggaccggctgtcgccagtgccggctttagcctgtgggactaggccccgccgaggcctgacccccggagccgggacccactgtgcagccagcagccgggccgggactgaggggccgctcccccctcgcggcccgtcgggaggacgctgtcgtcccggggactgggggccggggggtgggggggagccagggcgaggaagtcgggacccgtattgggaaaaaagcggggccggggtcaggagcgccccctcccctcacctcccccctccccccggggttgggggggccggagcagagagcacccagcccgggaggtggatgaatgtgggagaaaatggagaccaagacgatcgtgtacgacttggacacatcaggggggctgatggaggtaagagtggccctcctcatctccttcctccagcgccgggagggaacctccgccctccgccccacaaagccagtcctaaactcgaagcgcctagatggccgagggagggggattcttcctcacctagcctctccctcccctctttgcaatttagggggctgagctcagcctccgaggacgtttgcagcagtttcacctacccgccgccctcgattcgctctcccgaggcgccagcccactccatctcgttgcaccggcaggcctccccacccccttcttgttggcccctttgtgcttcccccagcacgtccgggtaccgggctttgggcctctcccgagcgggtctttggagtcccccactgtccatacaaggaagtggcaagaagggaaccgcgcaccctcttcccatccccctacccttgatcctccccatttggaagaagctgttctcgttgttgtgctgcaggaacgcggttagggtgggctccccctggttccgggggctgagagattctgggagcagcctggatgggaggaagaaggacaaaaggggggagaggggtgggtgacggagaaaccgcgccgggggggcgacggaccgcccgggagctccgagtgtgcacacacgccgtttgtatgtgtgtgcagcaaatccaagctctgctggctccccccaagacggacgaggcagaaaagcgcagtcggaagcctgagaaggagccccggagaagcggcagggccaccaaccacgacagctgcgatagctgcaaggaaggtggagatctcctgtgctgcgaccactgcccggctgccttccacctccagtgctggtaaggtctggggacccttttggagcttcttggcggacccttctctgcgcattccttcacccggcctgcccctgactgccgaaataacgggcgcttgcagccgctagctgactttctgcagctgccggggcgagcacctccccgcccccaggtgtccgccgggttctggcagtttagcggggaggagcagcggtgggtccggaccccgaggtgggggttgggacgagtgaagagaaccccatatgggattggaagtcgctggggagccgggacagagccggccggggacagccggcagtggcgggggaggaaggggaggagctccgggcccagtgccgcttgcctgcccgcgcgcccgctgccctcggggctcctgcccggccgggatctcctcggggtgggtgcgtggagccctcggccacctgagttgccctggtccagaccccggcaaccgggcgcttgtggctgtagaaaaaatcgtggagggtgtctctcgagtccgcctcttctttgcctctctgtttacaatatggcgacctgcctttaaattatatttttattctcagcgccattttggctgcatatatgatttgcaaacgtctctcgggggaacggtggggacagccccagagtcctttctgcagaagctcctcgggggccccgtctgggatctcgccgctttgatcccctttctctgcctccgcttgccccctgttgcctctcagagctgccttccttcctcctccctcttccctcctccctcccggcgccgctgcctcttaggaaatcgggccgggttagacaattaaaattgcccttgggcgccgatttcatttctccgctccggatcggcgagcccttcgctgcaaaattctttgctgccagagggaggattgtgtgcggtggcactagaaaggcatttttaaggagctgagagctggaaagccgtacgctttttcccccttactggacatgagaggaggggagagaccgaaccgagagggagggacmtgagttgatcgcccgmtgcgtgatcctcctcagcggctcagcccaggacaatccggcaaagaagagtttaaactccatcttctgccggccgaaatcacctctgccctccacaaaaatcccacatctgcggcagcaaacccagatttcgtcttgttctactgggtctcgttctgttgttctgcaacagttgactgaggcaggggtttgagagaggagccagactggagagaggaaaagggggctgttctgtgttcccaccagttgtttgatgttgccttttttagccctctttttattttgttttaagtgaaatttcaccgaaggtctctcaacagttccattcacgttccatctctcggtttgtggagtagtgtctactgtatatttgtactaattgcaggtttgggaacacttattagacagatgactgatactgagcaaattaagtttrtggtcagaagttatgtaggaaactcccattaccattcccaagatacttttgcccaggagggcaccccatcccagcttgtaaaattgctgggacaaaaatgattatcgtagaggaagttttgctgctggctttaaaatttttattatgaagtgactaagggtctgtggtttttagcctttacttcctataaggtgtaatccacctggagaagatatttctggtcacatttcttttgctattcttaggagaaatttgtgcctgaatatacgttgtgttgcttaccagttattcccagttgcttacatttttttagtgtgtttgtttggtatgtataccaggactgagttgtagacttcttgatttaaaatgtgggcttacgtcctactcctaggatgaaattggtgttaaccatgattgctgacatgcatgttgagtgagaatttgataagctctcttatttgataaagctgaaattgtttattagaaacctcaggcatgggaaaagtgtgctgtctgttttgcctgagattgggcttttaaactctaaaacctaacctctgaattttttaattagacgagtctaaagtcttgtcaagttgtaacaattaacagtttccactttagatgaaaggagaaagaaggagggactctttagctgttggtgagattcagacttgcccagactgtgcatttcattgaaattttttttttttttgaggcattgaatgggaactggtaatcagagatttgtgaatgtgtaaatgaagtagtgcttgtttcacatctccaattctccctttgaagatgtcaatactgaatgtaccattgacttatctgagttattatctaaatcacaaagcattgtagatattggtgcaaaggcaggaagtcttttaagtaggtattccctagacgaatttcatttagtgaggcttatctcacttttctgcgtctgaagccacactctttccaccaagagtgaagttttttttgttgttgttttttgtttgtttgtttttttctgagacaggcgtcttcgctttgtcacccaggctggagtgcagtggtgcaatctcggcttattgcaacctccacctcccaggttcaacggattcttctgcctcagcctcccaagtagctgggattataggtgcccgccaccacacccagctaatttttgtatttttagtagagacagggtttcaccacgttggccaggctggagagtgaagtattttattaactcaatcagagtagttagatcaagtatttaatgtctcagaacatttttattcttgaatgtgttttcatgaatttgtcccagccgggtgctgtggctcacgcctgtaatcccagcactttgggaggccgaggagggtggatcacgaggtcaggagttcgagaccagcctggccaacatagtgaaactccgtctctactaaaaatacaaaattagccgggtgtggtggcacgagcctgtagttccagctactcaggaggctgaggcaggagaatcacttgaacccaggcagcagaggttgtagtgagccgagatcacactactgcaccccagcctaggtgacagagtaagaccccatctcaggagaaaaaaaaaaaattgtcctattactgcttaattttatcatgtgagagtaaggttatatttcctctggcttcccttttaaactggctaagactgaattatttaggtaggcatgataatgataattttccttccatacggaaagtacaagagtaaggttgaagccgagtatggtggctcatgcctgtaatcccagcacttaaaggggccaaggtgggaggatcgcctgaggccaggagttcaagaccagtctaggcaacatagcaagactccatctctacaaaatttaaagaaaaagtgaaatttaaattttgcaaatgctgtaggtcttaattgcagtgctgctgtggttctctatccaaagctctgtgggataagtcttttttcagtctctagtattccttgccagtctgcctcactgtgaacggaatccagtacaagtgttccaaaagtggttctaggcaaactttacctcccgggcttggtaacacagctataaaccacaggagatctttctaagataaatagtaaggaaatgactagtcaaataagctgttttaattgttgtcttttctcaggagacaatgctttgtatgaggcacgtcatctcttcccagttagactgggaacctatttctgggttttctgtaatgattctctggaatgaattgtcttgtgctcagtaccgtgacctcaccaaagaattaaggttgaagaactgatgtctttttgattaagtgatagtgtaatcattttatccaagtttaactggtttatcaattattcagagtgatagtaggggttactaaacctgtccctagagaattggaaagagatgtgtgtgtggtgtttttgtttttgtttttctgagacggagtcttgctctgtcaccgaggctggagtgcagtagcgcaatctcagctcactgcaacgcctcccgggctcaagcaattctcctttctcakccttctgagtagctgggattacaggcgcacgccaccaggcctggctaattttcttgtatttttagtagagacagggtttcaccgtgttggtcaggctggtctcgaactcctgacctcatgatccacccgcctcggcctcccaaagagctgggattacaggtgtgagccaccacacccrgccatggagggagatatgtttttaagtgtcccttggtgaatctgacttcatcataattatcatgccatgagttgagctttctgaaaggtctctggactgatcccaaaaaatctgttaaaaattagaataaccagtacagctttacttttcactgacccatctttctgtttgagattggtaggattgttgtcattgacagagtgaataccatggggcatcagtaatcaggatgataaaactgactggtttcctgtgattaccttcttatggcattttgctccaaacagactgagggaccaaaatggtctgatagagaagtgcatctacctcggcagacctcagcatggtcccttcccgtcagacagatttctgtagcatttgcctccgcgtgttatatttggaattgttggccagctttcctctctctggtgttggcagcgagatccaaaatgaggttttcgaagaatgagagtaaaaaggtctctgtgcacaggcaaaactaagctcagcttggagttttgcatattttcagtgagtcgtaacaaaggtttcacacatagaatagaaaactgccttgcagaaaatgtttgatgtttgaagtggggttgtttgtttgtttttggatacagggtctccaaggcttgatcctagctccctgcagcctcaaactctgggctcaagtgatcctcccacctaagcctcccaagtagtgggaccacaggaacattccaccatgctgggctaattttttaaatgtttttgtagaaatagggtctcactatgctgcccaggcacgtcaagcagtcctctcaccttggcctcacaaagtgttgagattataggagtgagctgtcatgcccaacctgtttgaacttttaaggaggtggtttttctgattttgttgtgtttagctcctcattagaatagtatcaggcaagtgatagattaaaatatattaactttaacattatcttgtcagcatgttgtttttgacattgtaagtgcttagaagcctagcactgacgaactggaggtgacaacgtctagattccttcccctcgcccggccccatcaatagtaaaatgattctacagtaaacaaacctaatttggttttatgtttattttatttatttatttatttgttttgcattttctgtgttgaattagaatctaggtatgtcgtattgtctttgttttttttcttttttgagacagagtctcactctgttgcccaggctagagtgcattggtgtgatctcagttcactgcaatctccgccttccaggttcaagtgattctcctgccttacgtgtcatgttgtcttactggtccacctaaatatggaagatacggtaatgttcaattttaactcaggttcagatgcatgcttcttaatgtagggcttaggggctaattgttatgaaatgagtgcaagtgtcagaaatatttaaagtggaaaaggaggttatactcttgaaagattacagtttttgtgtaaagtaaggcaagtacttagtagtactgttatgggaaatttttcacttaaggcctgtcccaaaattaattgccatactcagtaaaaggtaggatgcagttgtaatctcatcaatctgctgctgttccttaaggctcactaagtactttacatatagctccactaataatatattaggacagttttggcttttgtaaatgacttgtgtatttttaatagatataaaggttcaaaggaatatttaggtactgctttcatttgaatctggagatgggattcatgttggtctgttgtaagttcttggtatgttcttggtaagttcaagtatgcctccaggagtatttttgaaagctaaatcagtaatgttcaataaattgtctaatcttaatttaaatggaattcaactagtcactatgaatgtgttgaataaaacactggtttttgctaacctgagtgaaagtacaagtgatacctaaaattactcagaggagctcagtgaatctttccaaggttcatcctggttgtagcatttatcaatacttacattgctttttaatggctaaacaatattccattgtatggatgacattttatttattagttcattagttgatagacacttgggtagtttctactttttggtgttgtaaataatgttgtgaacatttgggtgccagttttctttgttgttggttttggttttgtttgtttgtttgtttgtttattttttgagacagagtctagcttcgttgcctaggctgaaatgcagtggagtgatctcagctcactgcagcgtccacctcccaggttcaagcgattctcctgcctcagcctcccgggtagctgggattacagatgtccgccaccacgcccgactaatttttgtaattttagtagaaacggggtttcaccatgttggtcagactggtctcatactcctgacctcaagtgatccacccacctcagcctcctaaaatgctgggattacaggtgtgagccaccgtgccagccagggtgcaagtttttatgtgcaagttttcatttctcttggatatacacctagaggcagaattgctgggtcgtatggtaactcttaacctttggaggaactgcctgttttccaaagaagctgcattattttactttcctaccagtagtgtaggagggttctaatttctccacttccttgacaacacttgttattttctgccttcttgattaaagccatcctagtgagcgtgaagtagtatcacattatggttttgaatcagatttccctgaaggctagtgatgttaaactttttttcatgtggttattggtcatttgtgtatttacttagagatctctattaagatttttgtctatttttaattgagttgtttggttttttaattgagttatgagagttctttatatgttgtaaatataagttccttgtcgcatatatgatttacaagtattcttccattttgtgggttgtctttacacttcccccatcttttatttatttatttatttattttattttacttattatttttttgggacagagtctccctctgtcgccgaggctggagtacagtggtgtgatctcagctcactgcaaccttcacctcccaggttcaagtggttctcctgcctcagcctcccaagtagctgggattacaggcgcctgccaccacacccagctaatttttgtattttttgttgagacggggtttcaccatgttggtcaggctggtctcaaactcctgacctcgtgatctgcccgcctcggcctcgcaaagtgctgggattacaggtgtgagccaccgcacctggcctatttatttatttttagaggcagagtcttgctatgtctcccaggctggagggcagtggcacagtcataactcacagtaaccttgaactcctagtctcaagcaatcctccacctcagcctcctgagtagctgggactacaggcatttgccactacacccggctaattttttcctttttttgtagagatagggtctcactgtgttacccaggctgttctcgaactcctgtcctggcctcaaccgatcctcctgcctcagcctctattttttattttttagtcttaacctagcaaaagatggttgatttaagcacactttaatatctatgcctatattagctctgtaatgtcagtaaattaagagtttcttccgtgagctccagttaggatggtacatcccagtgaagagaaccttacgatgtgatttggtatgttgttgtttcaacttttctgcatgtcctttcctagcaaagaagtctaaagctgtattgttgccttagaggaagtacaaaaaatccaccatctgcctttagataggatgctcacctgtcacccactagccacaacagaaaatgtctgtgtttgagcacttctcatacttggaggaccctagtttaagaaagaagatgttggctgagggcagtggctcacacctgtaatcccagcactttggggagccgaggcaggtggatcacttgaggtcaggagttcgagaccagcctgaccaacatggtgaaaccccatctctactaaaaatacaaaattagctgggcgtggtgatgcacgctacttgggagtcccaagtacttgggaggctgaggcaggagaatcgcttgaacccgggaggtggaggttgcagtgatcacgccattgcactctagcctgggcaccaagagtgaaactccatctcaaaaaaaaaagattttaattgtctcagttttattggttgtggtggaaataacttcaggtcaattaaaatgtgctgtcttttgagcccagttaacaagaacaaaaagttgtttgtatattacagcaaactcacctgtgtatttgtatctttatataagcccagataacagtaaataaagagagcgcagagaatatttactggacagttttatatggctcataaaaagaaaccatctgctttgatcctcccaagaggatttttgctacctaaaaatgcagctgtcctgcttcttgaacagaaatgggtacatcttttctcccacaagaagagtaatagaaaatagattaatactctgggcttttgataatgggtaagcatactgaaatccatctctcaactttcttgtcccaaccccaacacagggacaattccttgggtatgcagttaagtaggccaccctgataaaagattccgtttgggtttatggtagcccttatatattaatgcagcacaagctcctggaaatgcattcaagttttaaggtccagcgttttaagtcaccagaacaggaaaaaaaaaaaaaaaaaagtctgttttcccccctccactgggctcctcctttgacttagaggccccagggagtacaacatggccagctgcattgccattcaatgagtgacacttagaagagaacctctgcataatgcgtgcctcccaagagaatacaggacaggagcacggctgtacccctgccagtttcctgaaagaggaggacattgtattcagtgcaagtcctagaccaaatttcagaaagccactttggtattgcagatttgtcaccatgcccaggacgcatgcacaggtcactagctgactgcttttcccaggacttgagagcagttaagaagaatgagaatgtgactcctttttctgcctgccatttccagatatcaaaatccttatcctttaagcctaaggttattcctaaacctaagtctcagcaaataaraacaaagatgaggttttagcacattttgtgtgaggcaaaagctgaggcatacaatagacactaataaaaggaggaatccatgagttgacccatcagcaggaaggaacttgactactacatagagctgttgtggaattcacaataagtaaattacatgtgcaccttgcagattgatgcaattttcaaagtaatgaaaaacttgacttgctcactcagagagtgagtcccttttgctctgctgcctactttcccttttgctacaatcgtactacataaatgctcactaaactacttaaaagccggaggctgacccatttcctcttctcactgccgtgtaattcctagtggtattacagatgagagacatgcaaaggtaaacagtagttggggaacaaaaatgatatctgggttattccaagtggatgatacctttgttaacacagacacaaggtgaaaatttcttttcccctaattacatttgctttcttttaagttagtgactttggtgtttaatttttgcctctcccctgttttctgacaaattttatgggatatctcccaagaaatgtttctcagccttgacaggacaaaagacatacagagtaacagcagggcagggagcaactccgtgcctgaatgtagcgtcagtctttcctactgatctgggctctctgcgtgaggctcgttttgaaataagcttgagtgagcaaaagaggactctctgcagggtttgaatttaacggtagcccaaagacatcactttacctccaagccaggcagggataggggaacctctcagaattactagcaagcttgagttccaggtggacccctgtttgtggcagcacaagcatcttttttactcagctatggtcctcagagggatgttgaatattatttttctcctgtctgcatttgtgcagagaacagagcagagaaactaatgaaatgcacagagcttcaagtgaatttaaagaagcctctgcattatgaaataaggcaatgatgacctactcttgcttttctttccactacccctaggctcctgtgatcagctgagtgctcgttaattcccacgttcactaaaccatcatagttctgctgattctcagctttagagggaaactctacagtgaactttttcaattagcagtcatcaattactggtcagaatacattataattgtgaaaattatrctccattaatctcattaaatgtgcctaaacctgtaacttgtcatagttcgatacataggttggctatatttaactttccctgatcttatttgccattttttgcaaaagcatcatctaaaatgtagagagagttgtcagtaattttggctttttaataaacattgttttgctttgtcatttttgttttgctgtatccctcctttgtggtccttgttgttttgcctggcatgggtgacacttagccattttaacttagcaaactgtcataccaaaggaaatgcctaattctgtgatatyaggcatctgactgcaggctacagtttgttggtgttgaagtaagctgtatgttaagaaaagtatctccattttatttgttatagcaaataacgcatgtccaaggtttgtatgcttgctgcctttctttgagggctttcctgagtgctcaccgtttgtgtgtacacatgcagacctttagggtgatcattctttggttagggaccatctgaaagaaaagtggaccaaaggggaaaatcatggctctggagaagtatgttcaactcataaataggtcactggtgggtataactggaaggctttggaagcccaagtcagcacttagctgtggcatcaaaccatgacagcacagtttgacagcatgcccaggagattacttcagtcctgtagggtggggagctttgatgtttatgagtggaattgggggatgggagagggtaagggtaaaagtaggggggtataatccctgtgctggcatggcccaaatagtattattctcactttttcctgtttctatagaccctgtcaggggagggtaaattaaaccaaagtccctccttaggaaaaagcagctgggtcttaagtagaaacctgctctcaggctgggtgcggtggctcacacctgtaatcctagcactttgggaagctgaggtggacggatcacaaggtcaggagttcaagaccagcctgaccaacatggtgaaaccccgtctctactaaaaatacaaaaattagccgggtgtggtggtgcctgcctgtaatcccagccgctcaggaggctgaggcaggagaatcagttgaaccgggaggcggaggttgcagtgagctgagatggtgccattgcactccaacctggatgacagagtgagactccatctcaaaaagaaagaaagaaacctgctctcttgattttgttgggttttaaatacattgttagtattttttgttttctgagcctttatagaattttaggtacaatatatataaactgtaaactggcccacattcctgagctgtgtctgcaagaagtgtgtcacctggctatttcctttttcttgatagtctgttaaaatttggcaatagaatagtacccagctttccatacctctgagactcttccagaatacagagttggcagttgttggttcttccttccaatggaatgttcccaagagtgtgagaaaattaccgttgaggccagaattttgtcccttttccaaaacaggtgggctctagcatcaatcatgaggtgaattaatgaaggccctttttaaaatgtttgcaccccagcccatctttctttgtagagaagccagaattgcaagaatagccaaaccaggctagtgatagatcaggcccttgagactgaggctcagcttgtagaaaagttagcagaggcaaacacctggtataactgtcagtgctctaccctccctgcttccttttttccctgtactaactagtaacactcgtatccaggtgtcctttaccgggaagatgccaccagccagctctacatagaaggcgataaaacttgggggcacagtcagccagtttaaaaggattgtttgcctgtggaagtgacgcaactagctaagtttctcaatggggcatttgtaatgttctggcacttcatttgtttccttgttaacactctcactgaggctttgcatgagaaacccaacagtccttgtacctttttatgtactttgtggcattagtggtgtttgagtcagtagccaggatgaaggaggataagggattaaggttgagggaccctatgaattttctccttccatctctttaatatccttcaatatagctatcttcctgcaaaagacaggccatacttgaagagaaaagctgatgcccacacaagtgtccagaggaagctagctatttctgctgacatttacatttcattaaatgttgttccctcaaggcatgcactttaaaatttgggtgtattaatgcaacttttaatttaaattaaaatttaaattaaactttacccagcaccacttagcttttccaggacataagtttgttttcgtttataaaaggctggttctctgtgctcatggctccctttatagagcaaaatggctgctaggaggctgagacatgattgtggtcctttcagtgatcaccttcactccccattttggctagtatcaacacattttctgagctggatgagggccgcagggccagtctgagggagagtaggctagttctgagcatgtatttatgttttgcagtttgtcttacacagtgagactaaatataattgcaggatttttatctggtagtggtcctcagatggatggatgagccccgtgaactgtgaaattaaaaatcaaaactgctcagtcctattgtttgcttgctgaacacctcttcccccaccaaaaaaaagggtggggaggcatacagatgatgataggggcagtgaactctttctttttagtccaactgatgttttattttgactgaaactgaaactgctatagatggctagagagcttctgattcctgaagaattacgggttctgacaagaaagaccctaccagttcatgtgactgacctcttttggaagagaacctgcttagtaggctgttggtgtattgtatatggatatgctatttacatagtgttcctgttaagtatttgtattaaatagaattattttgttaatccagaaagagaaaatggagtgtactttttcttaaatatttttcatctacttgctttctctccctctacctctcgcctcttccctttgttctcttattcccccatcccccgctctcccctccaattccagactgagaaactgcttgttctggatggataattaacatggtgctgtggagcaacaggtcccactggtagcgactaaatctgaagtaaatgttaatgtcgtgcaggttcacatgtattaataggcgagggagatgagtgaggttagactcagatcaaccacactggtatatgacttgaaatagatcctcttaattagagcgccaagaaccatgacaactaccaacatcttctacttgcagtgttgagctgcagccttattagtgaatgcaaggcattctaaattaaaactgaactttaacctcgggctgagagttgggatcatctggctctgggcttcgatttgaatctttgaaacagaaatctgtcagtataggcattacagttagctgagggatgtatgtttgtggttttctccttgatgactccagaaatagactgatctagataaccttctcagcagtagagatgggccatttggatttgtttatgggagtctaggtatgttggagtcatgctgaagaggttggctttaggaattggtttgtatgttaatattactcttaacactttgtaggccctctaggcctcacagagagccacaccaaactgagaaacataccctccaattgaatgtacagtctctgaagatttagggctttactgttatgaacagctttataactaacagcatgtctttaagatcaggtagtggttaaaatagtgagctggggccaggagtggtggctcacacctgtaatcccaacactttgggaggctgaggagggcggatcacttgaggtcaggagttcaagaccagcctggccaacgtggtgaaaccccatctctactaaaaagacaaaaattagcccagtgtggtggtgcatgcctgtaatcccagctactcaggaggctgaggcacaacaatctcttgaacccgggagacagaggctacaatgagctgagatcgcaccactgcattccagcctgggcgacagagtgaggctccatctcaaaataaaaaaataaaataaataaaataaaatagtgagttgtaaaagcagtgaacggtcgctttctggccaggaattgtaggccagggccttttaacaaatgatctggtaggaaatttatcaacagcagtgaaaatgggaagatactctgcaagagctctgtcttcatagggcactgtcatctctgcctatggaaaagaatgcatgtctcatagcaatgcaggctatgctcttttgaagccagaaaataaagtagaggtccttggcttgttggctaaaaagctaccagttttccaagacaagccagttcaggtacagaagacaactattccagagctcaccatcccaagtactcagataattctcagaaggaatctaaaggttcaaacatgctggacacagtggcttacgcctgtaatctcagcactttggaaggcataggcgggtagatcaccttaggtcaggagttcgagaccagcctgaccaagatagtgaaaccctgtctctactaaaaatacaaaaagtagctgggcgtggtggcgggtgcctgtaatcccagctactccagaggagaattgcttgaactcgggaggcagaggttgcagtgagcagagatcgcaccattgcgctccagcctgggcaacagagcaagactccatctcaaaaaaaaaaaaaaaaaatagaaaagaaaaaaagaaagaaaagaaaggttcaaacactattgtgctctagacagacttaaacattcattttcagaagaaatgtctccactgctagaaccttccttttatcaggtattttatcaaaatgcagaaatatacctgcttctgaaactatggcttcctcctgaactcctcacgatccttaacttcactgtctttaaaggctcactggctgaattaccatttgttaaatagctctgaattatgaaaagagtaggaaaaaatcgcatgtcaccttcaggtaccaaatgtccaaactttggggctcttcattgattctggcatccataagtaattgagttttatgtgggtctttatggtaagaatcagtttgtagttgattatgtatgttctcattactgcatgtccttttcaccttatctccagcccatgatccctaaaatcaagaaccatgtctgaaataccagcacttagcacattgtctagcctaaaataaacatccaataatttttgagtggatggatgattttgatcctctctccccaaggctactttttttttgaggcggggtcttgctttgaagcccaggttggggtgtagtcgtgtggacatggctcacttcagttttgccctcctggactcaagtgatcctcctgcctcagcctcccaagtagctgggactacagatgcatgccaccacatctagctcatttttgtatttttgtagaaatggggtctcaccatgttgcccagcctggcctctaactcctggggtcaagtagtcctcccaccttagcctcccaaagtgctgggattacagatatgagctacagcctggcctagactacttttttgatggggtagatgataatttgtttgctttgcgttcatttttcagtgtggtacctagtacattgatgagaaagtcatgggtactcaataaatattgactgatgtagaaggaaatgckcagccttgaggttaaggagggtaccctgatggatatttcactgtgtaccccagaaataagaagactactaaaggttcttaaaaaacaacttgggctctgaagcatatcctgagagtgaaccaaaaacaaaacaacaacaacaaaaatagcttaggctcaagatttcaaagagccaggaaactttgatttgggttccagttctgctacttagtggctttagataagtcagtttcctcacctgtatgatgggaataagaattatctcacagtatggtagtgaagatcaaataagaacatctgttaaaatactttgtgaactgtaatacctagatgtcaatgaaattatcactatgctatttctaggctttagtttaagaaacacattgatgtctttacaaaagcagcattgtctcattatagtgttttcactgctaagcagctgaaactctggtagagtaatctcagtgttacgtgacttttaacttttaatgattttttcttataaaggacrgcctccaggaccctgtcttcattgatacatgaggatgagagggagcgagggcagagcctttttttcttgacaggcatatcatgatttaaagactctggtgtgcatgtaattgttttcagagttgcacgctaggcttatgggaataccattcttccaaggaagraggggtttttgtttttgtttttgggaagaatctccygtcacccaggctagagtgcagtgatgcggtctcggctcactgcaacctccacctcctgggttcaagcaattctcttgcctcagcttccccagtagctgggactacaagtgcacaccaccacacccagccaatttttgtgtttttagtagagacagggttttgccatgttggccaggctggtctcgaattcctgacctaaagtgacccacccaccttggcctcccaaagtgctgggattacaggcgtgagccaccacacccagctgcggaaggagttttgagatgggcagctgaggtggggagtcctcagaataagtacatgagtaccgtgaggctgcagaatctcctttctccctggaatcctttccctgtcagcagtatttctgatatggagcaaaacagcctctttcagaattggttcctgagcttaccccaatgacagtgtctttcctggaaccatttcatgaatccctttcctctaaaaaatttgcattgagccaggcgtgttggctcacacgtgtaatcccagcactttggaaggcagaggcaagcggaccatttgagcccaggagttcaagacccagccttcggcaacatagtgaaaccctatttctacaaaaaatataaaatttagcccagcgtagtggtatgcgcctgtggtcccagctactcgggaggctgaggtgggaggactgcttgagcctagggggtcaaggcttcagtgagccaagattgccccactgcactccagcctgggtgacagagtgagaccctgcctcaaaaaaaagatagaagtttgaattgaaaagctgccttctaaatagcttgaaaggaattaattgcttgaagcagagaggaaacatggtcatgagaaagctttatgatgggtgattcttgtgttccagctatgcctatgatgatcattttctaagacctttctttcctatccatctaatcttagatattactgccttctcccaagataccatcatttcaaatttgttatttcaagatgcatgttctgtccctaagaaagcagcaaatcttggccaggcacagtggctcacacctgtaatcccagtactttgggaggccgaggtaggcagattacttgaggtcaggagttcgagaccagcctggccaacatggtgaaaccccatctctaaaaaaaaaacaaaaattagctggacatgggggcaggcacctgtaatcccagctactcgggaggctgaggcaggagaatcacttgaacccaggaggcagaggttgcagtgagccgagatcacgccactgaactccagcttgggtgatacggtgagactacatctcaaaacaaacaaaaaaaaagcagatcttaagaagtgatggcctcagccaggtgcagtggctcacgcctgtaatcccagtactttgggaggctgaggtgggtggatcacttgaggttaggaggtcaagaccagcctggccaacatggtgaaaccccatctctactaaaaatataaaaattagccgggtgtgatggcgggcaacctgtaatcccagctactcgggaggctgaggcaagggaatcgcttgaaccctggaggcagaggttgcagtgagccaagatcgcgccactgcactccagcctgggcaactgagcaagactccgtctcaaaaaaaaaaaaaaaaaggaatgatggcctcagtcttttaaatgttttgtcttcatctgggagacaatgcttgggtttccctggactactccctaaattcatagcccctatccatactttagggcaggcttaacaaagggagcctgtggtcattatctagagttctgaggaatgtgtggttttgtttgtttgttttttgttgttgttatttttgagacagggtctcactctgttgcccaaactggagtgcagtggcacgatcacggctctacctcccaggctcaagtgatcctctcacctcagccccacaagtagctggggctataggctcatgccgcctcacctggctaattttttgtatttttagtagaggtggggtttcaccatgtcgcccaggctggtcttgaactcctgggctcaagcaatccacccacctcggcctcacaaagtgctggtattacaggcatgagctactgcacccggccagaagtgtgttcttaaacttggtaactctaaaagtgatcctttagaaactagcaagatgctacttctgagagcctcttaatacaagtttaagcattttaccttgtgttaagataaacgatattgaaaatcaaattgtttaaagaagattaaaatgagtagaggtgggatggttcagtaagtacaggcttgccagtatggacttggactcctcttctgtctcattgtgtagtaacttagaaaacataagtaatttcatgtgtgatttaacccacaaaacagttgcctgccccattgcattacctcccctcatagctttgaaggattacastcacttcctagaagcccattccttagtgttccccagttctttaaagctttattgagtacttactacatgccaggcattgtacagggtgtggaggtacaaaggcaaatgaggcatggagaaggggattcagacatgtaatggtttgaatacagtgtggtgcagaagtgctctgtggaaccagagactttcagagaaagcttcctggaaagaatacgtgacttgagtctcaaaagataaagagcttaccaggtgaagtagttagggaagagtggtgtagttgtgggtagcagccctggagtgagcagagacacagatgagaaacagtatggtctgtgtagggagccggccaactgattgagctggagaaagaagagggttctggccacaggggtcttatcttctctactttaaatgttttaaatgtttgatgtaggatatcttggtacaaagccagtgggcagatgaacagaaatgatgagaaacagaatcagaagtgacacccttcagggttaattttgataggacagctactgaagcatagcagagtctgtaggcctttgaaaattacttgcatgcatttcagtagtttagatgtggccttttgtagaattacattggctagaatgagcggagacttacaggtgacattcacctgtggtcctctagggcttggagatctgtcccagcaggccattgtttttccagtttcctgattcctggtaagcatcctcctgagatttcactaaggaaacagggaggaagggaagtaatgagctgtgaagccttggtgggcatctgacatgtaagcttggggctctggggaaacagggagctaagaaaatttgccaagtcaagtgctattttatgtagaaatggtaaaacagcatagctttaagctctgagatactcaagtttggctgggcacagtggctcacgcctgtacacccagcactttgggaggccgaggttggtggatcacctgaggtcaggagttcaagaccagtctgaccaacatggagaaaccccatctctactaaaaatactaaaaaatttgccaggcatggtggcgcatgcttgtaatcctagctactcaggaggctgaggcgggagaattgcttgaacatgggaggcggaggttgcagtgagccaagatcgcaccattgcactccagcctgggcaacaagagcaaaactccatctcaaaaaaaaatactcaatttttttttttttttaccatttcccccattatttgaagaaaaatttcctgcataccattccaagtaggtgacttagccaagaactcaatggtaggaatttcttaagcataaatgtggtttttgttgttgttgttgttgttttgtttttgagacagagtctcactctgtcgcccaggctggagtgcagtggcactgtctcggctcactgcaacctccacttcccaggttcaagcgattctcctgcctcggcctcctgagtagctgggactacaggcgcgtgccactacacccggctaatttttgtattattagtagagacagggtttcaccatgttggccaggctgttctcaaactcctgacgtcgtgttctgcctgcctcggcctcccaaagtgctgggattacaagtgtaagccaccatgcctggcctgttttttggtttggtttgtttgtttgtttgtttgttttgagatggagttttgtcacgcaggctggagtgcaatgacataatcttggctcactgcaacttccgcctcccgagttcaaaggattctcctgcctcagcctcccaagtagctgggattacaggtgcccaccaccacgcccagctaatttttgtatttgtaatagagatggggtttcaccgtgttagccaggctggtcttgaacttccaatctcaggtgatctgctgtgtgcacaacctctgtattataaaaatacaaggagggaagagatccaatcattgtcctagtccctctaataaaataagtaagagaactgctgaaatgggcaaagcatgagaagtgccaaaagagaactaacccatgcagcaagaggtccaagatacaggagtaatatgaactcatggaaaagctgtttggttatctattgttgcataacaaactacgccaaaactcattggcctggtacagaaactcattattatctctcacagttctgagggttgcctgggctctgctgggtggtttttctgtttcacatgatgttggctgggactgcagtcatttggaggcttcactgaactggtaagtccaagatgactcactcacrtagcagtagttgctgctgcgtgttggcttggagttcagctgaagctggttttttgttttctcaagatggagtttcactctgttgcccaggctagagtgcagtggtgtgatcttggttcactgcaacctccacctcccaaattcaagcaattcttctgcctcagcctcccaaatagctgggattacaggcatgtgccaccatatttggctaatttttatatttttagtagagatggggtttcgccatgttggccaggctggtcttgaactcctgatctcgagtgatccaccagcctcggcctcccaaagtgctgggattccaggtgtgagccaccacgcccagcccaaaactgttgattggaataccttgtctcctccatgtcctctctcatagcatgacagcagggctctgagatggaactttccaagcatatttcttaaaaaatagaatctgcagatctcttaaggccaagctttggaagttgcaacattgtcacctctgctgcattctgtggtcaaagcaagtcataagacaagcacaattcaagaggagggaaagggactacctgtggatgggaggcagagcagataatttgcagctgtctttaatccatcacagctgattgaggcaggtatgaaaggatgaatagagttttgacaggcatagctttctaaaggaagagtattctagaggaagaaataggaagtcttccatttgaatagtgggaagagcacctgaaggggtctgggaagatggaacggtgggaccatgtgacagggctttgaacagcagttagaaaagcttggctctacactaacaggctttaagaaaacagtgtggaggacctctsagttattttattatacctttccctacaaacccagtgttaatagctctggatttggcttctctctctaaggtgtgggaagggatggtcactccttaggttattatgagtgatgctgacttaggcattttggaggagacaaccctagcagtcctgcaggactgrccacaataggagtttaggaacatgcaaacctagctaggcttttcctactgcctcaaagggctagttatttagtcttgcccttgtctgttccccacagtaaccctccactgagtgaagaaatgttgcctcctggagagtggatgtgtcaccggtgcactgttcgccgaaaggtaataatgctgctttctgaagactgtccagaaagcctgatccagagcactgatatgctagagctaagacggcctagccctgaaggcattcttgtcccttcttcttgtctcttccagccctggaatcaccccactcttcccatggtgactgtttggaatccagtagggcctaaaaatccaaacatgggctgctgaaatgggcagaagaggtgtgttaacttactgagccatgtttagtcactagtgacaggagtagtcttaccttcttgttgtcctcctaataagtggccttatccatggctgaaaaacaaaggctgcttctccagcttgatggaaaatggagttttctctcaccccagggcaaataagtcactggtatccagagacttggcatactgacggagaggattttgaacgcatttgtaccccaagttgcctaatctttctttagcttcccttccttcagctttgataattcagtactggcttcaagaacatggtttattattttctactttgagaactcttgtgggtaacaagagctaaattctcccttattaaaaaaggaagtaggtgtgcttgcacccaaattatgattgacccaaccctcaaattacaggctatggattagaatttgtctgtgcattgtaatccacccccctgtgctccccacactaattatacaccaagcaactttcctatgttgtgacctcacctctatttgcctggtccccgaacatgatgtcacaatgaatgatgacttccttggttgcagaaacaggatgagatgattaagattgtggtttatgtgtgtaacagtttcagcctttaagaaagaaagtaaacaagcagacattatttttcaaatacgtgcataagggttcatatttaaaagcaagccaaagccaggtcaaccacctaaccacagctgtagttaaatttctccataaaccaggctgtcttccagcctctccaccttccaagatcctttcctgtgcatccctaattaggttagagcarggcctgttagaggcacctgccagccaggagccctctcaaacttgccactcaaaaaagctggacctgaaaaggtttaggggagctgaaggaaaaggggtaaagacggtggagaaaaggaaatattatgttagtgcccatcgtgtgccaggtgttttaattacgttatcccattatctatccatccagccatagatggataccgaatgctggccgtaggtttccattttagaaaggaagaaacggaggctcaaaaatgtagattaactttcccaaggactcaaaggtattgacagaaccaatgtttgaaccaaattctctcattccaaacctctgttacctcttcatcagttttctagaaggagagctacttgttggggattacagtatgcccttttctaacatggcacttctcctgagatgcctctcttacctttcacatggacctctgcctaccagtgccaagtctgccttttccaccatcaccagcactactcccctttggcctcttgtatttacactgaagtggattgaaataatacatcctctggccttcatcagctcctgacattcaggccctatcatgattcgtagtggaagactaggtcctactccaactccaaattatccctttcgtatatatgaccctttttatctccctccaccatatccctgagaggaggaggagaaagatttttctgtctcattttacagatgaagaaattcctgcccaccagcctgagtcaccacaaggtcagaggggatccgtggcagaaataggacaagatcacaggtctcctacctggagatcagtgttaaaccttcatttgaccactctatttggagtcctggaggaaaatgtactatcagatatccagtcctactgagtacacttaatctttttccatttccccactttctaagaagtgtcacttattttgagcaaagtttttatttttaaaaccattcaggaggtcagaaggctctatagtgatctcactgattttttttttttttttttttgagatggaatcttgctctgtcgcccaagctggagtgcaatggcgcaatctcagttcactgcaatctttgcctcccaggttcaagcgattctcctgcctcagcctcctgagtagctgggattacaggcacatgccaccacacccagctaatttttgtgtttttagtagagatggggtttcaccatgttggccaggctggtcttgaactcctgacctcaggtgatctgcctgcctcggcctcccaaagtgctgggattacagacgtgagccaccgtgcctgccccattgatttttactattggtctcactaaatttattctcactgtgttacctttttagccctttaccctatactttatagatgttgtatgtcatacaatgagttaatgttaatgatatatattttgtatagttattcctaacttaccatgctttttggtgattctctgatgcaacagttttgtcagctttagttcagttagagttgtgtcaactttaacagaccagtgttccaagtgaccaggtagatgagtctgtgatatgtgaaggccttttacagttttgattagtggtctaccaggactttgtagcacccatctctttgtttcatggtacttttcatgatgggcccacctgttcatttgcacagaaacgagagcagaaaaaggagctgggtcatgtcaatggactggtggacaaatctggcaaacggactacatcccccagcagtgacactgacttgttggacagatcggccagcaaaactgaactaaaggccattgcccatgcccggatcctggaaaggagagccagcaggcctggcacacccacatccagygccagcacagagactcccacctctgagcagaatgatgtcgacgaagacatcattgacgtggatgaggaaccagtagcagcggagccagactatgtgcagccccagctgaggcggccctttgagctgctgattgctgccgccatggagcggaaccccacccaatttcagttgcccaatgaactgacttgtaccactgcactaccaggtcagccaaaccatcatcatatcccttcccaaccccagtttccccaaaggaccagcacaagagcagtgctgcctgtggagtcactgttcatgtagctactgtcttgggttcctgttcctagttctgcttggagagatctttgaaggtcttagccattacagagcttactcagttttccattttctcagtttctgaacttctttccttcccctcccccagaattatctttttccttttttttttttttttttttttgtgagtctcactttgtcactcaggctagagtgcagtggcacgatctcggctcattgcaacctccgcctcccaggttcaggcgattctcgtgcttcagccttccaagtagctgggactacaggcgcatgctaccatgcctggctaatttttgtattttcagtagagacaggattttaccatgttgttcaggctggtcttgaactcctgacctcaggtgatctgcccacctcggcctcccgaagtgctgggattacaggtgcgagtcaccacgcccggccccagaattatcttttaaaaaaaaaaaagtattatacattcacatggttcaaaaatcaaaaaatattaagggctacaatgaaaatttccctcccacccgtctgccatttgcctactttccaccttcctgctcttcacaggtaaccactggttgattcttgtttattcttctcaaatttctttgtgcatgtaaaagcaaatacagatatatgctgattaattttcccttaagtaacatgctagttaaaccattctacacgttgctttttttttctcactttaaaatatgttctagaagtcttttcatattaatatagaatttttttttttttgagacagaggctgcactgcactgtggtgcagtggtgtgaccacagctcaagcaatcctcccacctcagcctcccaagtagctgggaccacagktgtacaccaccacactcagctaatttttatattttttataaagacagggtctcactatgttgccagggctggtctcaaattgtgctcacacgatcctcccgcctcagaggatcccaaagtgctgggattataggcatgagccactgcgcctggccttcttgctttttttaatggttgcatagtagttctttgtacagatacgtcataatttatttaaccagtgccattttctattaatggacattttctattaatggacatttaggttccaaatctttcattactactggtagtgcttcagagaataactttgtaaatacatcattatatacatgtatagatgtgtgactatgtctataggacaataaaattgctgggtcaaaactatatagttttgatagatattgccaaattgtcctccattctttttttttaagtcctggcttcttgatactgtaaagcttctaggtcttagtttttattcccaaagaaagtgaaattggtaggcttaagaaggatgcatatagaatcaaagcttctctgatttttatgaaaatgtgggccaggtgtggtggctcacacctgtaatcctagtactttgagagatcaaggcaggaggattgcttaaggccaggaattggagaccagtcttggcaacataatgagaccccatctctcaaaaaataaaaataaaaaagttagctgagtttgatggcccacacctgtagtcctggctcatatggaggctgaggcaggaaagttgcttgagcccagtagttcaagactgcaggccaactccacagaatagtccttgttgactatgtggcttggacatttacatttcttaggttgcctgtatctaacctagcatttctgaccattttatgtttgcaaaacagttagatgtgtttctgccatagaacaggtgacttctggttctgacttacgtattagtctctttttttttcctccctaatctttcttttttctaacttaaaatcaaccccaggggcctcagagagcaattcatgcttaggccatgacacatgcttaagatctgtttttgtcacttaatgttgtttccatattgcaggctaggaactctgaagccwgggatagctcagcaccatcattttcttttctaggttctagcaagaggagaagaaaggaggaaaccacagggaaaaatgttaagaagacacagcatgaattagatcacaatggtctcgttcccttacccgtcaaagtctgcttcacgtgtaacaggtattttctttcatactaaggggctctttctcattatttagcagatgatactttttctctcatcacctcttccagaccatgtatgttaaatgtgaacagcccatattctgatagtatgagtacatggagactaactaatggactgacgagagccttgaatgtgtatgtgttaacaaattttctgaagaatcacagtacaggagtactgtgaactgtgttgaggccgagcacggtggcttatgcctgtaatcgcagcaatctgggaggccgaggcggtcagattgtttgaacctgggagcttgagaccaacctgggcaacacagtgaaaccttgtctctacaaaaaaaaatttttttaatgaaccaggtatggtgatacgcacctgtagtcccagctactccagaggcttaagcagattagccctggaggctaaactgtgatcacgccactgcactccagcctggtcaacagagcgagaccctgtattttaaaacaaaaacaaggggccgggcgctgtggcacatgcctgtaatcccaacactttgggaggccgaggcaggctgatcacaaggtcaggatattgagaccatcctrgctaacatggtgaaaccctgtctcaactaaaaattcaaacaaacaaaaaaaaattagccgggcatggtggcaggcatctgtaatcccagctactctgaaggctgaggcaggagaatggcatgaacctgggaggcggagcttgcagtgagccaagatcgcgccactgcactccagcctgggcgacagagcaagactccgtctcaaaaaaataaataaaaataaataaaaacaatggcccggtgtggtggctcacgcctgtaatcccaacactttgggaggccgaggcgggcagatcatgaggtcaggagatcaagaccatcctggtcaacatggtgaaactccatctctactaaaaatacaaaaattagctgggtgtggtggcacgcacctgtagtcccagctactcaggaggctgaggcaggagaatcacttgaacccaggaggcggaggttgcagtgagctgaggtcacgccactgcactctagcctggtgacagaccaagactccatctcaaaaaaactgtgtttacacactagaacaagaggagttggacttaaactaaacattaacttgaatcactaaagataagtttaaaagtagtataaggatctatgatagtgtgtattggactggatgacttccaaaagcccctagggctgccccagttatagtctctgggacactggtttccttcaaataggatctctttgacagaaaccagctgcttcagttactgaagctggacttgttggcttgggtgtgttagaaggactgtattatggtcagagcagggtagcaagagaaagtaactatcaaaaagaaatgtttcacagcaaaaggtatagggaaagggaactagatagtagagtggcagaactctgagccaggacaaactgtggctccagtgcatcttggggaccccaggagtattgtagttacaaatcgtagttgtcatttgcttagtcctcttttgaaccctgcttacatgaatacattacaaaatcatctttccagcacacctctaattgtcagttctgctgagtgcttcatgcagaagagaaatattttcttgctatagttaagactccagaaaggttgctagtgatttttttaatgaagtaggctctctcttttaagaagtaggaagatcagagcagagttcactgttttcccctagtgagtactgagcattgatcatccctactctgccactttagctgtactccaaataaacattcactttcccgcaagacatgttcttcttagaagagagaataatgaagaacctaatgggagcccccaaatccatccatgttgtttttttgttttgttgtgttctgttttgttttgtttgagatagagtctctctctgtcacccaggctggagtgcagtggcgccatcttggctcactgcaacctccggcctcctaggttcaagcaattctcctgcctcagcctcccgagtagctgggattacaggtgcccaccaccacgcccagctaattttttgtatttttagtagagacagggtttcaccatgttggtcaggctagtctcagtctcagtctcctgacctcaggcaatccgcccacctcggcctcccaaagtgcagggattataggcgtgagccatcgcaccagccccatccatctttctaatcataaatgtaactgaatcactggaggaagataggggagaatgttaggatcaaggaggggaggctgttccacaggtcaaagttagtttgaattttccttttcttgccacagaaatggccaacatctcttttttgcaggagttgccgtgtggctcctctcatccagtgtgactattgccctctcctgtttcacatggattgcctcgagccgccgctcactgccatgcccctgggcagatggatgtgtccgaatcacatcgaacatgtggtggtaagcacagcagtgtccattcagtcctcaatgggcatagctggagcgtggactgattagcagaaagcatattaaggtcagcttggtgccaagttcaccacattgtcataggtactggtttctgcaggccaccctactcaattctgatcattttgacatatttcagctatgctttttctcacaatgttttgtttcagctgcccatacagacttaactcactagtgcttggttgtttgtaagtgacttatagggaattaagcagttgatgttatagccctaaaaggggagtatattagatccaaccttaaggaaataaatcgttggctgtctggggtacatgtgtcccaggcaccaaatgaagtttagtaaataagctgttgaatgaataatagtgtgaaggtcctattgctttctcttccaagagtcttgggtttattttccagactgaggctagaaaagagctgtcacttgctatctccaaaagaagtttaggacatctctttataggcagttagaacagtcactcacaagattgaatgggagaggatttgaggaggaggagctccctcataagagcagccttccaaattaaaaaggctactgcttaagacattgtctgtcaaatgatgataaccatggaatgaccgttggccttcatggcagtgtgctgctgaccttgcactgagaggaacctcggttaaagacttgcacacatggaagagaagagttactttgtgttcttttgactcatgccagtcaaagatttttctaggaggaaaatctagtcttgttttgcttccttgtttctctcctagtcttgttttgcttcctgatgaaccagaaaaaaaatgaccataagcagtttacccaaatgtgaaacttaaagagcagctttctagcagttgagaaattcttagtgggttaaatttttgttagccacttaaaggtttttcctgatttatgaattaggcagctgccacagcaggtcctttcttttgaattaaaatgtaggagcccagatgtagaataggaaaagtggcataatttctgtatgccttcgtatattattgcagaaactcttctttcttttctccttttggcttctaagagcaatccaaggttttcccttccagtagaggaagactgatatcaagatgggttaacttatgctccttggtaccacggagtaggagtagagcagagcacacggatttctggttctgacccagttgtcagccaagctcctatgtaggacacagtcctgcttttcctattagagagaggcccttcctgggaagggagtgtgggtctcttaagggtcgaagcatacgtcttctctgaaacctgtgctgctattagagggccctgacagaggcttctctgagctggaacagaagactgtcagaggccgaatttggaagggcacgtcttggctaatttctcctgccttccttaaggctctctagggaacaggaacatattggctctcttccactggactgggcagggctgagtaggaagtctcatccatgttcccttgctctctgacaaagagtgccgacatcctggtccctaattgagggaacctatgtggctgagggcttctagtttttaaacacagggaatggggttaactgggataggaggtgccttttgaggctcaccacaaggttgtgtctgctttgtycctagctgaaccagaagaatatgacactgagcaatcggtgccaggtgtttgatcgtttccaggacaccgtttcgcagcatgtcgtcaaagtggacttcctgaaccgaatccacaagaagcacccccctaaccggcgtgtgctccagtcggtcaaaagaagaagcttgaaggtgagtcacaatcaggtgcaggcaagatggtagtctgcctgccatcatgggttagacagaggatcactgtcccaattttacaggsagggaaactgaagccccagaaataggtttgtggtgtctcgtgagtaatgagtgtgaccttcattttaatacttggggatgatggtcaggattatgagggccgaacctcaagttagccttcgaagtctaccagtctctagttttccaaaggataagcactcttcagcccatcccaccaaacccaaatgtgctctgttgttactgccaccctcacctaacgctcattctatctgttcctgttagatggcctctgtccaagaggcaaagtaaaggtggggatgattaagcagaaagagccatgtggaaggtgaagagctaatcccagctcaggaacttaagtggaaaatatctaaaggaaacttgaatctatttttccaggctgctgttaatatatcaccaatgctccaaattgtggcatagctgtaataatgcctaatatttatatgctcttgacattggccaaagtgtgtttacagagattgacagaaaaatttccctccttgaaaagcatttggtggtagtgaggatgtttttaaaccattcaatcccctcattcagttaacctagagggtccaacactatatacccatatataaacttgtttttctcttttgaaatgatcccacagtcttatgtgctaacagaaaccagcacttctcaagtatggccacttggtggcagccacattttaaaatcaatcacactggccaggcgcggtggctcacgcctgtaatcctarcactttgggagaccaaggcaggtggattacctgaggtcaggagtttgagaccagcctgaccaacgtggtgaaaccccgtctctgctaaaaatataaaacattagcctggcattgtggcaggcacctgtaataccagctactcgggaggctgaggcaggagaatcattagaacctgggaggtggaggttgcagtgagccgagatcgcgccattgcactccggcctggacaacaagagtgaaactctgtctcaaaaaaaaaggtcagtcacaccactgccatcaccttcagtgggtatcagcactagcaagatgctaactgttgaaaattgtataacaaacttaactgggcaaatatttatacatcagtggagacacaggttttccaaaactagattcaaatatttcggaaatggatgatattaaaggtagtatgcctcatctcagtgaaacagatctaaaagtaatccagactgtgtaattcactgtgtagatttgtcagagagcatagctgctgaagtgaacgggccaggagaccttgataaaaatccccttgttgtatggtgcccctcccaccttttaagtgtttctctagtgaggaaactcaaagggcatgagttacctgcaaagcattttgtacttggacagtttgagagtgaaatgaggaccgtagcaccatagaacattggtgaagaaccccagctctctcctggaacattagcctttacacttgattctagcaattcaggaaaaatctgctgagaactttgtatcttcgttgcgaatttctcttccacttagcccttcactcttccccaggggtatcctgttcttaccccaggggtagtggaataaactagtccactgtttattcctcctcctctcattcctgggtgatctcagaaagcccatggcaccagctaaggccatcaccagcccatggtgatgactctcaactccatattccatgcctttctccttatatccagactcatatctgcctgcccatcccacagatatctcaggatgaacctcctccataagaccagaagtcttctgcctctccacatctgctcttcctcctgtatctcctattgcagtaaataacaatgatcactactcagtccctcaaactaaaattctgggaaccattttcagttctcccttgtctaccataaggattttgtcaccaaatctgttggttctctggatgttttccaaatccacaaagtgctatcacatctctatgccttacatgcttctccccctcccttatttttcctttatctgcctggaagatccttctcaacttccaagtgtcaacccaaatactgacttcctataaaatcatccccaatcccaaattcctgtcccccaaactaaaataagcactatgtttttaatagcaccttagacatgcttctcttctagaacccattaccttgtgttgtaatatttctgtgtttatctccccactagactgtgagctccttgagggcaagtcttaacttttattcatctctggatctctagaacttggaacagtgcccagacacaggaggtgctcaataaatgttggttgaatgtatgaatgactctttgcttgtgtggctctttcattcttacatggtgtgattcagagtgtggcttctgtttttgttgcacaaagacgtctttagttgtttcatgagtcatgaatgaatggatgaaggaaactgacattgatggagtgcttatcatgagccaggcctcatgtcaagcatttttttttttttttttttttttttttttttgagacggagtctcgctctttcacccaggccggactgcagtggccctatctcggttcactgcaagctccgcctcccgggttcatgccattctcctgcctcagcctcccaagtagctgggactataggcgcccaccaccacgcccggctaatttttcatatttgtagtagagatggggtttcaccatgttagccaggatggtctcgatctcctgacctcatgatcctcccgcctcggcctcccaaagtgctgggattacaggcgtgagccaccgcgcctggcctaagcatttttatctctcagtgactgctcacccactcccaaacttgacactgagcaataagaacccagagtaccactctgaagccctgtccagtgccagtcttacacctttcaggctaaagcagaagacagaacgcagtggtttctgtgttctgcaggccttagaccttgatgaaggaaagtggaggccccacctgctatttccatttctgagcctccttttcctcagcagaccccagagtggatggtcccttgagcaccagcaccacagacagaacagcataccagggcagaatcaactagacatgttggaactatctccctctccttcctccttctatctatcctgaacaggttcctgatgctataaaatctcagtaccagtttccaccccctctcattgcacccgcggccattcgggacggggagctgatctgcaatgggatccctgaggaatcacagatgcaccttttgaactctgagcacttagccacccaagcagagcagcaagaggtgagtgaaggtggggcggggattccaaatccaaccttccttctgtgtcaccacagctgttatcagaagtagcctcagtgtcattctcattccagtccccacccaccctcatcctaacccctcaagagttgagtattccagggggaacttctggctcaaatcccaaaggcaagtaagagatctacaaaggcaactggtctgcttctctccatcgttaccccagtgcactgtgagatgggcaaatctatactgtagaaagagatgagtagacccatagagaggttaggtgatagtgctggacataccacaggtgctcggggtaattgctgaatattggtcacaagtaagccttaaaggcagagtcaaaatgcagatcccaagctctgttggccagagggagtgttggcctgctgagggtacctataagtcttgcttgggaatggaaatggaattctatcaggagtcaagcacaccctttgtgagcattcatgatgggacctcggaaactgcttgtcagctctgctgcagccctggccactgtggcaggaaggaccggygcctctcaggcttctcacccccctctcctctccttccattgcagtggctctgtagtgttgttgcgctccagtgcagcatattgaaacatttatctgctaagcagatgccttcgcattgggactctgaacagacagagaaggctgatattaagcctgttattgtgactgacagctcagtcaccacctccctgcaaacagctgacaagacacctacaccttcccactaccccttgtcctgcccctcagggattagcacccagaattccctgagctgctctccaccccaccagtccccagccctagaggacatcggctgcagttcttgtgcggaaaaatccaagaaaaccccttgtgggactgccaatgggccagtgaacacagaggtgaaagctaatggcccacacctctacagcagccctactgattccacggacccccggcgacttccaggcgctaacaccccactaccaggcctctcacaccggcaaggctggccccggcccctcacgccaccagcggctgggggccttcagaaccacaccgtcggcatcattgtgaagacagagaatgccactggccccagctcttgcccccagaggagtttggttcctgtcccaagcctgcccccttccattcccagctcttgtgccagcatcgagaacaccagcactttgcaaagaaagactgtccaatcacagataggacctccgttgacagattcaaggccactgggctcacccccaaacgccacccgggtgctcactcccccgcaagcagcaggagatggtatcttggccacaacagccaaccaacgattcagctcaccagcgccatcgtcaggtgagtgctgctcagccttgggttgatttggaataattttatgctctttctggcaaataagattctaaaagcacttatatccctgtgaatacttcagaggactttggcctttgtattgtttgtsttactctcatttccgtaatagaagaggaagcacatgttaacttgtcccgtttataaatgggactgcttaggctctgaaagcttcagtgatttccttaaaatgacctactgagtcagtggcaggattggaaccacagcccaggtctcctgactccatcccrtaccttccaggcctaggcctctgcctgttttgttctgtcaccttaaaagaaggcagggtgctctctggaattactatgatcagcctgaggttctgcgtgatggcctcagtattgtcagatccacacaaaagaatggattcatgcctgatgcatattctcagaaagagttaatctgatgaacttccatgtcaggaagcagggctagacagcagcactgtctttcagaggagctgtagagtgggatgcccacagggattgttctagcccagaagcgtgccctcaggccacatgccaaagggcggtccttcaggtctgtacttggcctactgtggacctgctctctcagctgtccccagagagcactcaggaccttgaagttgctgaccccagcatctgaaccaggtttcagatgctgccggaaccctctgtggtctctcccgtctgaactgaagccggcctcctagtcagctgggagtctcggtaaccagatgattgtgatttctctgcatgggagcccctggtcccaggatggccccgctcccaggctgttttcctatctctgtttatcgcttaaaaccagcgtgggtagattctccacgccgtgagtcatatttcagtaggcaagaattataagggcaggcactacttattttaaagtagaggcagcagggaggtggtcatggcccaaagaatgaagctgccccaccactttccccagagcagtggatttcagtggttctcagtgctctggagactcctgcgtgcctgggtgctttgtcgttccatctgcccttcctcaccacacgtttttagctctaggagttccagagcctatgggttgagaatcaagaagggaacatcaccttgggtccgaaatccagacctgtctcagcagtgggggattggacggtgggtttccctcaggcgacgtaagtaacagtcttcctgctccgtccccagatggcaaggtcagccccggcacgttatccataggaagcgctttaaccgtaccctctttcccagccaactctactgccatggtggacctcaccaactcacttcgagcatttatggatgtcaatggaggtgagtgaatgagctgctgctgttccaccrtttgctatgttgaaggtgctattcytatacagcattcagctcatttcagaaagggagggaagggacacctgatcccagaggcctagggggagatgggaatgaggagtatccttttggatgggggggcggggtgaaaaagaaagctccttctgtagctctgccttctacatgtgcatatacacataatcaaagatgaagggaggacagagccaagctgaaccagtgagacgagaacaaaatcactttaggcagatcacctggatttgcagaataaaactaagatcctcactcccaaaggagggacctcatctgtgggaaacccccaaagtccaggagaacagggacagatcttgatctctgtgaacacaaggtgggtagaaagttcaagtctcaatatcagacatccaggccctcccccacagacaggcaagtggtttattccactctgcctttctaggggcactttaattaaaatcagtccacccaactacaggaggcagctgcacaggctgcattggggcccatctcactgcaaatggcaagtgagatgcccagctgcagatccttgtacgctctgcactcaatgctgtttgagtaaaaatcacttggctggattttagaaatgccaaactatttgctctgtgaccctgatttgcttccacattccacttcccatctcagctgctttttaatctttctctttggctaatagaaatcgagataaatatgctggacgagaagctgatcaagtttctggccttgcagagaatacatcagcttttcccctcccgggtccaaccttcaccgggcagtgtcgggacacatcagctggcttctggagggcaccacatagaaggtgcgcatgtacacacctgtcaccacatcatcagatctcccctctacgtgtgcgaatggtcaccttgcctccatggagaatctgagcttccagtatctcaaacctccttgtgtgcttttcatgggcttaataaagcaccatggtttttttctgaagagagcaggaacaagatggcaaccacagctttctgatcagacttggggaagtctgctgtaactttctttcatatataagtccacttcgagacacagcaaagcagctaccagtacctttgggtatatgtagtgtactttctgcttacttgctttcaaatatttgaattagaagggcttcccgactgagtgcagtggctcacacctgtaatcccagcactttgggaggctgaggcgggaggatcacttgagcccaggagttggagaccagcctgggcaacacagtgagaccctatctctacaaataattttaaacttacccaggcatggtggcatacacctgtaatcccagctgcttggaaggctaagatgggaggatcgcttgagtctgggaggtcaaggctgcagtgagctatgattgtgccactgcactccagcctgggtgacagagtgagaccctgtctccaaataaataagtaaataaataaataaaattttaaaaagaatggcttcccaagagggaacttttcaagttcaagttgagaaatagaataacactaggccaaccttctggaaattttccccaagtggttaactctgtttcagatatgtctgagcattggccattaagagccttgctgcttcaaagtgtggttcgcagaccagcagcatcagcagcccctgagagcttgttagaaatgcagagctcaatgcattggttttttgcctatttttaaagaaaacagcaaaagaaatgcagagctaaggcccctcctcagacctattgaatcagaatctgcatttcaacaagatctgtaggcgattcttatgcacattaaagtttgagaaacactggtccatgccgtctgtttttccatattctccctatagtaccagctggaatatcccggattagccagccaggagcccaggaacttacacagtactgtcatctctgacttctctgaccatcttcaaagatggtcctctgtaccctgtgttggaaatgctgtgggtggggagagaaagccttaccctgccgcagctcagtgttggatgtgagtttggaaagatgagtcatccagcgggattttctccaggccatgagccaraggtccagattttgttggtttatgtttggatcacaggatctgagtttctgaatgatcctattcctatgtttgtcttgtagtgcaaagaaaggaggtacaggcccgagctgtgttctaccccctcttagggttgggaggagctgtgaacatgtgctatcgaaccctctacatcgggacaggtgagccagccaggaagctgggagagacactgaatctgttcagccctaaagactgacacccttacccacagaagttagaaaggggtgagggaagccctttccagagttgactgctttaaatcagtggatagctagacaagagaaactaagaatagagacaatcagccagtcacggtggctcacgcctataatcccaacactttgggaggacaaggcaggaggaacacttgagcccaggacttcgagaccagcctgggcaacatggtgaaaccctatctctaccaaaaacaaatataaaaaattagctgggctaacatgcctatagtcccagctacttgggaggctgaggtgggaagatcacctgaggctgggaggtccaggcagtgatcctttttgtgcctctgcactccagcccaggcaacagagtgagaccctgtctcaaaaataaaagagacaatcagttccttgtcttcccttgttcaggcccttttgctttgtctttgcccagtgttgcaacagcagagatgaaagtcagctctgactactgcccagggaggcactttaaacactgcagggaagaacctaaggagaaggcagatgctttgtccctggtggtctttgaaagagtgatagactcacacatacccaatcttcagttagccctgtatctgttttttgttttgttttgttttccctaaaagtcctagagaccgatagctctgtatctggtacagaaggacagacagattagcccttaccctagaaacttccctttctttaaggtgataagattttctaggctctgcaccccgatgttgtattttcatagaaatatcccatcctcttcagtagctcactcttcccttctgggtagcagccacatgttctaaagcagatcagctggcagggacagctgttctttatcaggagcttggaaaagacaacagtttttgttcaaaaataaaaggggagggccctgagctactcacccttgaagtctctgctagtgccaacccagaagctaactctctccctgtcttacctccccgacacatgcaccttacaatctgttctctgccttccttttcctctactcctgccaccttgcaggagctgacatggatgtgtgccttacaaactatggtcactgtaactacgtgtccgggaaacatgcctgcatattctacgatgaggtgagggccggagatgcggtgggagggagctttcccaacctgaggcctctcccaggcagtaggtttttgttcagtgccctgaggggagggaagagggattrggggtcctctctttttcttccctccctgtcattcctggaggaggagagtcttgatgtgaaatagcatcctacctgggaagctacctgcttcccaggagcagggctaccatttttcctgaggttagtcacaggcacaacagagggagcctaccctaaagcaagggaggggaccagcatagaaggaagccaagccttgtgggtgtgtccctgtgaatttcattatcatcacgggccagtgagtatcataccaagaggagcggtgctgagagggcagagtgaaggagtgggagagtagggagtgtgggacaccagaaggaaagcttccctgaggaggtgtctccagcccccttctgaaaggacaggggccatgactggggaggcaagtaaggactctctaggtagagtagcacggccttctccatatgtcctctctccccttagccccaggccccacacagcagaccacacatcttatctcccctcctcctcctcagaataccaaacattatgagctgttaaactacagtgagcatgggacaacggtggacaatgtgctgtattcatgtgacttctcggagaagaccccgccaacccccccaagcagtattgttgccaaagtgcagagtgtcatcagtaagttggagcagagatctgtggccacaaagctgaggccccagtcagggtggttctgacttgctgcccatggtctgtctcttgccttcccagtcctattggccaagctctacttcctcgtgggcccagggcaggccacagagaagcaagtgctgagtacccccatgtgtgtacacacctgtggggacttcagactccaccaaccctttctgagcatccttcctccctagtcatgcagcagttggaatggggagatgcaggagcccaaccttggcaaacagcccacatgggttggctgctcactgttcctcttctgtgaccatccccctttttcccagggcgccgccggcaccagaaacaggacgaagagccaagtgaggaggcagccatgatgagttcccaggcccaggggccgcagcggagaccctgcaattgcaaagccagcagctcgagcttgattgggggcagtggggccggctgggagggcacagccttactgcaccatggcagctacatcaagctgggctgcctgcagtttgtcttcagcatcactgagtttgcgaccaaacagcccaaaggcgatgccagcctgctgcaggatggggtcttggccgagaagctctctctcaagccccaccagggccctgtgctgcgctccaactctgttccttaggactggcggctaccccgccactggcctgtacacccacccaagactcctgcaatgcaaaaatgtacacaaaccaagcccgggtgttttctatactctaccagaaacccttcaactacaatctttgcatgaratgaagaaaaccttttgactgttttttaaaaatcctttttcttttctcaagttctagggggcatttgcacatatatttgtactcaacatttcatgggaaagcggcagacctgagctgaggaacagcgtgggcagggagggaaagacccagggtctggacacttcctccaacacaaaacccttccccacccacctcctgctccctccccctcgcccaccattgtaaaataatcagaaacttgttctattttgtggcagtgacaatagttttatattaaaagaaaaaatacagttttcatacagcaaaatctatacaatatcattgttttatttaatataaagatcgctacccaccttccttccatggttcccaccctccacgttattttccctttctgcagcggttgcactacaggtagctactgtgtattatggacaaatgagaaatgaattctttttctggctgtccatctattttatttcaaataaggaaaagtgtatttggattttgtgtaaatacatctagtgatgacattttttcaatgtttttaaaaaccgtgtacagtactacatgtggtagagcgttttctcaaattgtctattgtagcaaaaatgtttttgtcgtaaacctgttttgtctcctttttttgttctcttgccacttctctcctcttcctcctgcccctggttccctcctctcctcccacccccacaaccagtaccaatgtacatagtaattgtaatgttttagactttacagaaactttcctgtattctgtatataaaaaacaaaaatacttcaaattgttttctgactgtctgtcctacctgtcatcacccttagaggagaccctcccctagatctgggtctagcaggtggggggccttttgaacaggtctcattcccatagggaagtttggtaggggaggtgttggagaaaagtgagccagggtgggtggatgacaatggaatgacatgggtgcgtctgctggcccggggggagctgtttctccagagaaccctgactgatagtggaatctagtcttgacctgtcacttctagtcatgtgatctgcagtcacacttctctacaactgctattcctcatcaaaaaacgagtctgctgcattaccttaattctcaagtcccggggaccttcattaaaccaaattccatgctttcctcccagatcttagtgaaaaactctccaggaagttttcctgaggtcagcctcctcagatggagagcacctctgtgtatattccagcactgtttgtgtaggtgcatctgcttgtgtgtcaggattttgccttagggatagaaaatgaatattctacccccagcctcatcccacagcatctacaatggaaacccgaatccgcagtgcagctaaataggaaactggccctggaatctgaggtctgtccctgactttcatctgcccatgcaggcgtcatcactctgctcccggtgccctaatgggctttttgaactccctaaggacagaaacttgtatatcttccactcggaatttccaagtctaactacactgctgggcacaccataagtgccaaataccaggttctaaattgtactgaatgtatcaggcaacggccttctgccctggaatggtcttacccatttgttcctagccagccccacccttcctgccatcatggtcacttgtaattgagtgatggagcttctctgcctgtctcttatcacctatgagaaccattccaaaggcaaatttcctcctgaaaggcaataacagattttactctctatctcttcctgcttcccttcagccatggaaggcactagtggggttgaggtagggagatacagagggggaatgaaggagtgaattctgacaccccttaactgcctgtgccacctttaacagtgtcctctctagcctgtgtggggagaacacggaagaatcctagaagctgggggctggatgtgaagataagaaaacgaaggatttggcccagtgcagaggctcacacctgtaatcccagcactttgagaggctgaggcaggtgggtcacttaaggtcagaagtttgagaccaacctggccaacatagtgaaaacccttctctactaaaatacaaaaattagccgggtgtggtgtcacacacctgtgatcccagctactctggattctgaggcaggagaattgcttgaacccgggaagcggaggttgcagtgagccgggatcacgccactgcactccagcctgggcaacgagagtgaaactccgtctcaaaagaaagaaagaaaggaaagaaggaaggaagggagggagggaaggaaggaaggaaggaagggaggaaggaaggaagggaaggaaggaaggaaggaaggaaggaaggaaaggaaaggaaggaaaggagaaggatttgtgcagaagggaaggaaggagaaggatttgttcttagagggaaaagcatctaggactagactcaaagacacacgtgtattcatgtacacacctaacttcagaagggagggactgtgctacatacacctcgagtaaacatatggagatatgcaagcacatgcactggcagagactacagatgcaggcacatacctggagggactctgccagaatgcacacaaacacctacaaggtgcttacaggagctcacacacaggatccagaggcacgcacacaacccaaagggtgatcctcagggacatgggcacatacacacctagagatcattcacatacaagcgttgcagatgcatgcacatacctagcgtgcactcacagggtgtacgtggacacacacacccaggagttcacacaggcacacacctagggggcgctcccagggcccaagcgcacacactcacctcaaaggtgtccacagaggcacacgcccccaggacgccgacgcacgcctagggggcgctcgcagggccggcgcgcacccgcacgcgcacacgcccctgcccagcctcctgcccgcctccgccttcggaggctgacgcgcccgggcgccgttccaggcctgtgcagggcggatcggcagccgcctggcggcgatccagggcggtgcggggcctgggcgggagccgggaggcgcggccggcatggaggcgctgctgctgggcgcggggttgctgctgggcgcttacgtgcttgtctactacaacctggtgaaggccccgccgtgcggcggcatgggcaacctgcggggccgcacggccgtggtcacgggtgagtgcggaggcgggtgagtgcgagctggcggggcgcgcggagaggaggccgggccggcggtagcagcggcccgccgggctcagctcagctcggctcccgcccgcggtccgcaggcgccaacagcggcatcggaaagatgacggcgctggagctggcgcgccggggagcgcgcgtggtgctggcctgccgcagccaggagcgcggggaggcggctgccttcgacctccgccaggtgagaggcagcgggggcgcgtgggacggtgagccgagaacccgccgggacacagagaagccagcaaaggggctgcggaggatccgggtccagggaggagagcgcggcgcgggcggctgagcgcgaagagggagtgcacggagcgctggggtcacccgaggaaggcgcaccagagccgagtgggggaggggcttcctgaaggccgtaattgcagttctgagacgtttaagcatcagtagaagttgggttaatgatcagtaggaaagggaacagcagagggcacagcataagcaaaggctctgaggcaaagagagctggactgatctgaaaaactgagaaaaagatttaatgaggctggagcacaaagtatgaggaagatgggcaaatgagggggctggagaacattctagagcctattgagaagcttggattttatagattgggcagcagagaccagtggagaccatgaacagccctcagtaggctccggactgtcagaatagcctttggaaggaactcctttgtggctgcgtggtgcctggagtgggggggcaagagcgggagagaggagaccagtgagaagttacagattttagggtaaatggtaatggggaaaggaggtgataataataatagcaagtacctacccagtgctgctagagtgtattttacacgttaactcctttcatcctcacaaaagctcagtgagattgggactgttgttattattattccctttacgcagtgagagaactgagacccagagagattaagtatcttgcccaaggtcacactttagtaaaaggcaaagtcaggatttgaatccacacacttatctagtacactctaagacacaggggcagattttagtaaacagtaggagatggactctcagaatttggtgcctggggagagggaagaggagagagatgcctggtgacaagcccagcccttgcctctccacaggagagtgggaacaatgaggtcatcttcatggccttggacttggccagtctggcctcggtgcgggcctttgccactgcctttctgagctctgagccacggttggacatcctcatccacaatgccggtgaggggcagcaggccctgcgtgggggtggggtggcgggtggccaggggcaactgccccctccagcgggggccctgctggggccagtggacacatgggaaggatgcccccttctcccatctcatagatagggatgccaaggctgcagagctccttctggagcagccgctcacatttagcctctgccccaggtatcagttcctgtggccggacccgtgaggcgtttaacctgctgcttcgggtgaaccatatcggtccctttctgctgacacatctgctgctgccttgcctgaaggcatgtgcccctagccgcgtggtggtggtagcctcagctgcccactgtcggggacgtcttgacttcaaacgcctggaccgcccagtggtgggctggcggcaggagctgcgggcatatgctgacactaagctggctaatgtactgtttgcccgggagctcgccaaccagcttgaggccactggcgtcacctgctatgcagcccacccaggtgaggtctggttctttggcttccgattcccctctcctttccttgccccatcctgtgccccccacaccactaccgcctccccaccctccatccctcattgagtcacagaatctcagggcagcaaggaagcatagtccaaggagagacctgttccttgctgctcttggaaccaggttctcctggtttaggttcttcctctcacaccacaagcctgggtcctcagccctggggggtatatggccatgaataagacctggattcccacccccaggagccatctgcactgactgaactgataatgatgatgatgatagctaataattcatccaagaagcatttaccgagtacctactctgtatcaggcattacttgcagtgctggggatatagcagtgaacaaaacaaagaccctgccctcatagagtttgcattctagtttggaggagagggagacagccaataaatatatacgatgaggggtggtgatagagtgctctgaggaaaaaggaaacagcaaggggcaaatggaacgggaatatggtgtggcagtcaaggaagacatatctataaaggtgacatttgaacagaggtctgaaagatacatggctcactggggagatgcccagaaaaagagagaacagtgcaaataataagtgcagaggggctggaagcggtggctcatgcctgtaatcccagcactttgggaggccaaggctggtagatcacttgaggtcaggagttcgagaccaacctgggcaacatggtgaaaccccatctctaggctgggcgtggtggctcacacctgtaatcccagcattttgggaggccgaggcgggcaatcacaaggtcaggagttcgagaccagcctgaccaacatggtgaaaccccatctgtactaaaaatacaaaaattagccaggtgtggtggcgcgcgcctgtaatcccagctactcaggaggctgaggcaggagaatcgctttaatccgggaggtggaggttgcagtgagccgtgatcacgccaccgcactccagcctgggggacagagcaagactccatctcaaaaaaaaagaaaaaagaaaaaaaaaagaaaacctgtctctactacaaatacaaaaattagctaggcattgtggctatcacctgtagtcccagctattcaggaggctgaggcaggagaatcgcctgaacctagaggtggacgttgccagtaagctgagatctcgccactgtactccagcctgggtgacagagcgagactctgtctccaaaacagaaaaaagtaagtgcagaggccctaaggcagaagttcctggtgtgcttgagaaaggctaatgtggctggaacagagtgaggggggagagtggcaagaggtgaggtcatagagaggcactgtgtcctgtagggtttggagggaggttcactataggcattctggcttttactctgagtgagataattggggatccagagcaacactttgtcttatggaagaggttataccaggataacaagatctgtcatattcatattaccatactgcattttagatagtcactgcctaaggctcattagtaattataatagcgatgatcacaattagcctttattaagtctttattacactccatatcactaatgtccaaaatagtggctggtatactgcaagtacttaataaatgctggttaaacaaggaacaggacttgagctagaagaaaagatggagagagactgagaattgtttc

SEQ ID NO: 96498 - DNA, 16545 bp, Homo sapiens
cacacactttgttgctgcagaatgactcgcgttggagccttttgtgccaggaggaggggacctggtttctggctggaatcagagactttcccagtggctgtctacgtccccgagccttcttccctctgcagactcatggcccatggatcagccatgtgactcggggagcctacctggaggaccagctagcctgggactggggccctgatggggaggagactgagacacagacttgtcccccacacacagagcatggtggtgagcaggacgcttttgggccctaggggctcctgggagtgcacagacccatggcaggggctcaggggtcagccatggggccccaactgaggtggccacctcctctccctagcctgtggcctgcggctggaggctgctccagtgggggtcctgtggccctggctggcagaggtgcatgtggctggtgatcgagtctgcactgggatcctcctggccccaggctgggtcctggcagccactcactgtgtcctcaggtgggtctcactcgtctcctaggcgagagacgggaggggagaatggaacagagccaaagacttgtttttgttgtttgtttgtttgtttgtttaaaaaaaattaacaatgagatcttgctgtgttgcccaggccagcctcaagcaatcctcctgccttggccaacgtactaagattacaggcatgagccactgtgcctcacccaaaggactcttaaaatagtgggatattctcctttaagcatcttacagctgggcgcaatggttcacacctgtaatcctagcactttgggaggccgaggcgggcagatcatgaggtcaggagttcaagacgagcctggccaacatggtgaaacccctctactaaaaatacaaaaattagccaggggtggtggcaggcgcctgtaaccccagctacgtgggaggctgaggcaggagaatcgcttgaacccagggagggcagaggttgcagtgagccaagattgcgccactgcactccagtcggagcgacagagcaagactctgtctggggtggggcatgagggaagaatcttacagcactgggagatgttttgacctagaagggagatttggaaggagggatgatgaaggagtgagtggcatgaccccagagagtcatccttcccctgggctgggaaggactttgccagcaatgggaggagcagaaggtgacattggaccttgttccaacaggccaggctctacaacagtgccttacattgaagtgtatctgggccgggcaggggccagctccctcccacagggccaccaggtatcccgcttggtcatcagcatccggctgccccagcacctgggactcaggccccccctggccctcctggagctgagctcccgggtggagccctccccatcagccctgcccatctgtctccacccggcgggtatccccccgggggccagctgctgggtgttgggctggaaagaaccccaggaccgaggtgagacccctgggtcacgggaacgaggagtagctggaggccagagccctggaacaactttgtctcctctccccagtccctgtggctgctgctgtctccatcttgacacaacgaatctgtgactgcctctatcagggcatcctgccccctggaaccctctgtgtcctgtatgcagaggggcaggagaacaggtgtgaggtacaggggcctgggcgtcctggagtaggcaggggagaggcagtgttggactactgtaccctagagagatagcagaattggaattttttttttcttttttttttgagacagagtctcactctgtcccccagctggagtgcagtggcgcgatctcggctcactgcaagctccacctccctggttcatgccattctcctgcctcagcctcccgagtagctgggactacaggcacccgctactacgcccggctaattttttgtatttttagtagagacggggtttcactgtgtgagccaggatggtcttgatctgatctcgtgatccgccggcctcggcctcccaaagtgctgggattagaggtgtgagccactgcgcccggccaaggaatttttttttttttttttttttttttgagactgagtctcgctctggtacccaggctggagtgcagtggtgtgatcttggctcactgcaacctccacctcccaggttcaagagattctcctgcctcagcctccctagtagctgggattacaagcatgcaccaccacacctggttaatttttgtatttttagtagagacagggtttcaccatgttggccaagctggactcaaactcctcacctcaaatgatccgcccaccttggcttcccaaagggttgggattagaggtgtgagccactgcacctggccaggattggaattattgggtatttggccccaaatgggaccctagctggacccgggagagaaaccagggacctggatgtctagggatgcagaccagagtgcttcgtggccagaccctggggaaagggggaggggaccaagaggaagggcagcagacccacgtggcctcgctccaactctgcagatgacctcagcaccgcccctcctgtgccagatgacggaagggtcctggatcctcgtgggcatggctgttcaagggagccgggagctgtttgctgccattggtcctgaagaggcctggatctcccagacagtgggagaggccaacttcctgccccccagtggctccccacactggcccactggaggcagcaatctctgccccccagaactggccaaggcctcgggatccccgcatgcagtctacttcctgctcctgctgactctcctgatccagagctgaggggctagggtcccagcaccacttcccccttctccaccctctacttcccgcccagtggggctggaatgtggcccagccggctggaacctcaagggccccacccaccgagattgcagcggctctggctaattgggcctcagtgcccgggctattttgaacccaggaatccttgggggtggtgggaggagcggacaataaaggtgtaaacacaggtacctgtgtggccttgtggcatcgccgtgggcaggctgaggggctgggcatcagaggctaagcgggaagcccaagggggaggtcccctccctcctccctcctccggcctctgagtcaggccttgggctctcaggaaatgtaccctgataacctggcagcgattccttcattcctgtcccagggcagggaagtcgggtggccagctggctgtgtgtcacctgcccagtggagtcagcaccctcggcacgtgctggacatctcatcccctgctcagacccgctgccctcgctgcccgccatagacacacctcaatgcacaatgctccgatgtatcccctgcacacacacaacacttgggcccttcaagggtctgccactttcacattctgcccagaacttgggtcccttatatgtgaacctcactcccttacccactgcttacctgcacctccctgcattcattcaacccgtgttccctggtggctactaagtcgtggcacaattggggtctgatatataagcccacaaagtcctcccaatctagtggggacacatgtggacatccctggctgggattgggaagatgtcatagcagtgatgtttgagcacagaaaaagggaaggtggtttccagccaatgaatctacaattaaaaagtaacgcaaaaccagagacgaggtgcggcagctcatgcctgtaatcccagcactttgggaggatcgcttgaggccaggcattccagaccagcccgggcaacaaagcaagacccccatctccacttttttttttttgagacagagtctcatactgatgctcaggctggagtgcagtggtgcaatctcggctcactgcaacctccacctcctgggttcaagcgatcctcctgcctcagactcaagtaactaggattgcagactcaagacaccatgccggactaatttttgtatttttatttaacttatttatttttaattttttgagacagagttttgctattgtcgcccacactggagttcaatggcgcaatctcggctcactacaaccttcacctcccaggttcaagcaattctcctgcctcagcctcctgagaagctgggattacaggtgcccaccaccatgcccaactaatttttgtatttttagtagaggtggggtgtctctatgttggccaggctggtcttgaactcctgacctcagatgatccgcccacctcagcctcccaaagtgctgggatttacaggcgtgagccactgcatctggcctatttattttatttatttatttattttgagatggagtctccctctgttgcccaggctggagtgcagtggcacaatcttggcttcccaggttcaagcaattctcctgcctcagcctcccgagtagctaagattacaggtatgcgccaccacgcctggctaattttctttgtattttttaggagagacggggttttaccatgttggccaagctggtctcaaactcctgatcttgagaatgatcctcccaccttggcctcacaaagtgctgggattataggtgtgagccaccacatccaagctccacaattttttttgtttgtttgttttttgagacggagtctcgctctgtcgctcaggctggagtgcaatggcgcaatatctcggctcactgcaacctccacctcctgggttcaagcgattctcctgcctcagcctcctgagtagctggaattacaggtgcgtgctaccacgcctggctaatttttgtatttttagtagaaatggggtttcaccatgttgttcaggatggtctcaaactcctgacctcgtgattcgtgtgccttggcctcccaaagtgccgagattagaggcgtgagccaccacacccagcctcaacaggtgttttgaacggccagagtggccctcaaggaggatacatgcctcactcccaccgcagccacacggcaagccttctttccctgagcctctgccctctgcaccccatccccccatcttcgccttaccaccttttataatccctttcggtctcagtttccaaggcaattcctcgaggaccctttcacaatgccagcctttgccaggctgtggtgtgctcacgccattctttttcatcactattcctagcttgaaattattgtgtaattgcaatttttttttttaagacagggtctccctctgttgcccaggctggagtgcagtggcgtgatcatagctcaatgcttcgttgaactcctgggctcaagcaatcctcctgcctcagcctcccaaatagctggaaccataggcatgcgccacaatgcctgcctaatttttatatttctttgtagagatgaggcctcgctatattccccaggctggtctggaactcctggcttcaagtgatgctccagcctcagcctcccaaagccgactagccaccttgccagcctgtttgtgattatttgattgaagtgtgtcacccctacttcaccatgagctcagggctcaagggggacggggctggtgcctgttttgtcctggacacctgggaacatcataggcacttaggaaatgtctgtgggatgattggtgctgctccacaagctcgccaccacccatgaggtgcaggcatcgcagaaagggcctggcaggggacagaccatagtgtcttaagctcccataaccagcctaaggagggagggaagaagggaggagtggctgtggctccagataataaaagctggggccaggccctggggggcataactggcctgagataacctgaaagacctgaggcggaggagagtcgtcacattccagggagactgcacacacacacaaaccacatgcacgtgcatgcacgcacactcagacacacacactacacacacagggacacacacagcctacacatgtgcacatacagcctgtacatgcacacacacacacataccacaccacataagaggacacacacagcctacacaggcatacacacacaccayatacacactacacaccgggacacacacacaaaaggcctatgcatgtgcacacacatacacacggacacatacatgcacacacacgggcctgcagctctgaaaggactcatgactttggtggcaagaggagctggcggagcccagccagtgggcggggccaggggaggggcgggcaggtaggtgcagccactcctgggaggaccctgcgtggccagacggtgctggtgactcgtccacactgctcgcttcggatactccaggcgtctcccgttgcggccgctccctgccttagaggccagccttggacacttgctgcccctttccagcccggattctgggatccttccctctgagccaacatctgggtcctgccttcgacaccaccccaaggcttcctaccttgcgtgcctggagtctgccccaggggcccttgtcctgggccatggcccagaagggggtcctggggcctgggcagctgggggctgtggccattctgctctatcttggattactccggtcggggacaggtaagtgaggacgtgggggcagggtggggacaatgcactggagggagccggcgtgatcattttctggggtgtgcccttgtctggggcccaagaaaacccccggcctccctagctcttggcctctctttcccaccttggctctgtcagggaaggggccagccctctggagcagtggtgggtactaaggggtcagggaacccgagtcttccctactcacccctcctctttctctttctttctaggagcggaaggggcagaaggtgagactttcctcggagagggaggaggggagggggwggtgacttggatcggattcccctggggtttaaccagtgcctggccttcagctgggctgccttccaactagattctcttagggctcccagagtggggggttttagccctcaccttatgggcagagaagcagggacttgcccagggcacactgccagtgaaggtgcagctgggattsagatccacgtctgactcccaaagtggggcaatcgaggtggtttttttggtttggtttttgtcttttgaaacagggtctgggtctgtcgtcacccaggctggagtgcagtggcccgatcgcagctcactgcagtctcagtgatccagcctcccgggctcacgtgatcctcccacctccccacctcagcctccctagtggctgggactacaggtgcatgccatcacacccagctagttgtgttttgtttttgtttttgtttttgtttggtagagatgtgggtctcactatgttggccgggcaggtcttgaactcctgggctcaagcgatcctcctgccttggcctctcaaagtgctgggattacaggtgtgagccaccgttcccrtcctggaggtggttttgagggaaccaaaccaagggtctcctttcttggaaggcacccaacccagctctgagtcagaccggctttcaatcctggcttccccatgcactggctgtgtgtcattggccaagtcccccsacttctstaagccttagactcctcacctctaaaatgaagctggtcatgtccgtctcctggggctgtggagaggatgcagggagatgaggaagcgaaagcccctccagggcctggcacagccgctaggctctctaaatagtggctattgtcatgatgataagggagagaaagatctggtctgcaattttctctgctcctagatgactttgtgaagagcagttgggctccactccaaagtggcctcaatgggggtggggctggggctgtcctggaaactagacattcacatcacaggagcccagttctgctgttggtttgttgaatatatgtccacgacgccacaggcactgcagacatragaatctgcccctagggaatgcccagattggtgtggtggaaacagacacagttgtggactccggaacaattgtgagactgggcagcatcggggagcatggtggaggttggggggtgctgggctcggaggcaatgcccaactcagccagsagaagcccgcctgtctacrgaggggctgctgttccaatcaagcatccacaggcaaagggaagtttgccagacagtaaggatggggaagggcataccaggtagagtgacctggatcagccaaggtcccgggtaaacaagtgtgtggcctgatgtacacaactgaagggtccagaggggacggctgggtccgatggcggtgccatggtctgtctggaatgtatcttaaggaccgcgtggagccaagaagggtttaagcagggctgtggcctggtcagattgggggtttatgaaaatcttcagacttgtaaggggcgggatggatggaaggcttgcaaggagagaagctgccatgagacctgaattaggtaatgggtagtggacagaaggggcacaactgcccatgcctgggagggracaaaggggtgttgactcctgtgaacccacttcccaagctctatatcagagctcctgggctgcataggagtggccaggctaacaacctgaccccttcccttcctccctgrgcagctccctgcggtgtggccccccaagcacgcatcacaggtggcagcagtgcagtcgccggtcagtggccctggcaggtcagcatcacctatgaaggcgtccatgtgtgtggtggctctctcgtgtctgagcagtgggtgctgtcagctgctcactgcttccccaggtaccaaatggtgaaagtcaaaagtgggctggaggtcaaagttaatgggtcaatccaggtcagaggttggggttcttgggttgggtctgagagtgtcagttctaagtctggaaggaccagttaggagtgaaggtgaggggtcagaggttacatgataaaactaaggtgcaatttgagacctaaaaggggctgatcggaatcaggggttggcagtgggggttggggaacaaggagaggtctcctgggtctcagcctttgccccctgcctgcagcgagcaccacaaggaagcctatgaggtcaagctgggggcccaccagctagactcctactccgaggacgccaaggtcagcaccctgaaggacatcatcccccaccccagctacctccaggagggctcccagggcgacattgcactcctccaactcagcagacccatcaccttctcccgctacatccggcccatctgcctccctgcagccaacgcctccttccccaacggcctccactgcactgtcactggctggggtcatgtggccccctcaggtgaggtggracgctgggtgcctagaggtgtggaggggcacctgacttggggaggggcccagggtaagcctcttttacccccacagtgagcctcctgacgcccaagccactgcagcaactcgaggtgcctctgatcagtcgtgagacgtgtaactgcctgtacaacatcgacgccaagcctgaggagccgcactttgtccaagaggacatggtgtgtgctggctatgtggaggggggcaaggacgcctgccaggtaagcacaggcccggggggcagatgaccagtgcaacttcggaaaggaggcctggcccggtcctgatggctgctgtgtggcttctctcctcagggtgactctgggggcccactctcctgccctgtggagggtctctggtacctgacgggcattgtgagctggggagatgcctgtggggcccgcaacaggcctggtgtgtacactctggcctccagctatgcctcctggatccaaagcaaggtgacagaactccagcctcgtgtggtgccccaaacccaggagtcccagcccgacagcaacctctgtggcagccacctggccttcagctctgccccagcccagggcttgctgaggcccatccttttcctgcctctgggcctggctctgggcctcctctccccatggctcagcgagcactgagctggccctacttccaggatggatgcatcacactcaaggacaggagcctggtccttccctgatggcctttggacccagggcctgacttgagccactccttccttcaggactctgcgggaggctggggccccatcttgatctttgagcccattcttctgggtgtgctttttgggaccatcactgagagtcaggagttttactgcctgtagcaatggccagagcctctggcccctcacccaccatggaccagcccattggccgagctcctggggagctcctgggacccttggctatgaaaatgagccctggctcccacctgtttctggaagactgctcccggcccgcctgcccagactgatgagcacatctctctgccctctccctgtgttctgggctggggccacctttgtgcagcttcgaggacaggaaaggccccaatcttgcccactggccgctgagcgcccccgagccctgactcctggactccggaggactgagcccccaccggaactgggctggcgcttggatctggggtgggagtaacagggcagaaatgattaaaatgtttgagcacaacttgccgtgcatgtgtgaagtgaaatgaagaacatccgctcttggcctccccttcccctccaaagtccagggccaccagaactgactttattaaaaaaatgacaaaacaggtctatacatatttacaggctgggagccaggaggctcaggtccgacagcaggggccaggctgctcacttcttggagagcttgacttgcttgtgcttggggggtgcccacttgaggcagacggagtccactgtggggagaaggggcgggaggcagggctgggcctgggccaggccagctcacacctggctgccctcctctgggctcaggccagtttcacctcctccaggtgagaacaaaagggcaggctgtgctggggaggggcagggaagcccaggaatgagaggcctgccccgggctccatcctgggagctggtctgactggtttgggatcatgtgacagcaataaggaggccttgactcctaccagtccatatactgacactcccccaccgcccccgacacacagcagccccccacccacctgtgatgggtggtttcttatactgggcacttttgaggtgctcctccaccagcttgggtgtgacacagatcacgtgctggcccttccagtacttgaccatattgagggattgcagggtactgatgatgtcattttgggtgatactggtcatctggctgcaaaaagggatgagagcaaatgccagacctggtgcccttgtgggatctggccaggatggtgacagggtataaggaagcaggatcgtggcccatctcagggcaagtcctgcccccagggcccgggaggccccctcacctgaggtccttgatggacagtgtgccccggaagtcccgcaggatctccagcagcacccaggaccagtagctgcggtagctgagcttgcccaggtcagacagcggcttctccggggagccgactgtgctctccagcttggagagctcataacctggcagcagtagaaagaggaacttaggatccagcctgccctggcacccctgccccacaggtctccccctcccagacaggccaggaaccactcactgaaagcgatgaggaacttcccgtagccgcggcgttggtaggggggcaaggtcaggatgcaggccacattgtttccatccggggactccttctcctgcaggaggcaggtgctcagggccgctggggaggctctgccccactctctgttcatgcccaccttcgccctccccaccctccccaccccgagtttccagacccagcaccttggagaagtagccaacaatgtgggccccctgccggtccacctcagtcaggatgtaaaagacgaacggctccacgtcaaagtacagtgtcttatggtccaggaaaagcttggccagcagacacaggttctgacagtaaatctagggttgaggaggggggagacaggctcagggggcaggcacaggccccacccagctggttccagcggccggcaccagcccacgcgaagtgggcgcctcgccaggccagaaggatttcacactggaaggagtcttcggtcagcctctgacgaacagggaactggaaatgagagagcaacagcacttcggaggtgccagtggagctggatgaagcccggccaccccttctgagtgccaaatacgagctgggtgccttccatgcaggatctgcttcagtcttcacagacattaactctgtttcagctcgtgaaactgaggctccgaggcaggaatttagaccgtcctgttcatggctgtgtccccagcgcctagcacgagtctaagtatgaagctgggtgcctggtaaacgtctgctgaatggaggaacctcgagccctgtctgtccacttggctgcactccaggagggggacaatgggaccgagtttggcttcacggcacacactaaggggctccctggtttatgacaccacagccactatctcatccaacccggcagctgtgcgagcccagcactgccaggcccatcttactcaggaggaagctgaagctcccagagtggaagtgcttgcccagagcctcaaagctggcagagcgcagttggaaagcacccccacatctccagcgggggcccttctgctattccacacagccatgctcaggaaggcagagcaggggcaagggctgggctcagcctgcgtattctccgagtccaaggctaatcaagccccaagaggtcaccgataataacaaggcccgtgtttattaagcacatactagtgctaagcactgcactaaacacttgacatttgctgtctcatttattccactaacaacacaactaggtaaatattaaatattatgactcccgtcttatggacaaggaaacaggaacaaaccatgttaagtaacttgtctgtggtcagtgaggaagtgacaaggcaacatgagccaccctgaagcctgccctctctgtcctgtgctgtatggcccatctgcgggaaaccagtacacttggccagaccctcccagactgataaggcaaaggccaagttctctacaacagctaggcaggtcccaaaggccccaacctgccctgctgaagtcattcggggccaggaacaaggaactcaaaccttgaaagccacagagctctctcaggaggaaatttcacacaaagcagtcccctcccaggcaaaaacaaacacctttctttccaacggaaggagagagcacttctaaaagcagcctcaggcaagaaaatctcctctgggttccagaacaacccaagtttgaacctaaccccaccagcagaagagtcttggggccaccacaaggccctgtgtttcctatgcaccaactacaggcctagtgccaggctaggaggccctcagaggccttcttttttttttttgagacagattctcaatctgacgaccaggctggagtacagtggcacaatctcagctcactgcaacctctgcctcccaggttcaagcaattcttgtgcctcagcctcccgagtagctgggattacaggtgcgcaccaccacgccagctaattttttgtatttttagtcgaggagtttcgtcatgttacccaggctgctctcaaactcctgagctcaggcaatctgcccacctcagcctccaaaagtgctaggattacaggtgtgagctgcagtgcccggcccctcagaggcattctgcccatagaggctcagctaaggctgccccctcccctttggtggtgatgaggatcatctgggaggtgcccagggcctccccggcctctcccaacccctggccacccactcaccttatggtctttgccatcaacttcgtacacggagatgttgctcttgcggtagatctctttcccggggggctgccgccactggcactgaccctggtcggggacaagagaacaggttcgctgcccatatgttctctgctaggaggcacccaacccaccactgcatgctttggagcaagtctctgcctctctgtttcccccctcaacacttcacctacatcgagtaatcctcccagcagccttaggaaagtgatcctgcttttacagaccaaggcccaggcacagagatccaaacatcacacagcacggtggggttttgagtctctgtgggcctggctctggagggacccgtccatgacaatggcttccctaaaccacacctattcgcttcagattccacacttcgggaagcagcccactgtgtcagtgatgagagcgccccttcctgacagcccccaatttcatccacacttaaggtcccactgccaggggctatgtgtgcttcctgggatggagctggccttggcaaaagacctgaagggggtgagttactgtccccattccagagaagaggagctgaggtctgaagttggcaaggtcaccctgccagcaacagcaaagccaggcctggaatccaggcctcctgacccccagcagctcttccctgtactcgctcctttgggcctgtctcctccctggagctgccggcgcagccgccctcagtctccatgcctgcctctgcctctcaccgggcccctgcccagctcggcccggccggcccagcctcaccaagtggaagcggtagctcttctcatatttcatgtacttgaggcagtactcgcagagccagagcttgggctgtttcccatagtcttcggggaatggtgagaaataccaggcatcaatttcgtagttcccgatgtggatcttgtccacatacttcaccttggtgatctgcaggcagggtgggagtgaggcacagtgcacggctcagcaggggctcctcggcaaggggagacgggggacctgcaggcagcttcccagccccacttaccgcctcatgctccttctccaaggctgctgtggtggggtccatctctgcataagtctgggccaggaaagaaaagtgggcagaggtgaacagaagtggtgaccaggctgtccctcccgtcaggacccacaaggcttccctgccgtctaccagacctcattcctggatggcaataataaccacaccaatagctaacctatctgacttggttctgaagctggctggtccagactcctctcacacccacccgccccacccccgatatcccagacatccctgatgtccaagtttggaccttttgccagatgaacagggttaggatcaggatggggcttcagctgcacgatggggggcaatccagctctgccaaagttgtgagactcaaatgaaataacagatttgccttccaggcccagcgtaagaactgttactacctccccgatgttcctggacccctttcctgaggaccagaccctgcctgcccatgcgactgccccagaggtccctcccacagggacagcggactcaagatgtgcagaaaggacctcatcactcctccctgcaaacctgcgcctcctcctgggttgctcattttactgggaacatcacccttggtcccagtgtccaagacccataactaggcttgcctcagactactctctctccctcggcctggccaagtcctaatacagtggatgtcaagtctacttctgacatctctggaattgggccctctctggaattctcctctctgtcctgctccaggtagtcatggccccatctcaggtctggacaatttactaggccgcctcagactccctgcctccagccccagcctcctcattgctatcagcagcccccttttagcggccttcatgcttctgcacaaacagctccttctacctggagaatgcccttccttctctcactgccagcagaaaacacttcctcagcctggcacggagcatgagtcaggtgagtccatgatgctttgtgatctatcctttgtcactgttgttattgtgctctttcccatccttcaaggcttgagattcttaccaccccctccaggaggcctgactggattcttcccatccagaaaacattccctccttcccaagttcagcgagaagtggtcaacagggcaacactgtccaagtatgcccacctgggttcctctatttttcaagtccttagaaagcagagactaagagtcacaccacactcacaacacatcctgctcctaggccagaccctgtgggaggaacccagtacagcctgacaatggaagggggacccaagacggtccatgacctacaccagggcagacaaggccctgccctgtagctgagaagggaggaaggagccagtgctttacccagaaccccctccacaaagcactgtgcctatatgtttatatggcctcatttaatcctttcagtaacccttacatagagtgttatttcttttttttttttttttttttttgagacggagtctcactctgttgctcaggctggagtacagtggcaccatctcggctcactgcaacctccgcctcccaggttcaagcaattctcctgcctcagcctcccaagtagctgggactacaggcacatgccgccacatccaggtaatttttgtatgtttagtagcaa

SEQ ID NO: 96499 - DNA, 12879 bp, Homo sapiens
gaggctgaggcgggagaatggcgaatggcgtgaacccgggaggcggagcttgcagtgagccgagatcgcgccactgcactccagcctgggcgacagcgagactccgaatcaaaaaaaaaaaaaaaaaaaaagtgtttgttggtttgttggttgtcttaatgatgtgctattagagtgaggaagaaaagttaccctatgagaatttaaactgcatgaaagtctgtggtagcattactggttcagttccaagcttgctacctcagtccttgatgcctctttctcccaatccaagtagtatcaggcactgccgtctacttgttgtacctcagaagagtttttcgacagcaccccgtgccctctgtggcctgtgctctctcacaggtgcaagtcctgtcatcatgagcctggactgttgcagaagactcctagccaatctcccctgcttcccgcctctgcattctggttcagcatccatagaacctaccagttattatagattcctccctcagactccagactccaacactaaatctgatgtcagtctcctgcctgaaaggatctcctgcctgccactcccacccctccaccccctccgctgaccccagcagggcctacagaacagggttcaaatgctttagcgtggcatgcatgcttctccattgggcttcgcctgacctctgtgcctttgctggccagggcctcctgcacctctgtgtctttgcacttgatttatttctttccactgcccaaaatgacctttccccttttctgtctcccagacttgccctactcattcatatgagccccacttccacttagagactgccccacctctcgtgtcacacctgacgtggtgagtgctccagtggcattaagaacatagggcatgtctgtctggtaacctatctccccagcagactgagctccacgagagcagagaccctggtgcagggcctggctcacagtgggtgctcaattaatattacttatgtgaaggaaccacttccagctgctcaagtattctatgctaaaacttgggtttctttcatccttgttgtcctcccaagatacaatgtgtacataattggaaagttagccaaggtgactatgaaggtgaccccacccaatcaatctatgtcttcctggttactgtgcctgtcattcgatgattccacggttatgtctatagtgataacagaaaaaagcaactgaaaacaatattatttactcgggtctcgtgcatctcctccacacatttgtagaaatgagattaccacaaattgccaagatggttacatcaaattttcagcagcatcagtcataggacaaaaaggcctttgagtgtatttttaataatcagcatttactggtggcaaaatactggtttagaaaatatctgagattatggtcaggcacggtagctcacgctggtaatcccaacattttgggaggctgaggcaggtggatcacctgaagtcaggagttcaagaccagtctggccataatttcagatggtgagattatagtgaaaccccatctctactaaaaatgcaaaaattagctgggcgtgatggcacacatctacaattccagctactcaggaggctgaggctgcagtgagctgagatcgcaccactgcactctagcctgggcaacacagtgagactccatctaaaaaaaaatctgagattaataggttgccattttaggcgctctttatagaccagctggcctagtggtcctggttctgtaatatgtgaagtaaaggtctcgcaggggagcaccagtttcaaactctgtcctagtttgcagccttggctggagtgaccccagtcatgaggcaaactgagcacaagtgtgcaagtgtcatggattcagccagaacatcagtgttcccagcatcagacacagattcgggagaaatcaagtcacagtgtagagatgtattgtgatgtgtcactacactattatgaaatggaagaaaataaaattacaagcctcaacctttaaacatttagcaacttgggctgtatctcaatgtgtaatttatttgtctcacttcattttcacaaacattaaatcccttcatatcaagtgcctatgaggtttaattcattaaaggcatgcatactccagaatgtttattaaatacatttctatcatttctacaaaagaagccccaaaacttcaataaaatatggatcacagtacaggggaacagaaatcagaaatgtgctggtaaaagtttagagatgtggtatagcttcataaaaaatgtttaacaataaattaggacttaaagccccatttctaactggcttttacgaataggggatttgttatttcacataactgaaaagtcttaagagttcagctctttctcaattccggcacatcttgactcagggattcacataatattaacaaggctagatctcccatttttcaggtctgctctgaaaatggcttcaatattggcttcaattgaaggccccagcctgaggctccagcagctccaagtccagttgaagtataattgtgtttcaacagtccaagagacaggcctgaaaattggaactcatggacttgtgcccctccctacaacaatcatcccagcctgggcaacacagtgagacccatctctacaaaaaattaaaaaattagctgagcacagtggtttgtgcctataatcccagctacttggtaggctgacataggaggaatgcttgagcccaggagttcgaggctgcagtgagctatgaacacaccactgcactccagcctgggtgacagagccagactctgtctcaaaacaaaatacaaaaaacaatcactacggccaggtggggtggctcacgcctgtaatcccagcactttgggaggccgaggcaggcagatcacttaaggccagaagttcgagaccagcctggccaacatggtgaaaccccatctctactaaaaatacaaaaaagtagccaagcatggtggtgtgcacctgtaatcccagctactcaggaggctgaggctgaataatcacttgaacatgggagacaggggttgcagtgtgccaagactgcaccactgcactccagcttgggggacagagtgagactctgtctcaaaaaaaaaaaatcactatgacctggagaatagaatgctctgattgggtaggcctggatcatgtggcccttcttggagctagaggagggagtcaaccccacttgaacttgaactgagaataaggggggcaggggtgtgtgtgtcagtatcagaaaagaaggcatagatatattggtcatatgacacaaaacagtagacatccactatcacatagccactggcccctcccaagtgcagagggagctcagagccccatttatttagagtctatgtccctgttgccactggaccccaccccaatgctgtctgagctccatctctctgtacctgttcgttctagctaacccatgtcctgtatcacagttgtttttccaggactattctaatttcaaatacgctgtccctagggcccccataaacatttatacttagtagatcacatgtaatcgatctttgctttagaaaatgtggtcatggtatgcagcatcccaggaagagggcacaagagaaactgaccctgagtcatgcctccacctccttcaccaccaacagctgagatactctgaacagaggctgagatgctgccctccggggtttatttagcacctggtgagtttgttcttccctctgcctaaagtggaggaaaaattaaacctctagaaactgaaagtgttggcagcagccaggttaagaactgtgtgagtgagaacttacagaaacaatggtgagtgcacagcctggaagagacagctctgcacaccctctagagaggcaggtaagatggtgacaagcccagaaaagcacagaccacctgagcggaggtctctgggtacctgggcaagtgcacctcgtgatggtgacagcagcccaggacagaagtggccctcctcagggcgttcttgacatcccagcaagaaaacctctccacaggagctcccaagctgagaacaaagggatgggaattcccagggaattgtttggcagcaaccagaaaaactctgaggggccttttaggggagaaaagaaacctagaaccttttcttccttttttccttctttttttttttcttgagagagtcttactctgtcacccaggctgaagtgcagtggcacaatcttggctcactacaacctccacctcctgggatcaagcgattctcctgcctcagcctcccgagtagctgggattacaggcacgggccaccacacccagctaatttttgcatttttagtagagatggggtttcaccatgttggccaggcaggactcaaactcttgacctcaagtgatccgccctcctcattctcccaaaagtgctgggattacaagcgtgggccactatgccaggcctctagaactttgtcaagtaaaaatacctgtcttcatgtctgttttctccaggagccattatcttatatacgtagggagggggctatgtgtagagggagatgccaggtatctttaactggaatagggccccatcttctctgcaacaatgccaaagtccagctgggaaaaaaactgtaggaagaattctattatagctcagtgagagctcaggaataatttttgtaacactgtataacatttgactgctcaaggaggttattttttttaaaaatagcagcagcttaaagttggatggaacatactgttcagtttattaccaatgagaaacaggtatagagccccttcttgaaaatatatcttcctcgttttttttatatattaaattcagattatatgtctatataattcattcttcttttgtatattaagttcatattagtacatcagcccttgatcaaagctagaagcttcctattggattgtaattctgaaaaggcattgttgtagggttaaccaaagtaacaaggttcaagcattcattacatacatatttttagaacacctccttcatgccaaggtccctgcccgttgctgaggacagaacaggcagatgtcatccctgcctggtcttgtggctttcttgtgacctgctttgatagagggttcacaccagccctgtctaggcttgctttctccaagtagtcatatttttcagattgaaataatgcactttgcagtagacacctgtcaggcttgtggctgcctggaaccttttgaatactcatcctagacctggagattttccctacaattcctgcctccctaaggcagaatccagagctcagtttcccatcccctcctgcagctgggggacctaggggttgccagttggtgcaatcacataattctttcagaaaagagcgacccaggatacaggtttcatgaagaatctgttttcaagaggggatgagggtggaaaattctggttttccagggcagccttaatgaagcttttggcatccagggtccagcagtgtgagctgtgggggtgtcactgcagctggccaacggaatgacttgtttatgactgtgcagactgtaggcatctctggctatatcagacatagtaagctacctaagattctcaattacttatcttctaaaactagtaagagtgagttctgttctttgcaaagaactgtgactaatacatatactgaactactgttacctgccaaaatccaggttgacacattcctaccttacataaacttcataaaaatgatgtaagggccgtgtagtggctcatgcctgtaatcccagcactgtgggaggctgaggcgggaggatcacgtgagctcaagagttccacaccagcctggacaatatagtgagatccccgtctccagtatttaaaaaatcttttaaggtacgaattattatacattttacagctgaaaacactgagactcaaaaagacacttaattcattctacaaatatttattaaagcccaactgtgtgccagccaccaggcatagaatagggaacaaaatagtttccctgcaactatataaaaagaatggcatattgtacttaaatgcctccttgccaaaataagaggcacaggacaacagctgtctggagatgacctcaagccagtcaggccccattttaaatatagaaacccctaagaatagccgccagtgctccagactcaacaggtgattggcccagagaggggaggtgaccccaggccccaggaaagggagcgaggacagcgctggttcccggctccccgcaccatcatggctttgcctctgaggcccctgacccggggcttggccagcgctgccaaaggaggccacggaggagcaggaggtgagyggggaacgggcggatccggrggctcccctaccctgcccacctgttcacaggcccgccgccccaggaccgccgcgctcaccccgctccgtccgcagctcgtacctggcgtctgctgaccttcgtgctggcgctgcccagcgtggccctctgcaccttcaactcctatctccactcgggccaccgcccgcgccccgagttccgtccctaccaacacctccgcatccgcaccaaggtacgcgggacgggcgcgcgggcggcacgggggtgctgcgggggcgggggggggtgctgcgggggcgggggggggtgctgcgggggggggggtgcgcacaacaagacgagaatcaaaaaacaaaagaaaaaaaaaacaaacactacaaaaaaaaaaaacaaaaaaaacactaaaaagacaagaaacacactctgttccacaatagccacgtgaaccctctgcccacgggctacgaacacccctgaggccccggacgcccccggacacaataaaggtgtgaagcttcgagtctgcggctctgtggggagggcggggccacggggagcgcgcccagaggcgcccgctccgcgcatgcgcccagcttggtaagcgctcctgctccgcgcatgcgcctagcgcggtgggcgctccacgtgcttttcccacgccgctgatacggaggtgctcgagggagcctcctccactcacaggtaggcgatcccagctccctgtctctcacctggtaataatgaggcctccctctcacacacacctattaataattagggctctaggctgtaatgggcttccgcgtacaccgaatcctcacagtaacgctgggagcagggtataaatttagttcaccttctcccgaggaagacctgagattcttgggaattaaatgacttgtccaagttccggcagctcggcagagcccccatgggagcccagggctgcagatcctgaagtcccacttcttgcctgacacctgagctgctggtgtctgtgaatcccagctctctggatttcagacggaggctccacagtcctgtgtgtgaggccttgggacctaatgctggatttggaatcttttgataattctctataatctttctttctttttttttttttttttttgagacggagtctcgctctgtcgcccaggccggactgcggactgcagtggtgcaatctcggctcactgcaagctccgcttcccgggttcacgccattctcctgcctcagcctcctgagtagctgggactacaggcgcccgccaccgcgcccggctaattttttgtatttttagtagagacggggtttcaccttgttagccaggatggtctcgatctcctgacctcatgatccacccgcctcggcctcccaaagtgctgggattacaggcgtgagccaccgcgcccggcctataatctttcttaatgagtcttctatatgggaaatcacatgctcctagcctggctctcctggcttctgagtacctcattcaagggggacaggagttcaaatgagctctggacatttcttcacctcctaggacagcctgcccacttaccattacagaggaacctgaagtgtgtgaagaaacccatgaccaatgcatgcctgcgtgcacgtgcatgcacatgcacacacacacacacacacacacacacacactctttgaccctctcccctgatacacacctctcagccccatcaagaaaagatgacctcaggctcccatcaccatagaaagtgaaaaaactttttcaatgcccacaaataggttcccccgactattcccagagaggcactcaggtccctgggttatagctcttccacgcaaggaaagtgtgctataaacatcctcatttcatgtgacaattcttaagcatatgaaaatttatgctggcaccatgcctgcttctgtaaaaagtgggtcattgctgaaaaagatggacagatatgtaaaaacattacaatctctatctctccgagaaggtgcttagcacctggtaggttgcttaggccagtgcagatctatgcagaagttgtttccatgtaagttgatttatggttgcaagcaagtccagcccacagtggtagagataaacaggaaagtggattattaggacaaaggcacatttggggccacacagctgaaatcgtccccactgaatgtggcagtgtcttcaggcttgtcctccagcatttccttgtagtggcgtttgaagaagccaagctatcaggggaaataaattagaaaagctgggtaagtccgggcccggtggctcacacctgtaatctcagcactgtgggaagctgaggagggtggatcacctgaggtcaggagctggagaccagcctggccaacatggtgaaaccccgtctctactaaaaatacaaaaattagctgggtgtggtggtgcgcctgtaatcccagctactcaggaggctgaggcaagagaatcgcttgaacccgggaggcagaggttgccgtgagccaagatcatgccactgcactccagcctgggcaagacagcaagactccatgtaaaaaaaaaaaagaagaagaagaaaaagaaaagagaaagaaaagaaagaaaagctgggtaagagggcagggaagaaaattgggaataagaagaagctgagagagaagaggaggcaacaactaagctaacttacgtttgtgtgcgagaacatttatgtgaacagctatcatatatcgagcatctgctggccccgagcacagtaggtacacacacgacccgtggcaggacagcatagatccaggcagatctgtgcacatgccctggcctcatttctctctcacttcagccactctgtgatataagcattattatcatttcaaaaatgagaaacggccgggcacagtggctcatgcctgtaaacccagcagtttgggaggccgaggtgggcggatcacatgaggtcaggagtttgagaccaatctgaccaacatggtgaaacctctctctactaaaaatacaaaaaatagccaggtgtggtggtgtgtgcctgtagtcctagctacttgggaagctgaggcatgagaatcttttgaacctaggaggtggaggttgcagtgagctgagattgtgccactgcaccccagcctaggcaactgagtgagactccatctcaaaagaaaaaaaagaaagagagaaacaggcttagagaggtggagcaacttgcctaacattaaacagtgagtacatgatagagccaaaatgtgtgtccaggcctgtctgcctccacagtctgagttctcactatatcagccagtctgtaggagggcttgggttggatgctggtggtgtcaagaatgggataaggccggatgaggtggctcacacctgtaatcccagaactttgggaggccaaggtgggcggatcacctgaagtcaggagttcgagaccagcctggccaacatgatgaaactccatctctactaaaaatacaaaaaactagccgggcatggtgcagtccacctgtaatcccagctactcgggaggctgagacaggagaatcacttgaacccgggaggtggaggttgcagtgagccaagatcatgccattgcactccagcctgggcagtaagagtggaaactccatctcaaaaaaaaaaaaaaaagagttggataaaacacttgccttgtacagtgtggctgtgatgagcgccagcagtagcagagcccccacagagctgcccatgatgatgggaatggcattgtagacctcgtcttcttctagcaccatctccatctgatttagagatcagagagcatccggcctcatgccatcccagatgcctcccaggttccgcaacctttaactctctcccctcctttctgaggctctgctccaaggagtgagacacagtagcacccgtgcccttagggacagctgtcctgcccagagactttcaccctcctcccgcaaggcttgcaaaccccccacccagcaccacagatgtagccctaggggtcctctttccagctggtcgctgccctccacatggtctctacctgagctctcataaatgcctcctgtcctggaagctgggagtacacggatgtgtcgaacgtaatttcagccacactcacgaccaacaccttcttctgcaatgtctgcaaaggggttgggggaaacctgtggaactggctctgggggaggctcagagcttcgggggtgccctggcttgcagatgggcacagacatgccaggtcctgcctgagtctggggcaggggctctgccgctgcccccacacacctcgcggacccagccgaaactgagattgcccttcagggtgaaatccagctcctcctggacgctgaaggaggggacgtcacagcggaactgcaggcagtcagcaatggagcagtcctgggggcagaagaggggtgaaactgaggggttcttccctgaggagggagccataggaaaaaatatggtcaggtttggggtggggaacagatgagcagttacaggacatgcacggaactctgtggcctagcagtacatttcccagtatccccggtgggggctgatcttggcggtgggggttcagggactttctcaccagcatgggacttcttgaaatctgggtcaggaagtcagaatgctggggaggttttctctctgaaacacaggggagactctgggaagagaaagaagcacttagccacagaatgagcaacatgtccctggtaagagggagtgctgtgctgtgggatgtcagtctgaagaaagaggagagataggcgggtacctgagatggggcctccatgaccacatcccacacagccaccccgttcagcaggacaggaacccagaagttaatgctgatggccagatctcgctggctgaggttattcacctgcaggaaatcaaggcagagtgttattgtggtctctggagccttccaaatcctacttccctcctggccctaccccaaggctcctctccatcttctccaccaacttccaactttatccacaacgtggaaggcagacatggatactccctagactctcacacggtatcgatgctcagcctctttcattttcttctcatcggaggttgcaaagttgaagtacttggtggattcttcctgcctggagagagagcctgtgggtgaaaaacagccctgaaactgtccccagttgtgccctgtcctactgcagagagctctgttgggctgggcagatgtctcagggaaataacgatggacattatttggccgggcacagtggctcatgcctgtaatcccagcactttgggaggctggggcaggagggtttcttgaacccaggagttccagaccagctggggcaacatcgtgagaccctgtccctattcaaagtaaataagtaaaagatggtcccacataacctttgctgcctcggcttcagctcccctccctccgatgtcccttgcccccatcacccagatccactagctctgccatgcacaccgctggctctttcatagcctcatgactttgctcaagctcttctccttggaacgttcttactgtctccagttttggaaatttacacttaaagacccaacttaaacctcatgtctcctacatggggcaaaggcgtttgcattgctttctctaataggtagtgtttggcctctggtaatgcttacagagattgtagcagaacaagttagcctaaggggactctaggaatgagagctggatcactcaggaagacatggagtgagggccccttcatggtgggaatgaagaaaatagattcggctgtcctggggcaggtgagtaaatgtgaaggaagatagtgcctgtgcacaagcctgtggaagggacatcagtgttccaggcagcaggtggggtctttccacccaaacttccttcagcaaacacaggctgtgtggttggcactggggattcaagttaagccataactccctgccctctcaccacttaacatctaaagttttagtaaaaatgagcaagctggccaggcgaggtggctcacgcctgtaatcccaacacttagagagactaaggcagaagaatcgcttgagcccaggagttcaagactggcctgggcaacacagagagacctcgtctctgcaaaaaaaaaaaaaaatacaaacattagctgcaagtggtggcacacgcctgtggtcccagctactcaggaggctgaggcaggaggattgcttgagcctgggaggtcgaggctgcagtaagctatgttcacaccactcccctccagcctgggtgacagagtgagaccctgtctcaaaacaaacaaaaagcaaaagtaagcagaccagcagaggggcctgcacctcgcatgcagcagccagaccagccacacagaaacagccccagcagtccaccccccatcagcctgatgactaaaaacatgggctccagtgtcaaaccgcctaggttcacatctcaggtcgaccacttcctacctgagtcactgaggcaagccacttcacgtctctggaaactgt

SEQ ID NO: 96500 - DNA, 14213 bp, Homo sapiens
ccccaccctggtccaacccaccccacacacactcaaagaggagccgggggtctcattgtaacactcgtttttatataaatattcgcaagtcatgttacagaagaagccccaccagggaaaaaagtcaacgttagggttttgttagattgacccctgccttctaggttgggccccagcctggaggcgcctgctgctttgggaaggctggggttgctgccgtgaggctgccgaagaagctgcctgtgtcgcccacccctgggccgacccccttctttggtgtgtggtacatggtgaccttctctggccacccttagcctggggcagggttttggagaacagggttcagggaagcagggcccaggagtcctgggggcacttggaaatggggtgaaggggactgagccattaagaggtggtggagtctgagatttagaggctgagcctttgggggtgggggcagagtgaacgggaacatgttgggggaaccggggctgtcagccaagtaggaagcttctgcccttccctccagcccaggtccccaggtcctgccccctgttggtcatctcctgctggccccaccttcccagggagaagcctgactgtcccttcccggctcttccccctgcagtcccctttccccacagagaggccagaggctaggaacacagcaccagtctgagggtttaattaaccaggaagggaactgttgggaggggcacccctgtaaaaatgtacaaaaggtcttggggctatgtgaaaggggtgataaatatgtacatggaaccccccttccttgagcccctcctcccccagccctcggagggcatgaggacttgggtggtaggtgaacgggagggggcactttggcctctggcttagtgagcccttggggaggcaggcccagggcctagaggcccttacaggggcaaaggtgtacctcaggaggccccatggcccccgagatgagccacactcccatgcacacgcccctctcccttctctagaggctgtgacctctgctctcccagtgaccctacactccatgtgatgcttggtcttgtgggggttgaggcttctgttcccaggttccatgacctcagaggtggctggtgaggttatgacctttgccctccagccctggcttaaaacctcagccctaggacctggttaaaggaaggggagatggagctttgccccgacccccccccgttcccctcacctgtcagcccgagctgggccagggcccctaggtggggaactgggccggggggcgggcacaagcggaggtggtgcccccaaaagggctcccggtggggtcttgctgagaaggtgaggggttcccggggccgcagcaggtggtggtggaggagccaagcggctgtagagcaaggggtgagcaggttccagaccgtagaggcgggcagcggccacggccccgggtccagttagctcctcacccgcctcatagaagcggggtggccttgccaggcgtgggggtgctgccaaccaggttggctccaggaagccagcacagcgatctggtgggctagggcccagaaacgggggcggccggggcctctcaaacagcaggtgaaggccctggggcccagtggctgctgcggcggcggcagcggcggcggcagcagcagcggcagcggcggcggcagcctcctccttccgctcttcctttacccgcacagattccttggttggccgaggcccctcctcaccagcccgggccttgggagtagcaggagaaactcggagctggggccgtgagaaggggaggtccctggagggcaggcgtggggagagaatgaagttctccaggggcagcaggggctgagggtggggcaggggcagggtgggtgggaggcacacctgtccttctcctccttggtgatggagggctccctccgctccacaggccgctccttgtctgagcctggagtccgggcggcctcagggggccggacccaggcaggaaaggtcagaggactgcggtgcaggcggccccatgggtccggtggggaggcgaaggctggtggggcccctgggctttctttctgggcaaagacggcgccggagtctgggcagagggtgaagcagagagtgacaggggccagaagtgggaggccctgttcaggcctcctcccagaccgtctgagctctcaccctgtggccgcagcccccccaccccaccgcacccgcactcactgaatgtggggctgcccaggcctccaaaggccccgttggagagggcagccaaagaggcgaagcttgtgggacgcccaaagggatctgtgggaggaaaggggggtggtcagagcactgggcagccggtgctgagcaggcaccaggcctggctgggcagaggcaggaccggtgcctggagtcctcagctgcctgctttcagcagccatgtgctgagcacttccttgggccaggaaggtgttgagctttgacaagcaccctgtcggttaacctcacaaaaagcccaagaggtggttaggatcatgcccacttgaagatgataaaacagagaggctcagagaggtgaaatgacttgctggtggtcatctagccagggagcggtaccaacccagggcttccttgacatgaagtcacgctcttctccccaactccccaacaccagccgcctggacccatcacagcagatctccgctccgcagcaagcctgaagaccttgttggcttccccccacctgacatgcagggcccttcccgacctgaccctaacttcatgcatgcgtcacacagccagacagaacaactaacctatcccgccactggaatgtcaccacgtccccagccaggaacacctttctccaagccaccaggctcaactcttccttgtccacccaaacccaggtgaaacctccccaagaagcctgccaagatcctaggagtcagtggccatgctctcccctgggccagcatggcctccccaccttccccttccaggtggcgtactgcccctgccactggctactgggagacagggctccagctggcagagactgaagtcaccctgcccttccctactcattttacagatgaggaaatcaaggctcagagggggtagagtaacctgcccaaggtcactaagcaagtggaaccaggtctatcctgcattccagctgcctgctgggtctgatttccatctcctggaagtcagggacaaagcctgggttgcccaacacgcccttggctcttaccaatgtgggtgctggggctcaggaagggtccgtgggccccgggagctgccgtgaaagggttggctgcagcgtggacggcacctggggcagagaggtgggagattctgatgaggctgagtgggcacaagctgggcctcaggctatagacagggaacctcaggcccgagggggctggccagactcaccagtcgcagtgaagagggaggccgggtgggagagctcctgcccagggggcagggccccatagggccccggaaggcagggcaggaggtcattccgaaagtcaagcttgtgggagtcaccctgtgtgggacacagggagaggggcagtacatgaggagccagtctggtccccctcttgctctctcacccgtggttcccctccaaaggctggctggcacccagatggggcctggatgcctatcttctgcctctctcggagccttctctgagcagccccctaatgagccagagaactaaggtgccagccatagaactgttcagcagtgatgggggacaggagagaatgtttctggccaagattctgctgagctctgttgagggccaatgcccagagctcagtcctcccctgactctgagacccactctccccagccctccggccccagtaccttcattttctcctggtgtctcaggatcatgtaagccacacgcacgtgcatggcacaccacttccctggtttctgccgccccagaaggatgaccaaagggaaagggaaggaaagaacgttcactcatcatccactccaggcctggctctgggcccagcctcgccacaaaatatccctactcatcattcctacaaccaagggatgactaggttcattttacagcctaggaaactgaggctcagagagatcaactgccttgcccaaggtcccatggccagttccatccgagcccaggtctgcaacttgaaagccctcactctctgctgttccacatctggctgcctccatgttctgggcttctcacttatttgtaagcaaaaccccccttagccaaacatgctaacaccagcccccagcctcatgcagcctgaggtcctcacacaactcaccctcaaaggtggccggaaatggtcggggatctggggatggcaaaggagagatgggaggcgactcagacccgagtcctgggccaggcgcctcgcatctccacagcatccactcacccccaacatgcctgagacactgggactccctcaaacccttcctgctcaggcccaaactcctttccccatctctcccagtctaggcatctctcctccagcacaaggtttctgaaccaagccccagggagctgccctgctggaaggctgcgggtggtgagggggcaggcaggacaggtttctcagagaagctctcctattaccaactttagagtatagcggtctgtttaagatttatttagggaaaatgcctttgaaggaagttggaaaacctctggcctagtcttccctgtaggaaactggtcctgtgcgtttcacaacgttcccgcagccctggggtctacactgctgcaagtgctaaggggagggaggctctggctctcctcacttcaccaaggggcagcttatcttttgttttccgaacagggcttcctggtatgatgtcatttggaaaaaaagtgttttgtaactttattaaaaagtttgaaaaccactacaaaaaccattgtcctaatcatcctatttctgggacaagctcatgaaactctcattcctcatgcctgggaaagccagctatttacagaaattccctctctattagacacccaggaacacccgattgtgaattcaagggaggaatcagcagttcactctcctcaagtcagttctgttctccccgcaacacaccttccagctcccccaggacctgccctggccccctcacctgtgtccccttctgggagagcccgctcggcaccggccccagtcgtggtggcagctcagggttcgtgctctgggaaaggggagtggagggatcagacaggagagctggcaccaagcacaaagggatccagaaccaagctgggacactgggcagggagggatcatggctttggagaaaactgggtgcagcagggcagggcaggaggatgggcacgactttggggaatgggagaagggtgcttggacccggcgtgtctgggtttgtcaagatggtaggcggtggtggtgtctggattgggagctcaccttgggctggaaggccccctgcagggagccaaaggagacggccggcgggaggcccggaggcagcccgggcactgcgggagggaaggccgtgtacggctgtggagagaagggggactagtacaggtgggggtggaggcgcagcccaagtccagcctgcccgtcagtccacgggcctccaccctaaagccccccagggagctgtcccaggctcaaggctcttgcttttgtgctgaagactggaccccagcagtcagggtcacaagcatggatgcatccacgcccacaccacacaccccatacgcacacgcacacacacactcacattatgtcggaaaaggccttccatctttcctggatatttctcaaactagggaagagaagggaagagtaagctgccagccagggacccgggccttcccccagaagccatgccctccccagaggcctccgagcctcatcgccagcccaatgaggagctcaccatgtgggggccgtggggtggcagcaggcccgggggataaggggtgaagtgctggtgggtgtgctggtgggtgtgctggtgctggtggttgtgctggtggaactggaaggccaggggccgggccgagccccctgcccccaccacctcagggccaccctgggcattcaggtagcgagagttcaggtcctggccgatcaggtcctgctctgtgggaggggacgggagaaggctttaatgctgtcgccacatcagcctccttgggcccaggtgactgccttccctctggcctcgagccactccctcctcaagccctgctgtctgctgaggctcaggtgccccaaagccaactgggcccgagcccggggtgatggccccccaccccccggccaggaccccaaactcaccagaaagggcgttagcggctgaggccccagggtgccctggcacctgcagcaggggtgggggtgggggcagggtggggccaggggagaacaaggaggggtggtggggtggtggggggggccgcagcccgggagggggaaagctgtgtggtggacaaaggcaggggcagtgagggcgtcgggggccggtgggtgagctgcgcggacgaggaggaggcagatgaggaggaggaggacgaagaggatgatgaggggggaggctgagccacgggaggggccggggccttggggggcggccgtgaagagctggggagagaagtggggagatgagtgaggggttgggaggtgccagctctgacgggagggggtcagaagcctgggtgataccgtgaccctggttctccaacacgggaggtggcagaacccagccccaggaccgccccccaccgagggaatccgttctcagactgaggcgcctcccacacccagcaacccctatttctccctgtctaggtctctgcatccaygcagctgcctctgccatytctggccagatgactttccctttctgactcaaccacagcacagaacagatcattcatgttgacgcttaattagaacaagccacctggggtcccaccctacaacagtggaagcagcaccacactggcctggcctgggagtcagragacctgaattctaggcccatcttgccatgaatgcccggggtgaccttgagcaagtcactgcccctctctgagccttagttttctcaataataacaatgacaatgacrgtgacaaaatagagcatcaatagtaagtgtcaatagttcttaccctgtggcaagcacctgctgtaggccaagtgctggcacctgctttaaaagctaatccaagtctccaacattccacgccaccttccccactgctgcccagcaaagtaaccatctgaactgcatcaatggcttcttttaagaactcaatttccttttttttttttttaacttagcctccccctaagcaatcgcgtgtgaaatcaaggggctgaggcatgacactcagctttctaaagttcacaaaagctaactcaggactattttttaaagtttactcacgtaagacctgaaatcatcccatatatcactgacgctgaatgtacacactttgggaaacactgcattcactcgtagttaatcctcacaacagctttaagatgaaagtactatgatcattccatttgacagaaagaggaaatcgaggctcagaggggttaagtgacttgtcaaaaatcacacagccaggaagcgtcagagcaagaatttgaatctgggtctgacaccaaagccagcgctcttaaccatcatgtcagcatttcccaaagtatgttccaaagaacactattccgagcagacttgcctgcctgaaaaaacgttctcaccagcaaacacaactgggaavcagcacagcctggattcccctgcatgggaatgtgtaacggactcaaataagtcctgcagtcatctctttccatttgtttttctcaaacttttcagtctcagaatcctttttcaagtcataccccacaggtaccatcctgtgtccccrccaccaaactgaccaggcccttccggaccgcatcaatcccccaagaccactcacctgccagtgctgaggtccaggctgctgccatatggagaagtgcggaggccgaagggtgagacccgaagctgcagctggggctggggtgggggtggcagactgggagtggccggcaggggtgcagggggtgagacaggaggccgagggaccggtggaggcggtggttcctttggggggaaaggcactagcagcgggtcgggccccgggggctgttcttggctccgctccaggcccgacactttagggaccacggagagttttgcttcacagttcccattgaaggcgccgtgggggcccgaggctgtggggcaggatggcagacatgctcagttgaggctcatgctcaccccactgccctcccgtgcctccagccccagaccttgggaccaacctttgctggttgagacagtaaaggatgggtcgaggtcatcatcggagacctggggaagaagggcaagggatagagttaggttgtgggtgggccaggcctccacccaggaaggccaaatagcctctggaggctgctaggaactggtggtagtggcaagtctgttccttcagtttagctgagatccatcaaagactgggctctagggggctgagcttggagaaaaagcagagtggagcagctgaccccaagaatccgataggccaagaggactaaatggaggcagcgttgaagcagcagagaagcaggcaaaccaaaccaaaacgtcagaggtcactagctgctggcccacaggcctccctcgcttacagatttatttggtccaccagcgttggtaaaagttttaaaccaactgcagatatttaagaatccggagattcctcattaaaactcaggcttgcagattgcctcaagaatgggccccctgttctcgtagcaacaatcagcctagacagatagagatggatgacggaaattgacaagaaccctctggttcaccacagtcctatccagccaacttttgaaacaaaaacaagacacacatcagggagtgcaaattgagttacttacatgggcccaatgggtagcgcattaacttctaggacatactatctcacaacaagcaaatcgcccctaaggataaactcaaatacacctttatgggctgagtccctacactgactacaatgatttagtgtcctcactactctatctgcggtctctgctcagacttgaatctagatcttcattctaagatgggaagaaggcccatctcagtgccacagccactctgggtttccgtggagaaccagaagtagctcaagggctttggaaaggatagtatgccaaagcatggaccctccattccttggtcagctaacccctagtcaccaaaagaaaaaatgacgccatttaccctcccaatccacccccgttcctcccaaaaacctaatcctgactcaacctaagccatgtttctcactcaagggaaggctgtctgctgcacgcagaagacctttatgctgcagtcccttttacaagcagtgacactgcccacccaagctctagccccactcaccctctcgtccagatcactttccgcgtcacactggggagaaggaaagacagaggtgtcacgagagggaagaggcccagggtggagcagggaggggccaggacaggtggatagcacttactatgtatccagcttccagagagtgacgggaggacgcctgaggaagaccagagtccagaggtgagggaggcggctgctgaggcagctgggaaagtcgcagctcccagcagggcgctcatgggcctccaggatctactctcagcctctccttccagctgcttctcccgccactgcccacccgggtcccagtgctctcaccattctctaaatacgccgggtcctcacgtcttcatgctcttgcccaaaacaacttttccccgtgtcttttcttagcaaacttctgactatacttcaggacctgactaagacatcctagggggctttccccaaccacaactctcctcccatcccccaggcagcacaagcggcttcctcatgtgggtttctgtagcatctctccccatctttgtcttctgtagcttctcaaattaaggtctaggtgtttgcttgctggctatttcttttctgctggactgccaccacctcgaggaagggcaggaaccacaattaatttacgacccaactatattcctttgacgcctctctgaattatcaaaacgtttgaagtagacacagaaccaggcaaaaggaggtgcacctgactgtagacaggccttcgtcagacccggatgagtaagggctcaaatttgccctgcttgcctctttgcccttagaaactggggtctctgtttacaaggggcagtggcgttgctgatgaaaaacggggctgtgggaaatacattctgcctaaagagttttaagggacaacctcacctcttttcttctccgcttattgggccattttcgggcccgatccccagggggccggccaggctctcgatcagagctgtcccctggctccccggtggccccactggagcccccccttttccgcttcccagaatgcttcagccgatgttccagtcgctctgggggctgaagagatgcatccttctgtggaggaggaggtggggctgagatagatggaaaagggcaagctcccaacccctctaggggtgaccaggttgccgaagtacccctcgggccgggaaaccgggtccccagagacgagctctacctcctcccaccccagggcggggcagaggcctggccagaggagccggttgctctggtttggggtgccagcattcccccctcaactccacccactaggggcactgccccctccttgctgcccctcggaaacccccaaagtctcctagccccattaggccccacctgcaaggcctcgagggtggcgaagctggcgatggcgaagccatcgatcaagtcctcctcctcctcttcctcctcctcaggctcctcctcggcttcgccgtcgtctgcgcccccctcctcctcctcctcctcctcttcctccccgcggctgcccgagccggcaggccgcttccgagctcggggtcgcgggggtcgaggtctcggacggggccgccggcgtctcgggcccccaggccgctctccagacgaagctgacgaccaaggcctggcgggcggcggcggcgacgacgaggacgaggagccgcgcggggcggccaacagggcccggggcgcgtcgccgcctggacctcggcggcgccgctgctcccggtctcggtctcggcgcgagcagcgccgccgtcggcgctccccctctgctgcccagcccggacccggggccgcggccgctgccgtctccatggcgaccgccctcagcgccgcatccggaggcggcggggcccgaagcggcctgtccgcaggcccggggtcgcaggcgcggcgctggcggctgcacagtgacgagagggccacggcttctcctttaaagccggatctgctggccccgagcttgccccaaggccacggcccggggagccggcgccgcccccggggcgacaagcccgagggccccccctgcgggctcggcggggccgcgacggcgaaaacggggcggccgtccctttaaggcgaggccccaagttgtccagctcccggcccctttaagacgacccgacagtgtccggcggcctagtgcggtggccaccccctgccaggggtcgatgcaagtctccccgaggaagaggaagggccacccctttaaaaggggccgaaagctcgccccgaaacgcagacctcccctttaaaagtgtctcaagtcctccggctcaaagaggccacccctttaaggagtccagggtccttctaacagcaggccgtccctttaagggctcggagttagtttctagtcctccacaagcggccacttcccctttaagttgaatttaaaagacttcttgtgtgtgggggaggaggacgtaaagaaaaaccccactcgccccagttctcccaacggcacagttctcaatttgtcagcgtctgctcggcggcttcccctttaaggctggcgttgcagtccgccgagttcagtggccacccctttaaggagatttaaaggggcctcctccgggcccagctcctccagcctccgcctccggtcgccatgaaaggcgcgaggcggggcggggcagcgaggccagccctccaaagccccggatgtgaggcaacggtgacgggtacagctcccctgtccgccgacataaaagtctcttcctcctttcctccgtctctgtccgacttgggccttaggggatccggaacggccgatgggcagcgggggagctccagcacaaactcctgttgtctcctttggagtcttagggcgcttctccgccaggacttccctacccctcctccctcttcctcctcagcctacgcctccttcctctctcggcctcctcccacgctccgcccccttcccctcacccccaacgggcgcagtcgttgataggctgggagggctacgtcaaggtgaggggcggagccaaacccgagggagtgggtgcatgtaaccgccctcaaatcttggattgggttacgtcggattggctccgcccttccccccagtcttgtgactcgactggttagaagtaggtgtttggggcggttactacagggccccgcctcttcctgctgtttgtttattggccggtctcctgatggcgtcgaggcgaggggcggagacgcggggcctgaggcgttgggggcggttggccgccggggggcgcgcggctgcaagaggttccgttccacagccagttaagtcatcgccgcctttccgccgctcggcgcggcccacagacagcctggcgtctcgcgcacgcgcgtggcggcgccgccgtcaggctggctgcttgcgagtcgttccgcggcccggggtggcccgagcggccgcgtgctgtgcctgcgcctgcgccggccgcactaacaggcagccgcgtcccttccaggcgcggctgctggcagcggtcccgagtgctagcaattcgaaaacgccttgcacctgcatgagcgcttctccgcgtttgtgactgcgtttggtaataattccatgaaggagatgctgtcagccccattttactgggacggaaaggaatgcgcgcacagacgggctggtagtctcctagccacgtctatgtcagccactgccctgtgatgcctctcagttatgaaagatgcaccccactgctcaatgtgactggcttaaaaaaaaagagacagccatttctggccttcggttgcccgggttaccgttttaaaagtggacagcgcgctgacatgcctgccttgctttctcgtccataaaatgactaattccctgtcgcagggacatgtgcaggtcaagcacctatgacagtcgtcgtgagtgcttcattatggcccattactcttagctctttgttttgttttgtttttttgggggggacagagtctggctgtgttccctaagctggagtgcagtggtgcgatctcagctcattacaacctctgcctctcgggttcaagtgaattctcctggctcagcctcctgagtagctgggattacaggtacacaccaagacacccagctaatatttgtatttttagtggagacggggtttcaccatgttggccaagctggtctcgaactcctaggctcctgtgatccacctgcctcggcctcccaaagcgctgggattacaggcgtaagccaccgcacctggcctagccgtagctcttgaatccagcagcaggtcctggcctgcatgttagcaggaattcagggccatcttgatcttcaaggccttgacccactataggcctttcagtctccttgatataaatgaattgggagaacccagaccacggtctagggtcacagtatcatctggcactgattcagaagtgtccctccacacaggagaatcctctaagcaagagagtatctctaggccgggcatggtggctcatgcctgtaatcccagcacttagggaggccaaagcaggcggatttcctgaggtcagatgttcaagaccatcctggccaacatggtgaagcccagtttctactaaaaatacaaaaattagcgggtgtggtagcgcacgcctgtaatcccagatacttgggaggctgaggcaggagaatcgcttgaatgagggagacagaggttgcagtgagccaagatcgtgccatt

SEQ ID NO: 96501 - DNA, 12448 bp, Homo sapiens
catccttaaacaataaacatctccagcattgctggctttggaagaccccatggtgagatgctggagcttttttccgctccagatttcgcttctaaatatttacttttactttccatgttcacttataggccagggtttttttttcctaccattgaattatttcgtcatgttctatttaattattgctttaattggcattggtgaccacaaataataataaatactattaactggtgtaacagcttcactagtctatttcactgtcccatgctgttgtaactgaagcccccagcacaagcattcccagctcgtggtcatctaagacctttgaggtcattcttacatgcattgctagtgttttccatattccttgatggtagccaatttttccttcttaaaataactttcttcattcctagtaagcttcatatgtattttatgtattcttccctcttttttatgacgtgatacatattattgaaagctaggaaataatgcaagattcttgaacgacataataccacttagtacatctttttgtaagagatagtttttctaatacaaatctttgatatgggaagaaacaagcaagttgttttttaaggttttccaaccctatattctactacaaattaccctgttatggtatgcttccaaaattctttcaaggattatggtttatagagttcaataaacctaatagtttataaaacttctcaaaaaataatctcatgccaaaaataatttagtagtaggtggtctttgtcttgtggtcacatggttttgatattgtctttaagtttctataatttacaagggctgtttaatcagttggcataaatttcatgacaaaaatactaatatgtaagcaaagtatatgaaacaatattattgagaagtaaattacattccatgtagaaaaagactagaaagacaacaccaaaaccttaaattagacagtgttattatgagtagctttttttcttctctttttccatatagatcaaattactacattgggcgtatatcacttttataacatgaaaatacagtaaatagggcgatgataaactgcaagtgcttggggagaatgcttaactcaggccagttgcaagagagtgagaacacacacgcagcctgtgggagcgggctccatgccatcacctggccggtcctggctgtgttgctgtgttttcgcacctcaaaagttgggacagcgaagaaaggccataagagctagaacgtttccataagaagtgtattcagtatgatttgtctagctctgactaatgtgtgcaaaccccacattccactaagcaaatgcaagattgtttttccctgttcatttgttcctgggcccttcttgcttactgtgttgggagttggagaggggataattgacttctttcttctcacagtgttttctcttttttttttttttttttttttttgagacagagtattgctctgtcgcccaggctggagtgcagtagcatgatctcggctcactgcaacctccgccttccaggttcaagtgatactcctgcctcagcctcccaagtagctgggactacaggtatatgccaccacatctggctcattttttgtatttttcaaagagactggggtctcaccatgttggccaggctggtctcaaactcctgacctcaagtaagccactgcgcccggccatctctcacagtgttttttaaaacaacaatgcattttcataacagttggcctggagaggtgtccgaccaagttggaattcatagtagaatccattggaagttaatttttgatgtatttgactgttttccattgacttcgcattgaggcagtgagagagacttgaagaacttagaatacgcacccttttgtcactggcaaacatgggacatagaggcatgtcttgacagcaatttgtggcaacactctgggctggaatctaggggttagacagcctggccggttttgtaaattagatagccaggccaccctcagagtcagtttgagggttgagtgggaagcctgaataaaaagagaagttaaacttttaagaaaagggtcaagctttaaaactggaattgggttttcaaatttaatgaggaaaaagaaaccccaaaactggaattgtaattgtggagaaatacaactgataatatttggaatatcatctacaaggaatgaaactatccagaagcatttagatggtagtcagtgccatgtagggcacctctgggggcagggtggctcctggcactgtggagaaagacgactggtgcttccttctcccaatcggaggaaagggatacactgtggaggtcccagcagcttagggcctgccccccatgtggttatctctgtgccgtttccttccctctgtcttcctgtaactccttcactttggcccctctgccctttctgggcagagggtgacaggaggcaccgcatgggtacattctttttttttttttttcttttttttgagacagagtctcactctgtcacctgggctggagtgcagtggcgcaatctcgactcactgcaacctccatctccgggtttcaagcgattctcctgcctcagcctcccgagtagctgggattacaggtggccgccactacgccccgctagttttttgtatttttaatagagatggcatttcactatgttgttcaggctggtctcaaactcctgacctcgtgattcacctgcctcagcctcccaaagtgctgggattacaggagtgagccactgcgcccggccaactacatgcttttttcctcctgtcgggattggcctgggctgtacctatctcatggtggaaacctgcccagggaccaggccctagaagaccagcagtttatttaactgggttggcctttgtccccactccctgtgacccggccctgccacatctttacccaggtgcaccactgacatcatcgcttggctggactctggaaagcaggaaactgctggagcgtgtttggggcatcagtgatgtcacccgctacgaatgctgggtggggttactggactgagggccatgaaaaaagaaagctgcggccccggcccgtggactcactgccattctgctctttctcacgtttcagttcagctcggtttgttttccgtccccctccctctactgtaaaagtatgtactcagtgtttcgtttcctgctggatctgattcaggtcagtgatgaagttatttgtgaactcagtggggaggtgtttcctcccctttgtaccggccctacttagggatgcacggttggttatacgcttgcttcactcggttaggcatggaggagaattcattcagccctcataggtttaaatcaaatgcatgacccttcacattttccagagatttacggccagttacaatgagacaattaaacattcacccccccgccaagctgcacttggagatgtgtaagcagtaatgtagtcatgcgctccccatgatgtgagagcgtgcagaacgccactccccccagcaggtccgccaggacctccgcagggagcatcttgcctgcaaaatcacacatccctttttccccctctctccactttccctactacttttccactcccacacccacaaataaacaaagaaaccttgagcttattttacaaaagtctttgaaatggccctcgtctctccaatgctcctgggtcctggtttggccccatctgtgcaatctctctgatgagtgtgaaataagccaggtttggctcatgctctgccggtgagcttgccctccccatgagcctgtcctctccatctggcctcactttgtttgtgtccctgtgtcctttgtctcccatcctgggatcctggtggtttcctcctcccctcccagcatgagtccttttccccagggttcttccctatctctacatcagaatttcctgctttctcccaaatatgcatttccctggcccaggcatccactgcttcctctcatcgtgaggtccctgccgcaggctgctgatggtattgtggccatgccttcctccacaacccagggaaagctacgtgtgtgtctgtcccatagggaaggagtcatccctgtctcctcagtgtggtgtgttcaggaggaaggaaagtaaccagcgtcgttctcaatttccagaaactgtttatcatattgacaagaagaagaaagctttgtgactcatgagaatgatgttttcctctctggtacataaggttatctaggtccaatccatttgtgtagaggatcttctctcccctagtgtgatatgcacttatttttagcacaagtataaaactactttaaatgaaatcagcctcagccagggaaatatgctgagtaataatgttgccaggtactataccactgagttgagtttgtaattcactgctattaatccctgtgtattagttctgattttttactctttgcatacatagaaaaatggtgtttctcttcagagtcaaggagggaaaaaaagaaaagataaaagatgcttataacacttttgtgtccacccctaaaatcagcatattgatctattattttttctaggtattgatgagatgttgactcatatactttcatacaactggtaatatatatatatatataatatgtgtgtgtatatatatatatatatatatatatatatatatatagactcatttttcttccactttcatctacagcctacttgttttcttccccccatttttcgtatggattcatagcataaattgacaacaaagatacatctcaatttagagcttccaaaaggcacccataaaagtatctggtgctcatggaattgctctttcttctatgtctcttagttacacttttctcttattacacttttctatcccagccatggctaagaggcgtataatcagaagcagctaagcaatatatgcaagggaaataaaatgaatgcaaaccaagataccggttttgtaaattagatagccaggccaccctcagagtcagtttgagggtatagtgggaagcctgaataaaaagagaagttaaacttttaagaaaagggtcaagctttaaaactggaattgggttttcaaatctaatgagtaaaaagaaaccccaaaactggaattgtaattgtggagaaatataacggataatatctggaactcgcggcagtttacaggcttaactatgtatgtgttccttaaattatccacccgcagatatcagattacaataagtcctcacttaatgtcattgataggttcttggaaactaccactttaagcaaaaagacatgatgcatatgaaaccagttttcccatagtctaattgataggaaaaagagttaagttatgcagccacacagtacctcgtttggcttaaagtcactgtttccaagaacctatccacaatgttaagtaaggacttaccgtatatgaaaatatttgcagtaaattgcttttgagagaattggttatcacactcttctctgggtatcattgaaaattcagaatgtttaattacatcaggctatactcactggtataaaatcagggagcaagtataaagtaggtgtagggaaataatttatgttggattaaatgatccaatgaagggattttattaagcccctagaagtcccagaatgaaaatgtataactgcatgactaacccctaagaatttgctggggtttctgcattaagtacgcttcccaggccatttgtaatgaaggtaccgtgatctgttaaggaagagacctacagctgggaacaaaaagagccaattccatcctagacatcagtctcctgtttgactcattccaaccccaagaatatgttgtagagtgtaggacccatgaaagttacttactgtgcttccctgtaccttccatcatccagttcccagacatatctgtgtttcttctctgaatgcctagttacttgggatcccatgctgtattggtctgttctcacactgctgtaaagaactacctgagactggatagtttataaagaaaagaggtttaattgactcagttttacaggctatacgggaagcatggctggggaggcctcaggaaacttacaatcatggtggaaggcaaaggggaagcaagcmcatcktcacatggcggcaggaaagagagagagtgaaggggcagtgccacacacttttaaacaaccagatctcatgagaactcactatcacgagaacaacaagggggaaattcacccccatgatccagtcacctcccaccaggcccctcctccaacactgaagatcataattcatyatgagatttggctggggayacagcgccaaaccatakcacatgcctttcccaggactggtgatggaggaacggtgcccttgtcacacctaccagaatatactcacccacctccagacactccatttctctttcaagcacacctcttcacttgtgccgccagctaaggtttactgcagttacttcctttgtgtgtcctcttaccttaccaagtcgcctcacccaccatctactgttaattaaattaccacctcccccacttcccacctccagagtagagactgtgtcttcagttctcttggccttcccacaatgggaagtccagtgtagaacataccctaggagccaactaaatgtgctagtggcctgccaaccctgcagagggctagggaatcttcaaggagtctgctgccagtgaaactcaccagtactagaatcccaggctccaaagaagtctagaaaagtacatcttttaaggaggtaataagaggctcaagtgcccacaaatcctatctgctcttggcctagttcttttgggatcaatgtgctagtctctcttgtcgaaccagttactgaccagcaagactaaaaaaccaggcccaaacacattctattcatgtgcttagatatggacctacggatcaaatatcccactgtaaagcaaaacagcaaactgtttttcccttgtactttcacactcaacaatagcacgcttctgtggctggctgtgtgggggcttttccttacacaccaaatatttctcacaaacaccaaccaggtgtcctcttattcaattcaatcctgacactgtctacctggagatggtgtcggatcccacagattgacggctcagtcccatgagaccagccccacttcaggcactaattgcaaatccaggccatgcatacttctctgactgcctggctaaaaaccgcgttcacagccgggcacggtggctcatgcctgtaatgccaacactttgggagaccaaggtaggtggatcacttgaggtcggaggttcgagaccagcctggccaacatggtgaaaccccatctctattaaaaatacaaagattaggccgggcacagtggctgacgccagtaatcccggcactttgggaggccgaggcaggcagatcacgaggtcaggagattgagaccatcctggctaacacagtgaaaccctgtctctactaaaaatacaaaaaaattagccaggtgtggtggcagatgcctgtagtcccagctactcaggaggctgaggcaggagaatggcgtgaacccgggaggcggagcttgcagtgagcggagaccgcgccactgcactccagcctgggcaagacagcgagactccgtctcaaaaaaaaaaaaaaaaaaaattagctgggtgtggtggcgggctcctgtaagccaagctactagggaggctgaggcaggagaatcgcttgaacccaggaggcggaagttgcagtgagttgagatcctgccactgcactccagcctgggagacagagtgagactccatctcaaaaaaaaaaaaaaaaatgggttcgcatgagccccctccttgggttcaattaagttcctaggatggctcacagaactgagagaaacacttatttacagaggtgttatgatatatattgattttcgtccatggttcctggttcctgaatcccataaaccttcttacagccttttgttataatgttgggggtgtcacgcctcaggggcaggcctctgaccttccctgccctccttgcactgtaatgtttcccccatttctgattgtgagtcttaagaccctcccatgagagggtcccaccctacaccttgtgggaaggaatgtggatgtcatgaagtgtccataaaaacccaagaggacagggttcaaggggattccagatagccagacatgtggagcttcctggaaggcagggcacccaggtcgggcatggaagttctgcacctcttcccccatacctcgccctacacacctcttcatatgtgtcctttgcaatatctttttgttgttgttgtttgtttgagacagagtctcgctctgctgcccaggctggaatacaatggcatgatcttggctccctgctacctccgcctcctgggttcaagcgactctcccacctcagcctcctgagtagctgggattacaggcatccaccatcatgcctggctagtttttgtatttttgtagagacggggtttcaccatgttggccaggctggtcttgaactcctgaccttaggtgacccgcccgccttggcctcccaaagtgctgggattacaggcgtgagccaccgtgcctggcctgtagtatcctttataataaactggaaatgttaagcatgtgtttcctttagttctgttagctgctccagcaaattaatcaaacccaaagaggggagtcctaggaactccaatttgaaaccagttggtcagaagttccagaggcccagacttgcgactggtatggtggggggcactcggccctgtgggatctgacactatctctgggtagacagggtcggaactgaactggaagccaccccacctggtgtctgctgcttggtgtatggggaaaccccatacacatttggtcacagaagtcttctatgttgatgactgttgtggtgcgacagcagaggaaaacacggtttgaggagagcttttcccaacacgcttatgtgtgccagtttattatagaagacacagatgaacaccagatgaagagatgcatagggcatggtctgtggagttggggttcacctccctcctggcacaaggatgccttcaccaacccagaaactcatcaagtcttgttcaaggatttttgtagagcttaatctccactccccgccctccacccttcctggaggttgatgggtggggctgaaagttccagccctccaatcttctacttacttggtctttccatcctgaggctagctggaggcccaccccgtcactccattaccttaagctcaggtgttattgaaggagctccttatgaatagagcaaaatcacccctatcagaaatttcaagagttttaggaaacctgtgactggaaccaaggacaaagatgaaatatattttgtatgatagcacacccaccagattggatcgtggggccatatggcctttagtgtggaagctgcttgaccacattttccgcccatgcactgccattctcatttcaggctgcgtcatcatcatcatcaccatcacctgttcttagcaaaggtcgcacaccttccaaatgctttgtatagattagctcatcactccccatactcaccctgggagcatagtcagggataagaggtagagttctagcgctctgtggctactatggtttatgggatctttgcgcaggaataactggactttaaacatcttggcttttcttttcagtaggtcagtcggcatgtactcacagggccgtgcatgctgagcattgagacacatcacaagggagtgaaaacctgctgccatacccccccagaggcagcaggatgtttggataaataaggcataaacacctggagaattaaagcaagtacaattagtgcagcctttgccaagagaaaggtgtaagtgctaaatgcagtagatgttcaaatacggcagagaccacagtgggcagggtaggccaagaatgctgcctaaggagtggggcttggggtgaaactggggcatttgagacactgcaggcccatcaccctggctgcgccctcctgagggaggcagggactgaggcgggaggcctggagaggtctgtgcgtgagcctgggggctcattgataaggagcttccagtgggggcaataacattggaagtggagaggatggcatgtgtgccgggagacgcagtggagtggaagtcgccggaactgacaagggatgggatgtgagcaaggagtccaggtgagtcctggggacctgaaaggatggacccagagagataaacgacttcaaaccggcacggcagtgaagtgactgacccgcgagtgccctgcaccgaggctgacatttgacttcctgccaagttggccatcagacagttagaaatcaattttggagttcaggagagaggccagagctgaaaattggggagttgtttacattgggagtgatatacagtctctacatttccatccagttcaaaacattcttgcgtgtctgctatgcactgtgcactgaggttaccaagactggaaagacccaatccctgtcctggaagcttagtgttggcaggaggcagacaagctgatacatgcaaacaaagggctcacaggtgccaggatgccaagggatacagaagaaggatggttgcttctctacccaggagtgccctgaggtgtcttaaaaagaggagcatttatgactcaggcagggtggcacattccagacggcagtgggcaggagcctgactccagagcgccttagaggctgccgctgggagttgagctggaccctgaaggcagtagggtaagccataaattagggttaaggaaccaagggaataaggggatcagaccattgcatagctccagcagcaccattactagcagcctgtgtgaatgatggtcccctcttacatgcccaccatgcaagggctctaggccattcttcactctttaatgcagaaaagcaaaacttccagctgttttcccctacccaaaatgtgtgagcctgagcccagccccaggatggatcttgtcctaggtaaccaagaaggccttaagtgtcagaagaggtagctccaggctgaataaagggacaaatgaagcattactgcactgagatcgcccgtcgtggggtgggtctatacccatctagtcattaagcctcaataatttggtttctaaatggactattatttgctacagatcaaaagttgttggaaactatattacacagataaatagaattgtcctgcaaataaaggaagtaatctcttctctgtttgagataccatgcagtatttgtccaacttgtacaaatagttctgatccatgagaatcctccactttcaacttacttgctgctatatcccaactattataaggccatggagaccagtagcctggtttccattatctttgctctgtttttttttatggcatggttgacactacctccagtagcaaagagttaacttgtcatcagagctataaaatcacaatgataagtgaaaagttctcttttgtactttagcatccaagagaagtgtaattcccaactacaatgctcaaaataatagagagtttttactttgggcctgaaaatacttataggtcaggtctcctagttgggtccatgctgttgttggtgttccctcccaagtaaatacatactgaatttagcaaattattcatttgtgatcctctgtgccatctaaaaatatatatagtttaaaacgctggccaggcgcagtggctcatgcctataatctcagcactttgggaggctgaggcaggtggatcacctgaggtcgggaattgaagaccaaactggccaacatggtgaaaccccctctctactaaaaatacaaaaattagctgggcatggtgttggactcctataatcccagctactagggaggctgaggcaggagaatctcttgaacccgggaggtggaggttgcagtgagccgagattgtggcactgtactccagcctgggtgacagagtgagactccatctcaaaaaaaaaaaaaaaaatgcttatcattgcacagatagctgtacagttttttattatttatgataacggtaactgactttttgttaaagctggtttggaatctggaggttattttaattttgataactttatgattttaacttttaattttaactttatgatgtttgtcataaaagagtggaatgtgctcctattttgagatggaaacatttcggcagggagagagaagagagacaccaaaccacctaacagccaggttccaaggggagattcattcagcgtctttgaagcattgttagttttcatttgaggcataaattggaaacttatatctttctttggagtaggaagtatttcagacagaaaaaaaatgattgctacaacaacatcacgaaaaagaacagaaggtttcatgaagagtaataaagttaa

SEQ ID NO: 96502 - DNA, 18231 bp, Homo sapiens
ctgtaatcccagcattttgggaggttgaggaaggaggatcacttgagtccaggagttcgaaaccagcctgggcaacatagtgagaccctgactcagaaaaaaaaaaaaaaagagaaagagagagaggaaggaaggaagggaagaaggaaggaaagatcatttcagagaatatgaccaataaatgtatgaaaagatgtccaaccttactagaaacaaagtgtctagtttcctggtgctgctgtaacaaatcaccacaaactgggtggcttaaaacaatagaaatttactctctcacagggccgggctcagtggctcaagcctgtaatcccagtactttgggaggccgaggcgggtggatcacctgaggtcaggagatcgagaccactctggctaacacggtgaaaccctgtctctactaaaaatacaaaaaattagctgggcgtggtggcgggcgtctatagtcccagctactcgggaggctgaggcaggagaatggcgtgagcccgggaggtggagggtgcagtgagccgagatcgcaccactgcactccagcctgggcgacagagagactctgtcccaaaaaaaaaaagaaaagaaatttactctcgcagttctggaggcttgaagtctgaaatccaggtgtcagcatggttggttccttgcagaggagatgctgtctgtgcctctctcctggcttctgcggctgctggcaggccttggtatccttggcttgcaggtacctccattgtcacatggcttccattgtcacatgacattcttcctgtaaggacactactcctcaaccttagggcctacactaacccaggatgactacatctgaaaaccacatctggaaaccctagttccaatgcaggtcacattctggggttctgagtggacgtgaattttcggggacactattcaatccagtacactagggaaatgcaaatataaaggacatgggcctggtgaaatggtgcaatggtgcacacctgtaatcccagcactttgggaagccgaggtgggtggatcatctgaggtcaggagttccagatcagcctgtccaacatggtgaaaccccgtctctactaaaaatgcaaaaattagctgggtgtggtggtgcccacctgtaagtccaggtactcgggaggctgaggtgggagaattgcttgaacctgggaggtggaggttgcagtgagccaagatggtaccactgcactccagcctgggaaacagagcgagactccatctctaaataaataaatgacatgaagaagaccacttcacttccatcatactggcaaaaatggaaatgtctgtgtcatgggttgcattctacagaagtaggtggtgttttggggggcaagatgtttattaggaatcatttcctgtgagaggaatcagatggaagcaatgctgggcagaggcagaaatccaactgcactgcaggcccagcaaagctttagtcaatgtggtggaggcctctgagtgaatattgctccgagaatgtccttcatggggctgaaatggctgggcttttttatccctagaagtgcgctgctccagaatggtagccctagggcaaggtggctttctgtcgctgagacagaccttgaaggagctgatggccaactgctgaccacactcctgtgacctggcagcaagtccttccctgaaaaaggatgtaggaagcacacttatgtctgacaatacagagaggttgtctgaatgaagaacgtggaaggctgaaaaatgatccctccaaagataaccatgtcaaatctccagaagctatgagtgtgaccttatttggaaaaagactctttgcacatgtgattatgttaaacgtcttgagatgagagaatcctggattatctgggtggaccctaaatgccatcccaagtgtccttataagagagaggtggagggagtttagccaaacccacagaagtgaaaacaaaggaggcagagattggagtgatgtggccacaagcccaggagtgcctgcagtcaccaggagcttggaagaatcaaggacaggttctccctggagcctccagagggatcacagcactggcaactcgttggtcttgaccagttaaactcatttctgacttctgacttactggataggtcagaagaatccatttctgttgtttcaagccatggagttcatggtaactcatggcagctacaggaaacgaatgcaaacagcaacaggaaaattgctgacggggtgcaaatgggtgtactcggttagagaatccaccttaaggggcagctgtggggatcaagagttcacacctatggaacatttggaagagtgcctggaacacagtccccctaatattggctgctcatacccccactccctgctgagatctccttgaagggaacgcctcgcatgaaaacaaggagaaagccccctccaatggcagccccaccacccacctcagatcagaatgcagcttctgcctgcccctgcctccccactgcacctggtgtagcccaccagagactgatctttggtcttgccccacctgtcacctcgaccaggctggacacccccaggatctccaatctcctggccttccagagaatggggagagctgaggagaatggcagcacctctcttctccgtgttttagggaagaaatgtccctgaagcctagatctacttgctgggcagagatctgtaaaatgggatggatatgccaggctgattagatttgtaatgcaatggggccccatggctgtgtaccccaaaagggcaccaaggtccttgggctcccttaggtgaatttaacttgctttactcaacaagaacacatttcttgagacgtgcacactgcatgtatatagcatgttacacttaaacctagttttagaaaggtgtgcttaaaggtgattttttttttttttagacagagtttcactcttgttgcccaggctggagtgcaatggtgcagtctcgcctcactgcaacctccgcctcccaggttcaagtgattctcctgcctcagcctcccaagtagctgggattacaggcatgcatcaaaatgcctagctaattttgtatttttagtagagatggggtttctccatgttggacagactggtctcaaacttccgacctcaggtgatctgcctgcctcagtctcccaaagtgctgggattacaggtgtgagccactgtgcctggccaaaggtgaaaatttttataaagcaataaagtggcctgtacgtgaggagttatattcgtagctcacagccttatctcaaactttcctcccagccctgctcctcccagaaataaatgccctgaaggccaggggttgtgcctgacttcccaggctggcccctccctggtaatgcgctaggtcctcacacctgcacctgggactggtggcacttgggaagggagagccacaggtaggcctgccacggcacttatgggggctccttctccagtgtggagccaagagaacaggaatctgctcccctgggctcagacatcagagaggctggatctccgaggcatggggaattagtacctccagggcaagcccttccttctatggatggggaacggggaactgactctgagttaccatcccccagaccaaagcccatcccactagccttctggtctcttcccaacacctgagctggaaggagtttttgtcttctgaaccagatatccactctgagtagacgaggcttttatagaaagtgacagatctaggaggctgtgggcacctttctgggacagctgtgtgtactttgcactagaggtaggggaccttacaaaattatatccttcaattcaaatcaccccccagggagatgatagcatgacagcaagccagctgtggctggaaccacaagaaggcaaataaatgggttttcttgcacatttacctgccccagggagagtgggacaaagcaattggctacattaacagtttctttgggtaaaaacaatgtttctgtttctcatttgtgttttcgagcttgcataagtacctactgtatgtctggtctggatcagtgatacataattctgggctctaagagctaaaagtctgtaagtggaaaccaatcatggtatatatatcatgttaaatagaagtatatgagcaggttctatgggaacacagaaggggaaacaagaaaactcctggcggggtgggaggtgtgatcattaattcaggttctgagggatgaaaagaagtttctcttgggtcgcacaggtgatgggggggacattgttacccaagagcacagccagcactcctaatctcacccttctaaggcagcctcatgcctacaaaggcaggcagagaagagcctagtgttcagggagagttggcaggggtgggtgtgcatgagaggaggctgcagaggccccatcctaggagagccaggccaagcgggttctgctgtgggctgtggggaggctttggaggactgtccacccaaggacattttaagggaaggggggctatttcagatggaggagaatacaaacccaagaggccatcagaagctggagcgagtagaagcaggattggaaatgggggacagctttaagagttggtgagctgggatttcaaatgtaacttagagggagagccagggaaaggggggattttatgccttttctctaccccgtgcctcaccctttgcctgacacgcacacctggtccatggaggaaggtagctggtgggtggattgggcacctaagctggtagcactgggcccaggaagtggcagagacactgagtatgtagcagatgttttccactctccagcgatgcccatccgaggggagagagaatgcaagcgcaaataggacaggccacctccgggtggctgcaaaacaacgctccccagacacggagccatctgcaagagcagccctggctgagcgctgcacacagcttggccaatggtgggtttgcaggggcaatgagactgcagatcggtgaggacgaaggcccctgtgcacacacactctacccctgtccccaaccgtgtgcccatcccctgccttcttgcccttccttctcttccagactcactagggacccatctctcctttccttgagaacttgctccaggttttgccaactttataatacccaggaaggccctttcaatagactgctggacatctgggaggagttgaagccagtggcactttgctagtggggacactggcacaggtctctttgagagtctgataaaagtataatctatgcagaaaaagcaatgcccctctgcccacaaacacggaattctgcataagatctcaagggccttgaagcccacctccaagcaaagtgggagagggatgacaatgtttgaggttgtggtgggtctggagagcctggcccgaggagaggctgtgccctttttttttttctccctagggagatttttgaagaggggctcttcaggtcaggaggaagccacagcccccaacccagtccccactttgaggcttgaggcaggggagggacagcctgggaaccggtctgccaaccagtttaaccgggactggtttcgactcagggagttcaaaggaagctggggtgcaccccgtcctacccagcctgccaatggaagcagcagcccttaactctttcctggttgtgccctgggcaacatccaggtggtggtccatgctggagaggggtctgcgcctcctcagaagatgaaatgggtggggtgaccctggctatagctgggaagtgcaaccagacacccaagagtggggaaactgagcgagagcctcctgtgctccctgaccccagatctcccttgggattccctcctcctgcgtggcggtccctggagaaccctggcttctgggtggatgcaggggcgctgggattggatttctggcatgatgaatattcatcagcttgagccggcctctgcttctgtttacttagccgggaggggctgggtttcaggttcaccttgactccaggagctgcagcagagcaggtaacagctcttgcacctgtttctcttgcacctgacgtgyagctgctcctacccacctctcctggctgagccttgcctgatacagcagcccggaggcaccacttgctkcccgagtctcaccctcccaggcagctcctacactcaactgcttctctaggaaaggtctcacctccagcctggagcagtcgggattacaggtacaggcagagggctggtgggtggggaaaccaaggcatagaccccagtcagagcacctggttctgcctccagggctgacaagcccagcaggaaagaggaacccaggcctctaacctggtctccactcaagactcatcccactggcctcttggagtcaatccaggcctccaacagagctcctgctgagtagttttctgttaacccttgctgaactggagcccacccttctgaccccccagtctggagcatttttccagctgtctggtaggaacatctccccattcctatccagggtacccctgtctcatcctgcaggccccctaagtgccattggggccctgcagagggatgggggagggagttctggggttttgtcttacaacatattagctgacttgcttcccctatctgtccccctgcccctccacctctgccccagtcaatggttaacttgacccagctcaggaggggcctggctcagtctgggcaaagcccttcagagcagctcacagaacccagctggtatggaggggcctctcctgggacacccatgtgcatgctatagcgctggccaccaaagacagggggtggcaggctgtcccatgaggcctttcatggccccaaagctgtgcaaacagcagaggtgaagctggcatcctcaggggctgatttccatcatccctggattgcaaggccccagggcaagggcccagcccttagctcggccagctcaggaacctgcacgagctaactgcagggcccaccatgtgtcacyaaatgctgggtctgtttgaagtcccaagcacctgcccccactcccccaacccctttcagccctctgtggtgaggcacaggcaggcggttgtagatatcttgttctttgcaactttgagaaactgggaagtttggatatcacrtcaccttttttgtytgcttgtttttaaagcaaatcagattttacactatcttttatgatgactatttacagatcctacagctgggttattttgtaaaacaaagaatagtcggctaatttttcyattttgcaaactcagatttccataagtcaggcttgctaatggggcaaacacctgcttactggtccccacatgtcctcctgggcagaagagacaggaaggcctggcaaaaagggtattctctttttttkttgttgttgttttttgagaaaagagtctcactgtgtcgcccaggctggaatgcagtggcatgatctcagctcactgcaacctctgcctcctgggttcaagggattctcgtgcctcagcctcccgagtagctgggactacaggcatatgacacaacatccgyctaatttkttgtgtttttgtgtttttagtagagatggggttcccccatgttggtcaggctggtcttgaactcctggcctcaagcaatcctcctgcctcagcctcccaaagtgctgggattatagtttgagccactgcacctggcctctggcagagtattctagagagaccagagtacaaggctaggatgcaagggcaccagagttgatgccttggtggaggccccagggcagggcacaagggctgttcccatctctacagtttgctgagaagttcctcgtsatctgtggctccctttatgccaaggagagttaagccccaggtttgccaacttgaaatacctgttaaaacaggtgaattttaatggcacaggcagaagcccttttctctctggagctagaaaatctggtggttatgatagtctcaggagctggatcytctgtttttccattccccaagttccttggcagccccaaatgggcagtggtggggctgtgggcctcattccagacaaggcagtgactcrggcacccacagaccaagcaagtgccctgttcctccttctctgctctcccccacctccttccagaaacccattctggaacactaagttctgtacaaggctgtgctaagcccaggtggggcaagctgccaaaacaaacctctcaggctgtccctaggtgtgctcacctctccagggtgccctggaagtatttatggagcccctctcactgctccttcactttctgagcgggagctgcacaagatctcccctcagcttctcttgctacttgagcccagctaaagggacagagctggcaatgtgggagctgcttcccagacagagaggtgggaaggaatccaccggctgtgtgctctgagggaggggktggggagcaggagaccagagcacgaggggtatggatgcaggcattcagctcatcgtaaagtctaggcctgcgtcgtgctctcctctttcctaaatttgatatgctcccccacccctaaaataatctatactcatcatggaaattccagaaatcagaaaactagagaagagaaagcatcctctactcctacataaagaaaggcmctattgggctgggcacagtggctcatgcctgtaatcccagcactttgggaggccgaggtgggtggatcacctgaggtcaggagttcgagaccagcctgaccaacatggagaaaccccgtctctactaaaaatacaaaattagccgggcgtggtggcgcatgcctgtaatcccagctcctcgggaggctgaagcaggagaatcgcttgaacctgggaggtggaggttgtggtgagccgagatcatgccattttactccagcctgggcaatagagcaagactctgtctcaaaaaaaaaaaaaagaaaaaaaaaaggcacatcatttggagtgtctttctggtctttttcaaaaatggagtgaacacttccagtttttaaaaggaggtgataccctctagctttctggtgtacactggctgcgccttccttcctgggagctttcacagccggcagctaggcatcctgagaacaagaccaccgacctcaccagtcatcagtgttcctctacctgttctgtcattgatcttccttcatctagcagactgtcatctgcttctatcttacataccccagcaatcaatgatgtccaggcaacctcctctccgagaagttccgctagctcatatagtacctttgtggaaattagtcaaaggtgagcccccagggaaggcagctccatggcaggacacatggcctgtgagtggagaagcctggatttcagccccaagccccaccctgcaaggtacaacctgtgatgaccatgtctcccctgtacttctgggatccttctaactgctttctgcctttttagctccccttccaactcctgtccttgtggaagcttggtggggaaagggaaccatcccttagtaattattcccattatcgtaagttttactttgcaatgcatggttacctctgtgggcagggattaacagtagagctaaatgctagtgctggatgggatgggtgaggaaactgaggcccagagaggtggtggcttgccagtggtcatgaggctaggacagcccccaggacttcccactcccagcctgaggatctgactcctgccttaggaacagcccagcagttactttagccctgctggtcaccactgggaagttcaaattgcttggaatgccactaattatatttaattttgtaatgaattccaagcaaaatgcacagggtgtttccctccctatgctaccagtcaatggtctgcccatgcctggcagcagggtctggtggtatagtgggaagtttgggaagagcatcaaaggcctggatgctgtgtgactcaggcaagctgtccacctgcctgtggccctgaggggcctggcaggaattatctcaaagctcctgacaaccctgcagggcaatggtgtgtgcctgtcccactgcctctctgtctggcgagtggcttccctgtcttgaccttgactttgacccttttcttgtctcacactctccaaaagcattgtgtcaccccactgacctgaatcttgggtttattcagccctaccttaaattctttctttaattcttcttcttcttcttctttcttttttttttttttttgagatagtctcactctgtcacccaggccggagtgcagtggcatgatctcagctcactgcaacctctgcctcccgggttcaagtggttttcctgcctcagccacccgagtagctgggattacaggtgcgtgccactaygcccagctaatttttgtatttttagtagagccgggatttcaccatgttggccaggcctgtcttgaactcctggccttaggtgatccacctgccttggcctcccaaagtgccgggattataggcatgaagaaccacgcccagccctttatttaattcttaaaacagcccatgattaggagtctgcagcaagctggtccaaaggcacccacccccttttcccactgacccctttgtctccccccaccctgctccagcagaaagccccatccttggcttagggagcgccatgacgactgaaattggttggtggaagctgactttcctccggaaaaagaaatccactcccaaagtgctgtatgagatccctgacacctatgcccaaacagagggagatgcagaacccccgaggcctgacgctggaggccccaacagcgactttaacacccgcctggagaagattgtggacaagagcacaaagggcaagcacgtcaaggtctccaactcaggacgcttcaaggagaagaagaaagtgagagccacgctggcagagaaccctaacctctttgatgatcacgaggaaggacggtcatcaaagtgaagggctgaggagggtgctagcacctcttggctccctgccatcagccagatctgagacaggaccttgccacgctggcctctttggccatagctgaagctgtggggccagttgatacctgctggcaggaaatggctgttttttaggtttgtatttatgtgccgccacttttgtaaggcctgggagatcccagggtcctccaccctccccctgaccacatacaaaggcactctagttcaagrgtgaaaartctcacccaggaggaacagccctccttgaagcaatggcagggccagcagggaggtgggcatggcagggaatggagagagtgagccagacagacttcacctccttactggacacagggtcaagggcgagtttcaattgctgctccctttactttctctacctgtgactactccctggaccaatcctgaggagggcacattttccagaagccacgtgataggggctggtttctgtggagccagaggcagagacactgaacttgagctcacctcctaacaccggcagtaaacttcctggaactttgccctcaggtgcggaggggacagaggaccctggcactctgttagggtgctgtagaagactagattgatggtagtttggcctgttagttcctgttttggccatgacttttgcagatggcaagtcacacaccctcaaagggaagctacacgggccaaatcgggggagtgggtggggaattttctcctctccctttcctactataatagtatttaagacatatcagctccagagatgagtcctggagccttgaattttgtttaacaaaataattgtaggtttctctctgtaataacaacgctggaaaggcmgagaacctcttttatgctcatgtcttgcatttattgagatgactgtttctcatgcctttatgttccttcatgtaagtaaagtggacctttgtgctcaaactgttcctttcaagcttcaggaagggttcccaggtgtgacaatgtaggaactgggtcactaatttttaccatcaaactagccttagtatggggatggggcagcagaaggagctagttacacctcagtggtcagttctctccagtcaacagagagcccgtcaggtgctctaagagagtagggcagacctttggtgattgaccccaaagtttcagtggtttggtttgggattaagattcaaactcrggctctaccccttagtagctgggtgaccttgggaacatttgcttgtactctgagcctcagtttcctcttctgtaaaagggggctgaaataatacctatctcatagggagtggtcagtattaagtggcctatgagaggtcccatagtaagtgctcagtttaatactggtttccttcccccttcctttataaggaactccaccataccccacagctttggtttaagaaaaaggagaaggtgggtatggtggctcaggcctgtaatcctagcactttgggggctgaggtgggaggactgcttgagcccaggagtttgagaccagcctaggcaacatagagagaccccatgtctaaaaaaaaaccaaccaacaaacaaaaagtagctgactgtggtggcacatgcctgtagtcctatctacttgggaggctgaggtgggagggttgcttgagtccaggagttcaagacgacagtgagccatgattgtggcactgcactaccacctgggtgacagaactaggtcttatctctaggggaaaaaaaaaattaataaataagagatgcttggcacggtggctcatgcctgtaatcccagcactttgggaggctgaggcaggcagatcacctgaggttgggagttcaagaccagcctggccaacatggagaaaccccgtctctactaaaaatacaaaattagccaagtgtggtggcacatacctgtaatcccagctacttggaaggctgaggcaggagaattgcttgaacccaggaggccgaggttgcggtgagccgagatagctctattgcactccagcctgggcaacaagagcaaaactccgtctcaaaaataaataaataaataaataagaaagaggagagaaagctgtcactttatgaggttaggtccagctctttctcaagccataagagctgggaactaaaaaaatgttggccaaatctctggagctcgtggtagaaatacagggagagaccaaggtggccactaaacaatgtggtcctgcggcttccaggtcagctcctggcaggctgctgggccaccccaccccaggagctgttgctcagggaatttattagtgaaacaaacagacctatacaagggaggctttgttaggtgcctcgtcccggccagggggacctcaaatgatgagtaagggagaccaggagctggagggatggaagtcaggctcaggggtgctgccttacccaaagcctctttcccctaccccgtcccactacacagaactttctagggtctcaccaattactcaatccatgaggcctccacagaggatctcagactttccctacaccgcagccctgcccagtgttaatagctaacatttatagggtgcttaaggcaggcagcccctagaacaagtcctccctaaggttgttcatttaatcctatcatcacctgagacaggtgctgtcattatccccatttttcagacaagttggctgaggcttagaggttaaatcactcaccctgggggccaggcgctggcagtggtacagctgggactgaagccagagccagcttgtacatgtgaccactgtcccacacagccaccttccactcttgattctcatctgctacagggacaggaaactgaagctcagaacaaagaaaagcacagacaccttctgcagaaggggaagttgggaggggagggagcaacgtctgggtcttaggatcctgggaggtgagcatcactcgagggggctggacaaactctggaagcagatggataaagccaaccagctttgaagctgagtgtcccctaagaccctagactacaggtatctcccacatccgcccattctcggtttccctgaggtgggggataaggatggcccctgggccaccaacctaaggttctagataatactggcactgtactgccaactcctccagtatcaccattacccctctgggtgagagtatccacagcccctctgccccttgcatactgaccccggctccatcttctaggtaaagtccacatatgtttctaagctgggtggccagatggatgtggggtaggtactagaagccaaagggagatctggatgcccagggaagcagagcgaggcagctgcaagttttcatgagaacaggggaagaggaggaaccgagagcgcaaatatgtgcggcaaccgggagaggctacgggttatcgaccacagtttcactgggacgcggcccaagccgatgaagggggaggccggctagaagttgctttcactgcccggaaggggccgaccttgggcggcgggctccccctactggacgtactgcctacaaggtgcagagaagtgaggggacaggaaagttgcttaaattccccaagtcccctccttgggggttgagggagaccaggccgggttgaacatcaataaagtgcacggctgataggcttttattacagactgggggcggtaacggctggacagagaacggaaaaggaacatctgagaccaggctcaaagctagggggttacacaacctccaataacacaaggtgagtgcagcacttctagacacacacacagacacacatcacttactcataaacggcacagcctacggtacaagaaaaagggcaaggtaggtaagggcacccaacaccctcctgcctgcagggggccacagggttaatgtgccttcctgcacgcaggcttaagagggataaacaaggagagggctgcccttggagaaggcctgcggataatagtgactgaggcacaggtccatgcaggggaaggaagcacagttcacagagtggcaagctcagtgccagccagtgcaagcaacaggcagttctttgatcctggcttagtcacagcaaacatttacccagcctggctcttctccatagccagcaggttgcttgctcatccagtctgtccctggtcagcgggcatgtgctcaaggagaacaaacacagttcagcacaggactcagctgagggtcactaaaggatcatagactgtgagggtgggaggtcttggtttagaggttgagtctagtgcagctgatcacctggggtctagtgaaaatgcagggtcagattcagtgggtctggggtctgaatctctaaggcgctgccaagtgatgctgatgctcctggcttgtggaccaccctgtgtatagcaaagctctagactaggaggtctcaaccttggctgcacagaattatctggggagtttttaaatttcccagtgcccaggctgcattcatatcatagtagagacagggttttgccatgctggccaggctggttcaatcatctctgagggtgggacccaggcatcagggttttttaagctccccaggtaattccagtgtgggggaaaaaccaatgaactaggaattatcagcagaggtggggagtaagaaaagcagatacgtgagtagtctgaaaaacataatctctataatcatttaatttttctttttggaaaatgtatgtatacatacacacagtttccataaaaaaacatagatagtaaagctgattaaaatcttcctgtcctattggtaccagcacatgaagcccttctacaaaattcctgacggactgggaataaaaattcctagtgacagcccactccttctcaggcaggtgtgattgtttgaaatctctcccaatattgagatgaaacctgcttccctgtaacttccctgtaattctgtgggtcccttgtagccacagagaaggcagcaatcagtaggggaagtgctataaaaatatactatcccggccaagcgtggtggctcatgtctgtaatcccagcactttgggaggccaaggcgggcagatcactttaggtcaggagttggagaccagcctggccaacataatgaaaccccgtctcgctgggtgtggtggctcatgcctgtaatcccagcactttgggaggctgaggtgggtggatcacaaggtcaagagatggagacaatcctggccaacatggtgaaaccccatctctactaaaaatacaaaaattagttgggcgtggtggcgtgtgcctgtagtcccagctacttgggaggctgaggcaggagaattgcttgaacctgggaggcagaggtttcagtgagccaagatcacaccactgcactccagcctgggtgacagagtgagactccatctcaaaaaaaaaaaagaaaagaaaaaagaaaaaaagaaaaaaaaaagtcctatccgtaaatgagttagttaagttgtaatcaacagaaatagattctagctagattaagtaaaaaaaaaaaaaagagagagagagactttacagagatagtggggtgttttaaggcagggggaggaactgcacagcccagacctgggagggagggatccagggaaggagagatcctgggaattgcaatagcagcaggcagaggcttttggttcctattgtttcctggctgctatgaatgacttggctttaatgactcccaaggttctggatctctccagttcaaatttcaaattattgacaaaacaatctgattggccaggttggctcaggtgcatatgctaggactaagctttggccagtatgactcacatggtaacagacagggctgctggggccctgtctgtcaccagaaagggagtcacaccggctgctacccctagagggagctatcctaatcaatcataggcaaggtcaaaaaaataattatggaattattttccatttgtgattctctacgccaccattacactccacttgaccagctaactgagaaccaactgagtacagagaacttagaggattagctctgaagagtcctgaagataaggggtagggagggaaatgggttgagtttagaaagaagggcctgggtcccaatcccacaccctctcttgacacctagccctagctccactctgggccagcaggtcccagagttaaggtgcaagtctctcatagagccagtcttcctccccgcggtgggtcatgggccccaaaggggaatctcctgtgggtaggccccgccgaaagactatccggtcatgcaggcggttggtttgaccttgccagaactccatcacctgagggtacaggacatagccacccctataaggagaagcagaggtttcagtgctctgtggagttttctagccaggtcactctcccaccctcacccctcatcccagggcctcttgaaggaagttgctgggatgcatctgacaagggtggccagggaggaggagatctgtgattccccaggcaggtggcttcaagtaaacacaggggcctggtgtccctttctagaggactaccagatgtcactcaccaggattttggcttgggcacctcttgatcctggtagagctgttccagttcctcatttttctttctcagatactgtccagggggaagagttagaagaagggccaggcccagtcaatgattcattaacaaggacttcctggggatatgtgctggggacatgggtgagcagagcagactggcctctgtcctccaggagcagtcaacaggatggccagatggacagaggaggcctatttcccctctccctacccccactttcccttctcactgtccttttcactgttttcactgggctggagagagaggacatctcctggggacatctcctggcatctcctggggacagcttctggggataagccaaagcctccaccacctggaggactacagcggagctccactcacctcccgatcagggatcacagaactctggtggctgaccacagccccaatctggctgctcttggggcgggagtggaagtagcactcagcctcctcctcaggcagtttcttcacagggccttccacacgcacctgctcagggatggctctgggtgaatggcattaaatgccacctgccctccctaccagcacaggccccgttcctctctgttcgatcggctgccccaccactcttggctccaactaactgagggctattttagaggcagagtgcccagctgggatgtttgcccagtctggggaccttcgctagacgtagccataaactcaggccctgccaacccagcccatc

SEQ ID NO: 96503 - DNA, 44687 bp, Homo sapiens
tatatcatggggttaaatgtgatttttctggttaattcagctccaaaagcttaagaacagtataataggcgtcaagttgaccaatgccttcaacgcaaggtactagaccacacaggcaacgcgtgctaaaagactataaaattggttttgccagcattagtgcatcacattcactccctgctccaacatgctcacgaagcatatggggaagaggaagggaaagtgtttcaccccaccaccaccaatgccctgtccgcagcacaagtgaggaggacgttaagggaaccatttagagagctttacaggtagcccctggagtccgaatgatgcagaaactgatacttcattccactgaagacacagaggtgtgactaggtagacattcggacagcagaaaagagagatgctctgttggcttgatgtgcactttcagagtctagtggggacaaaggatgagtgagtttcccagaagcccattgtggaccctgtttcatcttaaaagggactgaatctggagaaggaaaggcccagaacctgtaggtgagagatccccagtgatgtggagattctgatgtacccataaaagcaccccagcagagaatcaacatttggaatcagccacaccatgaaaacagcgatgctagattataactaatgtttgtgccggcaaatgttgaacaactggctgtctgaaaaaactgcatgtataaatatatgtgtgtgtgtgtatgtatatatacataggtttattataaattttattgaaaggtgtatagcaaatattttacaaataataatatgcaatactctttattgtaaattccatatagccagctgattctacagaatcctttcattgatttttgcttgtattacccaaactatgacagcaattgatgagtgtagtttgaatgttgattgacttttctatttacattaactagtaagatggaagtgaaacaaaggaacaataggttgcaatttcacttgtttgtctgatattagtgagttctttgctaaattgaatagcagctctctgaaaaaagaatttcttcagtttttttgtgctattcacagtgtactacaatctaccacaacagacatgacactcttttaatttcattattaacattctctccatcagtttttttaaatgagtctccatctattttgtgtttctttaacttttaagttcaggggtacatgtacaggatgtgaaggtttgttacataggtaaacatgtgtcatggggggtttgttgtactgattatttcatcacccaggtattaagcccagtatccattaattacttttcctgatcctctccctcctcctacctccaccctcagacaggcccagtgtgtgatgtttccctctgtgtgtccatgctgttctcatcatttagctcccacttataagtgagaacatacggtatttggttttctgttcctgtgttagtttgctaaggataatggcctccagctccatccatgtcagtgtaaagggcataatttgattcctttttatggctgcatagtattccatggtgtatatgtaccacattgtctttatccagtctatcattgatgggcatttgggttgatcccatgtccttgctattgtccaccacctttttaactctaaaaaatcaacaataaaataaatcaaactctggtttgtataatctgccattttccatggtgtaaatactcctattacggccaatttcaagatcaacatgacgtcgctgaatgaggcagtaggaagaaatgtatagtagcccaccattatatttttacctgtagatacaatagatgtaaataacctcaagagtagagataatagcaaaagagttaggaaataagaagttttgaatatttattacctttgtcttaatataacttatttgattatgtttatacaatttagtgtttaacaatagctgtgttaacaatcagctcacacaaatcctaaaattttaacaatcagctctcacagattcacagttgtaccacaccactgattcatagatataggaagacagcctgcagtatggcaagaatgacaccacggccatgatgactgatgttggattcctgcatactaaggtgttctgcagcaaggtccttaaacaatgcccatagcatagataacccttcaaaagaaacaaagcttgtaacttagataattctctcattaagattcttatctagactccccagtgttcatgagttttgcaagaaagtctgagacatgatcagctgtacatcttttatcctaaaagcttacataatttctggagggcaggtgtggggatgcactgtaacagaatcatcatttctgtgtgtaagtccctattaaatacctctttctgagaaactggatttgtcagtttttctttggcctctcagctctctcagcctttgggggtaggtttgcatatatatgctcatacaggaacaacagtgaggctctttcctctccttactccttacccaccctccaatcttaaagcccctgaaaacatcagctcttagttaggagaagagctggagcaaaaaagcaacaagaaatcaatttgcgttgcctgtagttaggtgaggctttaattggatgcgtgtctggagttttgataataggtagtaccagactttttattacctgagaatgatcagataagctaaattaataagaatttagaggagaaaaatacattcacaggaaaagcgttgagaaataaaaatgtttgctttaatttcttccctataaagtccagcttgttcagtaaatcagttatatgaactaacaaaacaaagaagaggtttcgagtgcaagatgaatccaggctgtacttacagcgaattggcaaaaaccaagataaaaatgagaagatatccaagatgtttcagaaatttcaggcttgaagattcagagtagattgcatgagagatagacatttgggagttaaaagcataataggcttgttaaggttatgatcatagataaaatcctttagacagagaaacatagtctattcaacagggcacaggcaggcaacttaaccattaatcctactaagaggcacgcactatgctaggaagtttaaatatgttgcctcacacatgcatcaaaacaactctacaaagtagatcttatacccgtcttgccaatgaggaaactagggttcagatgaggtaaataactcactgaatggtcacacaacaaagaaatgctggtgccacatttgaacctaggtcatctgactcaaaagctattaatcaccaactatgaaatgtcattattcattcccaatttttgcagttgaaaattaacctcaatactcctattctaggcatttctgatatcaacttgaagaagaatggaagactagattttgatggtagtttgaaagttggggatggccttcaagagattaggtgggtatgggaatcagatgtaacaacattatggagagaaatagaagaagatagctttatctccttcagtttttccacatgaatcttgaactccccaaccacttttctttctttcttcccttttaccatctcctgtatttcccatgctcattcctgctgctaagcctttggttcttgggatatttcccacatgacttgccacgtcttcttctgaacctatccaaatgctatgggcctttgagattcaatataaattccacttcttctctgaacctttctttgccaagtcctgcttttcttttccacccataaacatacaccataatatttagcaatacactggtatttctttgactcctcagaaacagtcaccaggtcactcctaagcttgctgaccagagctaaaggggagctgaagttctgtcttttctgcttctctgctgcttcctggcattgggcctcccttatttctaggtgcccagttttctttgcagttgccctttctcctaacctgtacctattgctgccctccctgtggataacatgtttcaagttacctacatcttacttttaacccactttacatccagtatatgtatctaatttaatcaacattaaggtgagatgcactgaaagttctttaacccttagacatttctaaaagttggatattcatgccagtgtggcaggcagctaggtcttatccctacatcacctttgacaaaaaagccagccttcacaaggggaagaaaaaaggagagtgtggagtcattacccctttacatttgaggagcctcctactactttgcttcccctcccatagacgatgatctccttccgtttcccctgggagcttaaattccactccattcttccttccgacttccataaagaggaaacccctgtcacaatatacaagaggatcctgaccctggacaatgaatctaaaaatctttagaaggacttcaggggagtttcatgctccaccaacttcctatttcgttgagcacatttttgttgaatacatactccctactaaacattggagatacaaagggagacaaaaataatccctgagattatgtaagcagtttatggtggtggtggggtcaggcagtaagaatttacaataaagtgggataagtctaaatttagaggatgacaaagtgctataagaacacacggagaggacacctagctgtcttgaggatgttagataaagtatcttaaaggggaagcaatggcttgatgaaaccaaaggttgatgagttagccagggaaaagtagttgggaaaaagatatgtgcaaatgctcagaaagaaaatggcatatcctgggatctggaagtgtagtgtggcctgaatggaacacagtgtgagtgagataatgtgaaaataagctgaagcaagatgagatctaaatgggcttaaggaatgtatttcctcctcctagaaatgaatgctttgtttggttgctatactagtaacaggaattagacacgtttattaaaccgcttaccatttaacttggtaaatcaaagaacaatgatttttacaggtatcagtaaatgcctgtaattagatacgtggtaggctttcctgttaatatataatggttattctcagtgtttaaagaattaaagggactcgggtaattaccagttttagagtgaaccatttgagagataataccttaccattacaaaacaactcctagggaaagttatatgagacagcaaaggtaatagtaaatagtaaaataatatgaatagtgaataatatagtaaaaacagttaaaaatgatttagcaatttcttaaaaacaattgaccacgaaaaaaattcacagtaaaaccgagactgggaatatttcattcaaccctcacacatgctgctattgactggaaatttaagaaatgttcatttgttttgacaaaatggaaagcaactgtacattcttcctggaaactttagctgaggtcaaagttgtaaatgaaaaggatgattttttagagaacaattcagtagtattgttttgccttgtcatgaagaatttttgtgcttccacaaacaaaaatcttggattgttaggtgaacggtggcaatcaagtggttttcagaagactcaagtttcttcatctacaaaaatgacaggagtggggtcaggatgttcccgaaggctccttctactcataagagcataagatctgtgcctctaatttctcgcagaaacaaataatgagaacttcacaccaattcatttattatatgaatgttttgtcccgtgagaacactggtctatctttagatatgtaatttatcaaacttctttgggcaacccatcttctttacttttttatttttaattttttggttttctctttgtcaaattttcatggaataactacattcaggtgtagtaatagtaacgcaaagctctgaacaccacgagacaattcgttgcttccgaaacgcagccggcagcaggtactcgagatgagtagtgtgagctcccgagcacccgtaggtcggattatctggtaaggcaccggaagtgaccgcctcgcggctgcttcctctcctggagtccagagtcccgytgctccgccgcgatattcagtaaaccactgggagtccggcagcatggaggcagcgcgccctcccccgacggcagggaagttcgtggtggtcggcggcggcatcgcgggcgtcacttgtgcggagcaggtagggcggtgctcaggcggttccgcctctttccccgacmccaaaggggatagcactggaggccttcctcccaccccctccctttttcttcttccgggttccttttttgctgcgcccttttccgcacttattgctcccagattttagaaactgcttggtggtcctcagatgacctcactagctttctcttaggcgcagggaggagtgggaggcaaattatagccgagaaaccaaagctggctgatccgtgctcagatccttgtaatgtcagagcagacatgaggactttgtatttagacaaaaaattcagccccctttctttttctttttttttctttttctttgagacggagtctcactctgtcgcccagactggagggcagtggtgcgatcttggcttaatgcaagctttgcctcccgggttcaagcgattcttctgttgcgtcagcctgtagctgggattacaggcgccagccaccacgccccgctaatgtttgtatttttagtagagacgggctttcaccatgttggccaggctggtctcgaactcctgggctcaagcagtctgcccgcttccgcctaccgaagtgctggcattacaggcctgagccacagcacccggccctcagccccctttgttaattatcgtaggtgattgagtttagtttccagatagttgccaagtctttagtgcatcttaactaattaataaagaatcccatatgtaagttttctatacttcgaactcccaagatagaagaaactttatttctagtaaagttttgtaaaataatcagcgaaggattaaatgcatgtagggcttgctttcttgattatactgaatagccagaccatatatattcagatacatgtgtgtattccaaaaagttctacattattttgttgatataaagtaaacatgagcaatcactgaagtcataagaaatagtggaagaaactcaagtgtttccatcgttggatgcgtattttccgtttattcactaagtaaacatatatgatgcaggcaccgtattaasggctgagtgttcaactatgaacagcatggtatataccatgctrgggactcacagcctgctgraagagacaatattacaatattgtatgtctatgcaagagatatcaacggttatcttagaggtgcctgtggagtakgtagggagtgaattagggaagaggaaatttttttaatcaaagaaggtatttttaaaatctcattatgaaagaatgagtgaaagtttaccaagtattcaagaaaagaatgtcatctccagtggaaaagcatggatcatcagggagcagtaaagcttaaagcatagatcataagkagtcttagcatgctgagaacttaacaagaatttacaagtagtcaaatgtttttgagcagtggagtaacttgatcatatgaaaaggcttgaaagatgattagttacaatgtatttgtggcagaggcagctggtttatacgtgaaactggagagccaattcgaaggtgatttcagtagtataaagaagttttgaggacctcatctagcaatggaaacagcagagatataaattacagaatatacagaggaaagaaagatggagaragtaatgatattgtcaaatatagaaagttcaaataaaatgagactgagwagaatcgcatgggtgttgggcacgatagctcacacttgtaatcttagaactttgggaggccaaggtgggaggattgcatgagtccaggagtttgaagccagactgggcaacatggcaagatcccatctccattaaaaaawaaataaataatcccttggattttaaggattcatagatccctcaaacatgctgttttagtgatggagtaggaatagaagccagattattgagggtggtggtgtcgaggaaccagactttgagataagaaaatgctttcaggtacagagtgaagaagaccgaggttgtagctaaaggaaaataatgaaacattaacaagttatacctctaaattttgtggaagcaattattaaaatggctttatcgtcccacaatatgtactgactggaagaggcagaataggagtgccagagcacctggggaaagttagaccaatattctaagtgtttaatattgagggtttgctttaatttcatcccattgaagacaaatgaaatattattttaagataaatagaagttggtttaactggtaattaggaagatagtttattctcatcctctgcattataactctaaattggtataaaaaatagttgaagtaaataaaggayatttctttatatcacttttcttgttcaggagttctttgttagtgtttactgtaaatattattttctcagtatcagagtttaatattattcaccattgccccatcaagaccaaggataatggagacctttagatgaggaacagtgggtttttaattttctagattaattacattattaaaattgcattattctcaaccccaaaccatatataccagtacttaaagtaatttgtcctaattttttttctctctttttaaaaataagttggctactcactttccatcggaagatattctcttggtaacagcttctcctgttattaaagcagttacaaatttcaagcaggtaagaacctttgtataacttcttaatattaatttgaaaaaattgcaataacttgcatagcagttagggtaattgtgtatttttttctttcttaaaaattgacaagtacagttatatgctgtacaacatgatgttttgatacatgtatacattgtggaatggctaagtcaagctatttaaaatctttccaatttggatgccttttatttctttctgtccctaatttaattgctctagctaggactttagtactgtgttgaatagaagttgtgagagtgggcatccttgtgttgttcttgatcttggaaaagctttcagcttttctccattcartatattattagctataggcttgtatatgaccatttttttgttgtggtacattccttccatacctaattgttgggtttttattatgaaaagacrtttaattttgttgaatattttttctatatctgtagagatggtcatgatttttgtcctttgttctgttaatgtggtatatcacatttaccgatttgcatattttaagccatctttgcatccctgaataaatcccacttgattatggtgaattgattgcttttttttgagatggagtctcaccctgttgcccagactggagtgcagtggcacgatcttggytcactgcaagctccgcctcctgggttcacgccattctcctgcctcagcctcccaagtagctaggactacaggcgcccgyaaccatgcccagctaattttttgtattttttagtagagacggggtttcaccatattggccaggctggtctggaactcctgacctcgtgatccatccacctcggcctcccaaattgctgggattacaggtgtgagccaccgcgcccagcctggaaagttttctgttgttatttctttaaatacatgttctactcctttgtctttcttgtctccttctataacgcctataattcaaagatttgctcatttgatgccatcctttaattccctacttctatgttctttttcattcttttttcttcttcttcccttctgactgtatattttcaaataatctgtcttcagattcacagatgttttcttctgtgtgatcagttctcttgttgacatagtctgttgcatttttttttgtttcattcattgcatctttcatcgtcagaatttctgctttagtttttaaataactttttaaattttttgttttggttgcttattgtttttctgatttaattgaattgtttgtaacttcttgaagttccttcagcttctttaaacaattattttgaattcttaggcagttctgacatttgtgttcttttggtggcatatcttcttggtttatcatgtttcttactgccttatgttgatgtttgcacatttgatgacacacttgctgttttcagaagtatgggctagttttgctgtggaaagaccttcccctatggggakggctgcttgctagatgggwtgtagcagttctggcaccagtgagggtgcccactttgtagtctgtgcagctccgtcagctgagttaattgttgttgaagattgcagggatcctcagcatccaactctggatgtctgcagtggtagtgarggttgttggggttttcaatgtcaatggctgctaatagcctcccaatcttttcttctcccacaaaggaagttgtggcttagrggatccctgttggcactgagtctgccttctgggttcagtggcagcagcgctggtgtctgataagtggtgcctatggagcagatagagctgaggcccaaaacacaggcatacacggaggaattaaagttctgggatctgggactgtaatgatattggtgcctagggtgcaggtacccgtactgctatattggtaatagaatatgaggtgaggatgcttgtgaggcagccagggaaaccaagaatgggaacacatgtgtgctcagagttacagcagcttcagtgtcagggcagggcctagctttcaatggcagctgagccagtgcctrgattgcagacatgtgcagtgaggmttggttgcaggccccaaagtgcaaactagcttactatggtgatggctctggtgtctgagatgtaggtgggcccagtaygggccgtagaacctgggtctgaggtgtaggcattctcagagtgaccatggccctggggttggaacactcacagggttgaggacaaagtgactcctttgccaaagcatcttgacattggccacttctttgtggagacaagayatgccgccatgtctcccactctagggttccctggcaggaatggttgttggtcccctcacagtagcaagggatgccagtttcctctgcagtrcaggccaccatttaccacagtggtccccaccatgtggctgatactgatagcctctgcctttctttgctcctagctatctcctagtttctcaggtatgccagggtcattattgattcttttatgtggttattctccattttcatgctccactgtgttgctgcagattgtttaatgggccgttgagccctctttgggctattttggcttgtgaagatttgtctatatttgttttttttaatgggggaatgaaggctggtatctcctacttagccatcttgatgacaatacctccakgtattctggagtgttttaattgtttaaaattacaaatattcttttgagagttattttaaaaaagctcgagttgagaattattcagatagaataccaraagctcccagaatgatactaaatttttaatcttctattctttttctccattttccttccacttagaattacttttgagaaagtttccaataaaaaattttcaggaaagatgctctgcaaatctaaaatgggtacaaatatacatgatatttattatcaatatgggtaggggtgtgtgtgtgtgtttacacatcagaaaagtgcttccaagccaagtttatacttatagataattagtgtctcagaatactttgtattccattaatttatattcacattatagtaggagtctaagaacagttgggtaatagtatcatagaaaagtcwtctccaaactttttttttcctgtagctcaactgttaaaaagttttgccctgacatcccaatatatgtatactaataagttatgtgtatgagctacagaactacaattataaatgttataaagcctatgcaaaataaaatttctaaaatgtcgaaaaacgtacattctgatctttcttcccacccttcagtgaagactactaccatagcccttcatttaatacgatgtctctggtaatatcctgataatggaatataattttctcatgttgtaaacccataagaccaagggtagtttagtggcatataccatgttgtccctttataacctaaatagagatacatatgatagcttagtacttaggtatagccaaagagttatggagtttgggagaaatagaggaaaaattatagctattaatctttaaaaggtaaaagtacatatttaatgacaagctaagactgtatacataagagaaggatgtatagctgggtctcataagtatctttccagaagacctaattcagtataataatccaagagttgtgagacttgaattcagtttttgccggttttgtaagttatatacaacagaaggaaaaagcttggtttctaggcctcttatttactggtcgggtagccttggaagatctctgtaagctgcttcacctgtagtattaggttaatactttccttgcttacttcacagggttgtgaacttaaatgtgccaataacaaatatacaaatatcagctattctgtgtacagcagtaggaaatggcattatctttatgatttattgagtrcctatattatatattaaccaatgtgctaggcacataagataaggagattaaaagtatagaacataacaccaaaaagtcactagtgcttatcctgagggattaaggatgagatatgaagagtgatagagactttaacatttactctgtattatgtattgtttgtttagtgttacaaagagcatgattcatgacttgtataatttttaaaggagaaaaaagattactgctaataattcacatttattaagtgcttaccatgcatcaagtrgccttctaaaggtttcagatctattctatgatccttaaataaccctagaagtaggttcttacataatttgtaagactgtaaaggggtcaygagaccaaaatttgagaactgtcagggccatgcagtaagatttccatgcagtttttaaggagcagctgaggttgaatatcaatstgtaaggctgtgtggtctttctgcagcaaactgggcttaggactagagcaagcagatagtttatagggttgagggttttcaggttaacagtttaggataagagagcaaggaagtaaaggatttagggaaaaggtgaaatgattcacaattgaactttagctggacagaaaggaaagtgagtctagaatactgatggttttatagaacaggaaagaagagtgcaaagactagatgaccataaggtctgctagtaaatagagaaagcttgaaggataaggaaataaataagctgtttggctaaactgtagaaatgtaagtggtgttacccctcattttacaggtcagctctcattttattagccaggaaactatggcttgtagcacctgacttgcccaggagcggccaagcaaatatttaagtctctaaatgctgagtctagtcctctttccactctatatagtgcagttggctaacttgtttgttttataaacacaaaatagtgtrtaaaagcaaagtatttttattatttaagattcttgaaagaaaatactttaaaaatatacatttttaatytcttggatctatacagatttctaaaatattggaagaattygatgttgaagaacaatcaagtaccatgttaggaaaacgctttcccaacattaaggttatagaatctggcgtaaagcaactgaagagtgaagaacacgtaagataattgttttcttaataacattttccattgttgaatcttgatgaagttttgcctgcctcttttcactccagctctactaccaccaccatttaagtttttaacatgtaaagtttagtgacattgatttccagtattattagaaaaaatacagtttttgtaagtttattggaattatataattagatttgggattttagtcttcacatttcaaattacattaatgtttataaagtgtccactgtgttctggatactgcattaggtgctgggatgcagtagggttaatacgaggtgtyggctcctaggaactgtcagtgtcaaagggaatatgaacatgcatactataattatattgacatataaaaaacacagtcactgaaatactatcaaagctctgatatcagggcttaaggaagactttacagagagagtaaaatgaggggggtattaacagatgagtgaaattaagagttccccargtggaaagaggcattccaggaaggggagattgaatgttcaaagacccaaagaaaggaaaagaaatatgaagaatagagatgtcaaagggattagggtgtggttaagtaaaggagattggcartcaaggctagaagataagtaagtgagaacctgaagggtttttaatgtcacactataagaagttgagtttgggccggtgcgttggctcacgcctgtaatcccagcactttgggaggctgaggcaggcggatcatgaggtcaggagattgagaccatcctggctaacatggtgaaaccctgtctctactaaaaatacaaaaaattagccgggtgtggtggcgtgcacctgttagtcccagctactcgggagactgaggcaggagaatggcgtgaacccgggaggcggagcttgcagkgagcccagatcgcaccactgcactccagcctgggcgacagagcgagactccttctcaaaaaaaagagagargttgagtttgttttatatttgggagaaattgtaaggtgattttaagagctggggcatcaatgataaaatagatttttttttttttttaaggaagatacatctgataggagtgttgagcatgaacaagtggctagtagccaaccaaactagaaggtggttatgatagtcaaaaattatgtgaagagtcaggaaattatgtacaggctcatgcctataatccccagcactttgtgaggccaaggcagacggatggctttagcctagaagttcgactctagcctgggcaacatagcaaaaccccatatctacaaaaaatatacaaaaagttaatcaggcatggtggcgtgcacttgtagtcccagctactttggtgactgaggtgggaagatcacctgagcctgggagttcaaggctgcagttagctgtgattgcgccactgcactccagcctgggcaacagagtgagaccctgtctcaaaaaggataataataatttttaaaaaattgatttgaaaaatgatgtaaggtctgaactgagacagggacaatgtagttgtaaaaaatatcccagatttgagtgagatttctgctataaatttggcaggactcaataaccctttacatgagaatgaagaaggcagtctcaggaaaggatgttgttagatgatttacagtatcctcagatgagcttcaggtaagatgagaagtagatttgtagttgtttctataagcagttctaatttatgagttctagctcataaattagagatgtgttttatctcctttagggataaaacacatatataccacatttgaaacacaagtaatttgagagaaaaaagtactgaattttatcaggaaaaaataaaaaatctgaatccccaaaccagataagtttctaatacttatagtggtattacatattccaagtaatatatttgtcaatttatttgtaaattgaggtgggctctcaaaatatgctaaatggattgtcagggaatttatgtgttagggcatttgaatgaatcagagtscttcccgttaccatttgaaaaatatcccacatgcagygcatgtctgccttctcttatccattgtcctttacatttttgtttttttaacagtttattataatttcttttatttaacaatctaggaagttggcagccatcagcagttctagtgctatttcaggtgcagttgggaattcgggaactcagtggagctgttagtgtagcgaactttgtatgtaaaatacatgcatactgccaggcgcggtggctcacacctgtaatcccagcactttgggaggccttggcgggtggatcacgaggtcaggaggtcgagaccgtcctggctaacacggtgaaatcccgtctctactaaaaatacaaaaaaaaattagccaggcgtgggggcgggcgcctgtagtcccagctacttgggaggctgaggcaggagaatgacatgaacccgggagattgcagtgagctgagatcacgccgctgcactccagcctgggcgacagagcgagactccatctaaaaaaaaaaaaaacacatgcgtacttttgatagcacatgtgaaggtatctctctaaaattgacctcattggtttcattctcagcaaactgagctgggccactcaacatggcttttatcatgtctgatgttaatgcatgttctctttttacagtaaattcatggccatcagatgatatcaatttcacatacctggcatcagggccttcacagccaccataggttttctcttccccatccattttgttcttatgaaatgctactgtgcttccccaggaacttcagtagtttcctagtgaggcgaggacgcagagtgtgtggctcacttccgtctggagaagtgtcctttacattttttagtgaattagagatagtatgttttactttcacgtctcttgccaaaaatttagcagtagctaatggaaagagtttttgtgtttgtttgtgctatttgtttttacagcagctaaatgcaaattatttttaaagttttgtcagtgcctataattaacttttgttcttgtcagttgaaattctaaccagattatttaaaagaagacttgtataaaatttctayatggattatgcyatgctggattactggttttatgtatttgttatggaactgaagaattaatttgagttataaatgtctcattggatgttaagtgctatgatacagtttaacaaggtttgtaagtcaaacacttggcacaracattaacccctaaatcattcgaacaaagttgagcatctctcatagtagcatgcatttatgtttaaatgttttctaaaggctactatttatatgtggtttttcattcagtattaaagaacaaaagcaatakatctctgatatgtagttttagacccatttatgttattaattaatataaatttaaagccaatacatgctaggattaaagattatcatattttttacttatactaaaatataccccaaaagcatttggtttgctcgtaaagtcattatttgtacttaagaatataagtactwttttttttaagcacttctagtctttttagattaagaagacataccataacctcttgttccactcactgcttttctgtactcataatagatatgaaggtaggatatggttagaattactaggtcttcttacagtaacttcccttgagatcagaaatcttcatcaaggcctgtcacaggtataatgagaatgcttaaatttaaaaatttcttgaagttttgtttttaacgtggggtcaacataccttttcaaccaacatgggattccctgaagtttaatacaaaactttgtgtgaatgtacctttttatgccaggggagaaagactagttttcaggagatctcaaaatggttcatgagcttaaaatgatttaagaataactggattagtacatgtattctcatgcttagttttgtaattgctataacaaagaactgagtgccaccaagaggcaaccttaatatattatgttttgcttttgccttattgaatttttagtttaaagtgaagttgtatccatgttgattatgtgtctcccttttctttcattgtttgatgtatttacagtgcattgtaacagaagatggcaatcagcacgtatataagaaactctgtctgtgtgctggagctaaaccaaagttgatatgtgaaggaaatccttatgtattaggaatccgtgatacagacagtgctcaggtaacattttaaggttggatcgtgagaaggaaaataaaagaattttctacatttgaattaaagtgttccacttacaattcctaaactgtaagggcagaagggaaatttttgtttcatgaccagtaaaccacagagtggttatgttttattcctgccaattttctttctttttttttttttttttgaaacggagtctcgctctgttgcccaggctggagtgcagtggcgcagtctcggctcactgcaagctccgcctcccagtttcacgccattctcctgcctcagcctcccgagaagctgggactacaggtgcctgccaccacgcctggctgattttttttttttttttgtatttttagtagagacagggtttcaccatgttagccaggatggtctcgatctcctgacctcgtgaccgcccacctaggcctcccagagtgctgggattacaggcgtgagccaccgtgcccagcctattcctgccaattttatatttttagttgacactatgtttttaagttcatgctgatgtgttatcagcgtgagataacccagatataatgactgtgctgaatattaacaacttatattacacacacattcattactctacttggggaatatgtgatttgcaacctaaataatataacaattttttccaaaaaggtgaagcgtattcaaaatgtactgatcttattctccagcaaaaaaaattcraaagatctttgtggtacaaaatcatgatagaatcatagaacagaaaaggtcacttggcttattgttctgccctagataaactatcccaataaggtgaaacatctgtttttggagcattatacaaattccttttggtaatttaatktaattcagggcttattaacccttattgccaagaagctcttcctggtttcacaatactatgtctaacctcaagttcgttgttctgtctcatgacatgatgattttgcattaatataatttatattctgaaaatttaataatgttttctttcagcctattctcttaataattaggaattgagagaaaattaaaggaacttgattatcttcttataaacaatttaagttcatattatcagagattgagctcataactgttttagctcggtcctctacatacatgaactcattgaatcctcatgataatcctgtgtgacgattattactcccaatttacaaataggaaactgaggtcaagagattaagtatgtatctatactaatttagctgttaagtctatcagatacacaatttaaacttgtgcttttcacctctaggtccagtgctcttgcagatgtttcttaaattgcaatatcctcaatgaaggacaaactgaaataaacttcagttgtttttttcttggagaattttaaagatgtcagcttcagtgaatattataagtttggagataaatttaatataaatttagtaggagggccagatgtcattctgaagcagtgrgactattctatacttctgaaagtgcccaaagaattaccactggcttctctctcttttttttttttaatatatmtatatttattatactttmagttctagggtacatgtgcaccaagtgcaggtttgttacatatgtatacatgtgccatgttggtgtgctgcaccctttaactgtcatttacatttaccactggcttctctaagctcattgtgatcttttttttctggggggtggaggcatcaatgtatctgtcttagaatgttaataacatttttttttttagtagaagtttgacattattgggtgcgtgctactcctaccagctttgtctgtgtcatctcacataatccttacagaaacattaggatatatagtcccttatttccatttatagttgaaggacctgagatgcagatagggtaagcaacttgcccaaagtcattcagttagtaattgctagagccagtgcttccagagtctgtgctcttaaccactatgctgctgagcttctcattcctagaagttttaagtgttgagtaactctagggaaactgagagtctaggtgaaaagaaagaataattgatttggtcaaataattgggaatgtggtaagttaatagtgcctcctgccgaaattctgaagtactgtaaatgtaatgacctaaaaggaaaggaaaatcaggagaggcattgctataaaggcagcttgggataaagcataaagggggacttttgttatattaattgagaggatgtaccctgatacagtgggaaagtgagattcatttttttcctttacaaattcaataaaatatttacatttttagaatattatcgaagcctcatatttcagattattgcccactattacaaaatactacctcattattttctttttaacataggaatttcagaaacagcttactaaagctaaaagaataatgatcatagggaacggtggtattgcacttgagttagtgtaagtatatatttttaaatatgataacatttaaattgtttaaaaataatttgtttttaaattaaacamttgctttgtgattcttgtgatttgttggcagactggaaaatgttttttattctgaaaatcaaagataaatataattttcatatgttttcaaggggaaaaatccaccatatttttttagctcttgtggaatccgtaattgtagaaattttattataaaatatatatgttttgggaatgctttaggtctcaaggtgattggccaaatttggcccataaatgtgttttataagtatattttatgtttaaaaataattcaaatatttacaccttttgagatttctagtgatagccctcaccactttttattgcttatatgataaatcctgctacactcatttatgttacctgtctggccagtgtcacccaaaatgtttgtgactcctgttttaggatatgtggttcttgcagctctttttttggtagcttgggaaatgtgaacacattaattaattttcatcttaagacgatattacaagttcaaaaaccattgagaaatatcctgctgtgtcctgcagaagattgattcacttcatgattttatcctctagcagatgattgacatgaaatagtctggatctttttcaggccataaagttgagtcaaaccacaaagaggacaaatttgaatcaaaataaggactctgccaaagccatatctttgctcacttgcattcaatccaactctcagactaggtttttgcccctcttttagcggatgatctcacccagtggaagcctgtaagagttcttaaattgcctgagtactatgggtaacagtcattattgttattatgaagtttgtggcattatatggagaaatacagagaaagggtcaaaaccaaaatgtgggccaagagggaagaggtatagatttattgtaaatggggcttcaaatccttgtgtataatatatacatgccagattttctctatcagctctcaccaaagtatcacttactattattataattgttatttacatttaaaaattttatgttcaaaaatgttcagagtcttacatttaatcctattcatcattttctttaagttggagattgaagactgtataattggataaaactcatagttttgtatttagtaagctcttctttggtaattaaaaatggacccacataatgttattctctgacttgaggtctgctgcgtgattaggtctttgtctctcgtgaaacttggcatacccataccctttctacactgtgtttcagtgaaactaatactaatgttcttcattatacatttatttcagttattatctgttttctcctttctaagtgtaagttaatcctttccttttcaaacagatactgtttttcataacttcacaaaaccgyaatatctcattgtctgcttctgtagagtcattttcaaaatgaaagcagtatttcccctctgtgtgatgataatcgtcaaactgtgcatcttgctgagaacatagttcaagtcaggaaaagaggattagaaggtgtcctaggaggtagagcaagtactgaagtttcttgtggttacttgtaataactttgtctgctagtcagtcatcagtatgctgaagtgcactgataggtgttatagtgtaatattactttaaatttwaaaatggtaatatagagaaattcccagtttttcaaaaagaaagcattacatgataactgtatgcctgtatgtaaattgaaatacaaactttattaccaaatttgtgtgtattccactttccgctggtcagtaatgctatatgaccagagtaacataaaatagaatgttcacccaataatcttctatgtttactgacatagaagagctggaaaaacgaagacttattagrtaaagcaaggagttccttatcaccatatgttgaaaagtatgaatatcaagtgacctggattcagatgtactaaaccttttttcgtaatctgtttattgattagtcttgaaaagtcgtgtaacctatgttatatcagtctgtgaaataaagatgacaatactttgtaccgtaaagaaatgtgaaaaattaataccttaactttttacagtattttattagtatcgcaagtttagataaaatcctattatagttaggatggccatatatcttgtttgtctgggattgtctccatttccaccagttgtaccaaaaatgattattagtagcagatagtatcccaggttaggtgataaattatgtgatcaccttaattataatggacttcagggactttgtgaaaggaatattgttaggaaaaccacttcttagcatctaaacctagaataaaatatcacatgcccattaccttacattagtggtaaatagtaatagaaggtggcttatatataccatktycattctttccttcctctaagatccttgatccttgatcttgatccttaagatttttagcttataactctgattctttccattttctatccctttccgtaatgtgctttgaagatataaaaagttgttaccaaataagtgactgattctcaatattatagctatgtrccatccatccattacttgattacactataaccagattttttaaaaagcactgcttacccctgggggccattcatataataagtgtattgtagaaattgaacattttctaaygatgtacaytgtaatgaaattttacttgatattcagtacatgtatttgtcacttaaaggttctttctgtaaactgcttcagattcttttactattcaatttttaattcttaayatctgtaaagaacgttaatattcctctttataatcaatctttcccagttagccttaaaaatgtattccctacttttgcttcaggagatcattatttgcaaatgcaaakattttttacttagacttttgaaatcactcttrgtaactttaacattgtttttaggtatgaaattgaaggctgtgaagtgatttgggccattaaagataaagctatagggaatactttcttcgatgcaggagcagctgaattcttgacttcaaagctcattgctgaaaaatcagaggctaaaattgcacataaaagaaccagatatacaactgaaggtaagtgtagcacctagctcattaattctcatacaaaacttttttaaaaccatatagaaaagggctacaagaaaatttaataaaataaattttggaaatagtaatatggatatttatatatctttacatgaagttttcagattttctattttatatatatgtatgyattttatatatatatatataattaaaacaagaaatttaaaataaattgaataactcagcccatctgcatctttgcaaacagatactacattttggcaatacctgaagaagttttgtaaaaaatgcartgagttgaaaaactaatacaaacttcatatttttttaagtttgatagctttgaaaaacttttagaytataaaattaaacaagagttttgtacattttggaggtgctaaaaatagataaaattataaaaatttgaaggctaattttcttacccttccagttaaccgtgtaacatccaaaacgtaagttgagtgtgtttatactcaacacacaaytgaaagattatctgttttgtaactctacatcagaaaaatattaatgactaaaatgattaatatagataacataggttagtcatgctgtaatgtatgtatatatatgaatcattacattgcctaaataaaaaacttcagaacactaacatatttctctayctggtaatttttatattatttaatttcatctctttaggaaggaaaaaggaagctagaagcaaatctaaagcagataatgtaggaagtgcattgggaccagattggcatgaaggcttgaatcttaaaggaacaaaagaggtatcttttcatatactaattggtcatgtctaaatgtaattttaaattcttgaaccatttattaaagactggtaataaatatatagtcaacgaactgytaggtcactttacttaaaatccatagtgttaggaaaagacctccaatgcagttggtccatttggccaccaaagaaaactgaatgtcaaagcatckaagactggatctcagcctacgttttaactcttgaggtgtgatactgtaatatatatamagtcataycttggagtattgcaggttcagtcccagaccatcamaggaaatgatataccacaataaagtgagccacacgaatttttcagtttcccagtgcctrcaaaagttatgtttataacatactgcagtctattaaatgtgcattagcattgtgtctaaaaatacaatgcacataacgttaatttaaagatactttattgcttaatatgctaacaatcatctgagccttcagcaaatcataatctttttttggtggaaagttttgcctcrgtattggtggctgatgactcatcagggtggtgcttgctgaaggtttgggtggctgtggcaatttcttaaaataacaagtttgccccatcaattgactcttcctctcgtgaaagacttctctgtagcgtgcgaagctgttttatagcattttgcccagagtagaagttctttcaaaagtcarttctctcaaactctgctactgctttacchagtatatgtaatattttaaatccttcatcatttcagcaatactcacagcatcctcaccagaagtaaactccatctcagataactacgttctttgctcatccatgagaaacaacaactcatcttttcaaattttatcatgagattrcagcaatgtagtctcatcttcaggattcatttctaattacagttcttttgttatttccaccatatctgcctttctccattgaaatcttgaatccctcaaagtcatccatgaaggttggartaaacttctttcaagcttttgttaatgttgatattttgacttactcccttgaatcatgaatgttcttaataatctagaatggtgaattctttccrgaaggttttcaatgtacttttcccagatccatcagatgcatcactatctgtggcagctatagccttatgaaatgcatttctttaataagacttgaaagtaagaattactcctggatccaygggctgcagaatggatattgtattagcaggcatgaaaacaacattcatctccttgtgcatctctgtctgagttcttgggtgaccaaatgccttgtcaatgagtgtagtattttgaaakgaatcttttttttttttttctgagcagtaggtctcaatggtgggcttcaawtattcagtaaactatgtaaacagatgtgctgtgtattactccattctcacagtatataaagaaatacctgagagtaggtaatatttataaagaaaagaggtttaattggctcatggtcccacgggctgtacaggaagcatgactggggaggcctcaggaaactttcaatcacgggggaaggggaattatgcacttcttacatggccagagcaagaggaagagagagaagggggctggtgccacacacctttaaacaaccagatctcatgagaactctaacatgaaaacagcactaaggatggtgctaaactattagaaactgtccccatgatccagtcacctcccaccaggccgtacctccaacattggggattacaatttgatatgagatttgggtggagaaccaggcccaaaccatataatgctgtcatccaggctttgttgttccatttacagaggacaggcagggtagatgtagtatagttcttaagggccctagaactttcacagtggtaaataggcattggcttcaacttcaagtcaccagttacattatcccctaacaggagagtctgcctgtcctttgaagccaggcattgacttctcctctatagttgtgaaggtcctagatagcatctttttccactggaaggctgtttcatgtacactgaaaatctactgtttagtgtagccacattcatcagttatcaattgtatatttttgttgtagagatggcttctttacttaaacatcatgaaccaacctctactagcttcagccttttcttctgcagcttcctcacttctctcagcctttacagaattgaaaacagttaggggcttaytctgggttaggctttggcctaagggaatgttgtggctgatttgatcttctctccacaccactaaaactttctccatgtcagcaagaagactgtttcgctttctcatcattcatgtgttcattggaataccactttagatttacttcaagaatgtttcctttgcattcacaatttggccatctgttcagggcaagaggcctggctttccatgtrccttcctcaataaccctaataatcattgctaccttttgatttaaagtgagagatgtgtgatccttactttcacttgaacacttagaggccactacagagtaactgattgccctggtttcaatattcttgtgtctccgggaataaggaggcccaaggaragggagagacataggacaacagctggttgatggagcagtcagaacacagaacatttatcgattaagttcactgtgttagatgggtgtggttcatgacaccccaagacaattacagtagtacatcaaagattactaatcacagatcaccataaaagatctaataatgatgaaaactgaaatattgcaagaattaccaaaatgtgacagagacacaaagtgagcacatgctattggaaaaatggcactgataagacttgcttgatgtgggtttgtcacaaaccttcaatttgtaaaaaacacactatctgcaaaacagtagtgaagcacaataaaatgttgtgtctgcagttytctggcacacaactcctaaaatttttggcatctccaaagtgatgtgtccttttgtatgctaacgagttgactggttagcccctaggtggcttcagaatggggactggtcacaggaaagaccaagacatgattagagtttagactttccaacctacaggaagggaaagaggttgaaggttaagccaatcactagcagccagtratttaatcagtcacctacataacacagtttccatgaaaacccaaaaggactgggtttggagagcttctggatagctgaacatgtggaagttgctagagggtggtctatctggagagggcatagaagcttcatgccccttcttatatgctttgcyttatgtatttcttcatctgtttcttygtgacatccttgataataaaccagtaaatgtaagtaaagtgtttccccaaattctgtgagatattctaataaattaattgaacctaagaaaggggctygtgggagccccttgatttatggttggttagtcagaccaactggtaaaacacccggggcatgcaattggtattggaagtggaagacagtcttgtgagattgatccctcaacatgtgggacctgatgctatctccaggtagataataacatcagaactgaattgaattagaggacagccagatggtgtcctgtgcagaattaattgcttgcttagtgtgtagaaaacaccccacacacatttggtcrcagaagtattctgtgttgtgagactatagtaggagaaactgagtttgttttttcctatatcctcagatcagggatagagctttctatacccagactacagtgaatactcctgtcctattttaaattaatcttttctcaaaggtcacttcagatgcatgcagtaaacttacaaaagttattagatggattggaaatacacacttaataycctaattggataaggagatgatttgcttttcctcattttgttagatattttgattttttaatagttgttaaagggctgtgaaatctaaatgctgtaagaagcatgcatgcagtccttcgttactttgtgtgatttctttagagcattggtttttggctttcagtaggtaggaggggagctggctgcacggtgtatctaatttttgtgatggaaattacacaaagtcccttcttcttgcaccttcagatcctaatattatatttttaacctgagaacttcaacagtttaattcaataagcatttattgagtatttactacctacgtgggactttattaatgttcagggatacgacagtaagtcagaactgacctgaagaaaattttatagtccataactgttgtcattttttaaatttttatttatttatttatttatttattttatttatttattttttttgagacagagtctcgctctgtcacccaagctggagtgctgtggtatgatcttggctcgctgcaacctctgcctcccgggttcaagcgagtctcctgcctcagcctcccgagtagctgggactacaggcgcacaccaccaggcctggctaattttttaattttagtagagacagggtttcaccatataggccaggctagtcttgaactcctgacctcaggtgatccacctgcgcctcggcctcccagagtgctgggattacaggcgtgagccactgtgcccaacaactactgtaatttttaaaaawtgcatttgtaattatcaatgaggcctaggctaaaaagcattccctcgatgctatctgctaatgcagctaccagatctcttaagttactgaatgaatttttgttcactcctttcatgtgcatagagagacttattttagggcacccaatgtggtttcatttatattataagaattatgttttctatacgtttctacaagtatacgttttttcttcatcattagtaacccgggttattctttctgcaagtattatgctaaccagtattttcttaattttagttttctcataagattcaccttgaaactatgtgtgaagtaaagaaaatctaccttcaggatgagtttagaattttgaagaaaaagtccttcacttttccaagagaccataagtcagttacagctgatacaggcaagtaatgaaataagaaaaaatatatataaccacttaattaaaaggaaaactttaatcctgctgtgttctattaaaaataacttcgtatttccatataaaatttaaacatgaaaagtaaaaataaaaccataatttaataacattaactcacttcatttcactrtctgttgttttctagtaaattaaatcgtatagggcattacatcttacatagagctgagtgttttgaccaacaatcagaatatattataaatcaaaataagacaaaaacctagagctcttaaaggtgacatgatttcacccaaatcagattgaaaatgtatatttttgggactaagatgcagctctcctaactccagttccacaactcctctgagaattgccatgatttgaagaaatacactcagttaactagcatatgaaatattctactgttctgaattctttgaatttttccataggaaaggggaatttgaatatgagtagtgagggaagacacctagttgaactaaacacttaagtggagtgtaaagtattacaaaagatttttagagaaataatttagaaataatttaaatgtactttgtcaaaatttatgtgtccaaatttgaaggaaaaacatttaaaatgccatggttttaaaattatacccaaacgagatgatgctaattgcattaaaattgctttagcaaatatgcctcataataattgctaaggagtgtgttacaaagttatctcttgcctttctttttctttctttgtttctagtcattgtagtcacatacactgctgtggtgatggttccatttrcaaataaagtctgtttttttggtttttttttcttaaagagatgtggcctgtctatgtggaattgaccaatgaaaagatatatggctgcgatttcattgtcagtgctacaggagttacaccaaatgtagaaccttttctccatggtaacagtgtaaggtgaaatttttttgtccagctgtgaatatatttgaagtatttttgtgaagatctctaattctcaaacatgaataattattattttagtgtacaactgtaacttaacatggttggaaacagtttggttaaaacattgtcttgatttacrgtattttttactgcttaaaatccttacatagttatatcctkgcataagcrtcatcagtaatggtttataatgtacaatttatttatctaaatgttggtaagagactgacacctcccgtgacttctcaaaaatgattcttttagagaaaccatcttgtattttttgcttttcagcacttgaagcttacaaaaaaaaaaaagaatattcttgtagttatggataaggtagtcacatggttattggatacttttcatgttgaaattctgacagttttatggatcagtcttagttggaatttgatccatggaaattcagctcaggtgtctaaactttgctgatatttttcattttctcattaaagatgagcatgcaaagtgtaacaatttaatttgttcttttactttaaaatggaaaaagtcgtttcatttttcttaacacttaacgcttatgaggaaygttgtttagtttgatctaggagaagatggtggcctgaaagtggatgatcatatgcacacatcccttcctgatatctatgctgccggtgacatctgtactacatcctggcagctgagcccagtctggcagcaggtaagctagcatatataattatatgttttcatcagagattctgtctgaaaataaagcggttgttaccaacaaatccaacttctggttttccaacttttctgcttaagtaggaagctagcacagagttgttatatatatttwaaaaaaaaactagaatatttccctgtttggtaagttatcattataatggtagactgagacatcttttactttaaaagaaattatgggctattactttgtttttcattcttacctgcttatcagcactgtccaggagaactttctgtgatgatggaaatgtttaattcctcaccatctagtcaggtagccagcagtatgtcacatgagcacttgaaatgtggttaatgtgactgaggaactgaattatttttacttacttctcattaactttaaatatatgtggctacgatgttggacagcacaactttagattaaaaaaactactaagattgtaaattatatagaaaagcattctattcctttatgatcctattctgtccctgtggtaatcattactaaaaaatgttctgggcgcagtggctcacgcctgtaatcccagcactttgggagggtgagaggcaggtgtatcatctgaagttaggagtttgagaccagcctgaacaacatgatgaaaccccgtctttactaaaaatacaaaaaattagctgagcatgatggtgtgcgtctgtaatcccagctattcaggaggctgaggcacaagaatcccttgaacctgggaggcggaggttgcagtgagctgagatcgcaccactgcaccccagcctgggcaacaagagcaaaactctgtctcaaaaaaaaaaaaaaaaattcctgtagtaaacacctttcctgagccttaacaagtcccaactggatctagactttttcctaccctcacagctttacctacctcctcctaacggtggaacaaaaatactagaggaagataaagacagtgaccagaggtgtgcagaggggtagagacctaggtagatgtttgaaataaaggaaccaggcaacatttayctttgttaaagaccagctccacagttagggacattattcattcagattatgcagtgtgaagtaggagaagagctaaaagtatttcaagaggcagcaccatcattttgtgttcttacagacagtagagacatcagtaagaatggttccagcctttttgtttctaacctgcctcattctatgtcatttctgtggcaagactatcacaaattcttagagttggagtttatgggtttttttttttttaacatttttaattctctagggtaaattatatcttaatgtgttataatctgaaagaggggraaaaatccgaaaataaacagatggccttgttttgagtgcaccttataggccccatttcttggcttacacaagcaataaggatactaatttatgcagttcaagatgcaaattttccggccacttgtattagctgttctctagttgttactgtgctcagtttattctgacccccagccataaactgcctttcacttcatcaaatctataataccttgtttacagaggagattgaaaaaaaaaaatctatcacttctgctagaaatgcttaaaactcatgtctatgattatgatattatttctgcaaacaaaagacagcattaagtacatatgcacatacagggaggtagaaggaaaccaagtgcttattatacgctaacctgtttaattctctcaatagttacagagtaggtagtgttatgtttacgtttcaggtaaatgaaccgaggcccagaaaagttaaatatatatgtagatctgttgatattaaaatccactgtgactcccaaggtcagtgtttttttttttattattattatatttaagttttaggatacatgtacacaacgtgcargtttgttacatatgtatacatgtgtcatgttggtgtgctgcacccccaccccacaagagtccccggtgtgtgatgttccccttcctgtgtccatgtgttctcattgttcagttcccacctatgagtgagaacatgtggtgtttggttttttgtccttgcaatagtttgctgagaataatggtttccagcttcatccatgtccctacaaaggacatgaactcatcattttttatggctgcatagtattccatggtgtatatgtgccacattttcttaatccagtctatcattgttggacatttgggttggttccaagtctttgctattgtgaatagtgccgctataaacatacgtgtgcatgtgtctttatagcagcatgatttataatcctttgggtatatacgcagtactgggatggctgagtcaaatggtatttctagttctagatccctgaggaatcgccacaccaacttccacaatggttgaactagtttacagtcccaccaacagtgtaaaagtgttcctatttctccacatcctctccagcacatgttgtttcctgactttttaatgattgccattctaactggtgtgagatggtatctcactgtggttttgatttgcatttctctgatggccagtgatgatgagcattttttcatttgtcttttggctgcataaatatcttcttttgagaagtgtctgttcatatccttcgccgactttttgatggggttgktttttttttgtaaatttgtttgagttcattgtagattctggatattagccatttgtcagaygagtaggttgcaaaaattttctcccattctgtaggttgcctgttcactctgatggtggtttcttttactgtgcagaagctctttagtgtaattagatcccatttgttaattttgacttttgttgccattgcttttggtgttttagacatgaagtccttgcccatgcctatgtcctgaatggtattgcctaggttttcttctagggtttttatggttttaggtctaacatgtaagtctttaatccatcttgaattaatttttgtataaggtgtaaggaagggatcccgtttcagctttctacatatggctagccagttttcccagcaccatttattaaatagggaatcccttccccatttcttctttttgtcaggtttgtgaaagatcagatagttgtagatatgaggcattatttctgagggttctgttctgctcgattggtctatatctctgttttggtaccagtaccatgctgttttggttactgtagccttgtagtacagtttgaagtcaggtagcgtgatgcctccagctttgttcttttggcttaggattgacttggcgatgcgggctcttttttggttccatatgaactttaaagtagttttttccaattctgtgaagaaagtcattggtagcttgatggggatggcattgaatctataaattaccttgggcagtatggccattttcacgatattgattcttcctacccatgagcatggaatgttcttccatttgtttgtatcctattttatttcattgagcagtggtttgtagttctccttgaagaggtccttcacatcccttgtaagttggattcctaggtattttattctctttgaagcaattgtgaatgggaattcactcatgatttggctctgtttgtctgttattggtgtataagaatgcttgtgatttttgcacattgattttgtatcctgagactttgctgaagttgcttatcagcttaagattttgggctgagctgatggggttttctagatatacaatcatgtcatctgcaaacagggacaatttgacttcctcttttcctaattgaatgccctttattcccttctcctgcctgattgccctggccagaacttccaacactmtgttgaataggagtggtgagagagggcatccctgtcttatgccagttttcaaagggaatgcttccagtttttgttcattcagtatgatattggctgtgggtttgtcatagatcttattattttgagatacgtcccatcaataccttattgagagtttttagcatgaagggttgttgaattttgtcaaaggccgtgttcttttataccagggagtctcaaaacttcatagaaataaaataaaaatacaatagatgaattaatacggtcatgcaaaacaatttaaatgacttcccagaatcagttgctgagatatttatgttgtcttggtgaggcaccaagagtctgtctaaccactgaggttaacagcacagcagaccttaagtagtgcataaaaatgaaggttgctggaaaatagaacaaattcttcagtgataatttgacatctctgttaatggtgatgacaaatttttgaagaagggactggttaattaaaacatttttctcacctggtatagcttaatatagtttcataatatttaatagaaatgctactaaaacaggtgtgattggtatcatcttttaattttagaggcagtaatttagatagaattaacaaataccaaaaatcagtctgattagttatccattggtgactgcttctgtggcaaagatgacagaaagactgtcaaacattgaactcctttaagtgaatttacaaggttaacatttttcagataatgatcatgaaaaatgacattgtgtaacattttttcatcatttcagatgaggctgtggacccaggctagacagatgggatggtatgcagcaaagtgcatggctgcagcgagttcaggagactctattgacatggatttcagctttgaactgtttgctcatgtgacaaaattttttaactataaggtaagatagttaagcatattaatgccttctctgcttgttagtcttatgactatgataaatcatgtgattttcttgcttgaataaaaacgtacatagttttaatcatctacaaaaaaatgacatttttcatttcttacaaaccaatacctggtattattgctagtcttaatccctaatcatctgataattatccaccttaccactattctattttagttaagagggaaaaaaatttctctctagatctgttacttgttggtgcatttttaacttttacttgtgattcatcctttctttgtgaggggaactaactgctgttgtactcaaaaataaaccaagagctttcctgtatctattatcttattcagtcctcttcacattgacaaaggttgttttgggttttttttttttccctaatttacagagaaggagaaacatattcaaaagcctcagggaaattaagaaacttttccatgaaagctctaattcagttccttgccaaatctttaaaccacgactccacatggtttaatgtatccacatcctacatatttatatatttactgtatagttttaatgttcatatagattggtagaatcacctacctatattcactagatatttttagtgttaaaatattaaacattaacatttgactatattcaccagaattttttaatgtcagtgtagagtgtgtgatagtgtcatctgtagaattaacgcatgctgttgaaacattttctttgggactctccccaataacatttttagttatgaaattttgtggcataagttttctgcggctattcaaacttgacacaaaataactacccattacattttctttatgatactcatgacaataacctttttatctctaaatataggttgtactgctgggaaaatacaatgcacagggcttaggttcagatcatgaattaatgctgagatgtaccaaaggacgagaatacatcaaagtcgtcatgcaaaatggacgaatgatgggagctgtcttaattggtgaaaccgatttagaagaaacatttgaaaacctaatcttaaaccaaatgaatctttcatcatatggagaagatctgctagatccaaatattgatatagaagattattttgactaaaaatggaatttcttcaggaatcatataaagttccaaatgacaccagaaaaatcacaagtcaataaaatgaatgactgtattgagttaatgatgaccacactgaaaattacagaagtgataatgatattagtggaaaaatataaaaacataaattctaagtttgaaatcagttcaaagtttatttatagatatatctttccaatacaacactgaccacttggataaaaatcttaagttatttatttctgtgttttaaacataaatatgtttacttgtgatttagctttggagcaaatttaggtaagttatctatttagccaaatgtactctagtagattagaaccattctttgtgaaatgtcaaaatatggctgtggtttcaggaactttaaaatcggttgtattttactttaaatagagatgtagcaatatctcgtttgctaatatttatattgatgacttactccttttttgttgaattgtacttctggttttataacctgaaatcatctacaagcttgtccaactctagcccacgggtcgaatgcagcccaggacagctttgaatgcagcccaacacaaatttgtaaactttcttaaaacttgagatttttcttgcaatttttttttaagcttatcagctatcgtcagtgttagcatgttttatgtgcggcccaagacaattcttcttccaatgtggctcagggaagccaaaagattggacatccctgatctacatatttaacttaaagtatcactcagtgagcctctgtcagtgtaatattgctttcaaaaagatagttatgtcaaaagaaaaaatatagctaagtatataaaggcataaaaaacttaagacaattatatggacttattctcaaatattttacattttttgtaaactttcttaaaacatgagatttttcttgcaattttttttttaagctcatcagctgtcatcagtgttagcatattttatgtgaggcccaagacaattcttcttccaatgtggctcagggaagccaaaagattggacatccctgatctacatatttaacttaaagtatcactcattgagcctctgtcagtataatattgctttcaaaaagatagttatgtcaaaagaaaaaatatagctaagtatataaaggcataaaaaacttaagacaattatatgaacttattctcaaatattttacaattaaagggttttacataaaaatttttcccttgttttatactggaaaattatataatcgtgatctctaattttcaaacattctcaaaagtttagatcttcagagataagctctgaaaatatagatccatacatataaaatatctatgaaattcttttaaaaactattgtctaactacaaaaatagtggcatatacatgcataaaccatctttaattagaaaatttagtaacattcatgtcaggcatcatcgatttttcttttcttagctcctgtattcttagaaccagattgctgaagcatgtttgcagccttcttctggaagttgcctgaatttttttcctccatctttttatcaccttgttcagaatgacaagtttgagacgattcagcctacaaaaaaaaaaaataacaaagcaagcaccttggtaaaaatccagctattcagttttctcatgagattaaatatttcaaaatattctttctgtatcagttggctttttaagtatacaggggtctagttttttatctacaaatttctattcaaatatgagctctattttgaataaaaggggctacattgtgagagaagttctaaagacctcaaatgtccttagacacaatggcacttgacttgacatgcttttgcagacttgatagtatttggtttaaaacagtggtttctaaccactggaacagcagaaacagacttctcaactattagtaatcacaaccaaataagagcagagtgcataacaaaattagatattcaaacggagtcctcccattccaagaaactggaaacccctagtttatgttaaaaggccagtctaaattctttcacttacatctttacagaaaactatattttctctcttccatacccagaaatctaatcagaaaactgacttttctcatgttcaactggacctaggggaatatgacagaaaagcatcccataggctttaatatactttttaaaatatataaaactgaaaattaatagccatttaccctgaaagagttctgcgtggactttgtcacttgcatagtaatagcatgtgcctcattgttcagaagattagctttaggtcctattttcaaatacgaaatggtagcataagctgtaaaactgtagtcttctctgcagaaaataaaggccaacaataagaaagcttttgaaggaatcacggaaaacaaatttataaaagaaataactatatgcgcagtaattcttaacacattgacttgaaataataaaatttacaagaatgcaaataaagcctttaaagaaaatattttcgttacttttttttatttatagtgattaaagtttgagtgttttaggtaaattactttctatagcatttaaaagttcacacaaaataactgcaaaaccgtttattctgttgcaatttttaaaaaaaaccataaagacaacctgaaagaataatgaatgagtttgtacatacttaagatactgctgtattagaaagtgtgcaataatcttctccagatcttcacgaggaagtgtgggagccacaacacctgctactctcagttttgctgcaccctttcccatccaagaatcaatcagtttcaatggagtgagtttttcattcagttcctctgcctgcttcaggatcttgattagatctctgcagtactctgttatgttctttctttcaaatgctgtaataaaacaaatatggtagcaggtaattaggatttagaaatgagggcaaagataggctatcttaagtagttaaactggtttaaagctggttatcaatgtgagccaccctaaacattgatttttaaatgtattctgaattaagactaggctattcctcaagtctctgtcactagaccaagttatggtctctgtaagcattgtggggtttacagtgatatatataaaaaaaaattggttatcagaagccctgccatatactctagaaatcagaaagtgtctgccagacatgattactaagttactaagaggtgtgttttataggagaccctgtctgttctagtataggctcctgagtgaactctgatttagcaacaagaatgtcctcaactgataacccaattattaagagaccagtactctgatttatatataacactcttgttattttataagatagtctaataaactcataaatttctctgtctgcaaagttaaaaatacagtggcttccacctaacaaggcatcagaactcagtaaggtcttaccatgaggtactggctagtccagatcttgaaatacaacacacggatgaaaaaaagttaaaatatagtgccaaaatgctgcaggcaaatccgaaaattgggactcagcccaggagggttcccagtttcatgcaagaaacaatctgagagcaagccaacagagtaaagtgaaagcaaagcaagtttattagcaatagagtataggaaaatggcggctccatagacagagcagggctaccccaaaggcagagtggcactgtacattgctcactagcggtatttatagctgctccttagttatatgctaaataaggggaagattattcatgaatcttctagaaaaggttagggagttcctagaaccatgtaattttcgggcattgtcacggcatttgtaaactgtcatggtgctagtgggagtgtcttacatcatgcaaatacattatattttctagttctaacttgtttgggccagtttctttgctatatcttgttttgaccagatcctgttttgatcagcagggttgtgaccaatgctcagaaaacaaatcctgctgatctacatttaaaagaattttaagtaaatctccgatgactagccattaactggatcaaaagtgattctctatagtctctattttgcactaaattttcttttcaattagtgactataaagtattagagattatcacatggtttcccttttcttatagaatagcatttctattcagaaaaattcaaatattttccttcatttattaaaaatttcacatcctcagtatagcaatataaaatgtgtgcatacacataagacttttccttttattcacctttgtttcaaaacttcatgttgatagttttaattctggaaaatctgattcacactttaatcttttaaatccatttggaagtctaatacttctctcatgtcccagctgtatatacagttttgtgccacataatattttggtcggtgatggaccacgtatatgccagtggtcccaagagattatataataccatatatttttttttgagacggagtctcgctgtcacccaggttataataccatatttttactgtacttactctatgtttagatacacaaatacttaaccatgtgttacagctgcctgcagtatgcagtacagtaacacgctgtacagattggtagcctaggatcaataggctataccatataacctaggagactataccatctaggtttatgtaagtacactttgatgtttgcacaatgacaaaatcacctagtgatgcatttctcagaacgtatctctgtcactaggcattatgactgtattagcctataaaggtttacaaaacaacaaactcaccactgtctttacagcagttatcgcacattttgttacatgcttctgagttccatacttcatcaaaatgttgagccatcaacacacgacgacatctgcaaacacatttaaagatacaaattattaaaggatataataaagttttaagaatctctatttcagcttacatagttatatactgtattagcttcctataactgccataatattaccataaacttagtggctttaaacacatttattcttacatttctgtggtttagatttagaagtgtactatgggtttcactggatcaaaatcagagtgtcaggttcttctcacatcacacaatctaaaataatctccctattttaaggtcagctaatgaacagtcttaattccatgtgcaatgctactttccttttgccatgtgaggtaacatacaggttaggaattaggacgtgaacatctttggggggccactgtgcccccgacataggacttttttccccacatattcttgataaacactgtttaaaaaattgtctgagttccatttttaaattcaatgttttgcaactattaggagaatattcttgacagtaaaatagtttcttatattttaataaagtagcaatatttgagttgaaaccttaaaatatgcttcatgagactctactggcctttggaagacattttcattttctcatttcttttaactagattattgtagtatctattggaaagaaagaacatttctatcactgtctggctgctatttaccacctcgacatttctgagcacttcttatgtgataggcaataaaagcacaaagataactatgacagaaagctttcaggaagctatctagtctaaagccaccctaagtagatttaaacttacttcttaaggagaaacttggtatttcattgacacatgagctggcaaggtggcacgttactgagcttgactctcaaaatgcctatcttaaccatagaccttttcaaaattattaaatcatgtaactgtacagcagtgccagagaaaaaaagccttcaagttgctatcaatgtgtctcaaaaaccttcaattaaacaagtagttttggaggattatctcaaagatagggcatcttttcttgaactaaggcagatcatacaggttgatgtgctggttcctaccctccaacatctgcttttatggatctgcactttggtgttccaccaatgtatttagtaagaacttaaaaacgatgtcatatactttcatatttgctttaattggtaaaagttataaaaaggtatgtggcttacttgcttatgttttgacagtatgataccatctcataaagcttctgctgtcccacattttccatcaccaccattgaacttattctgaatatatctccaaagccgtagtacaaaatacagtctgctttcatgtcatctcgacctgtggtgtgagaaaccttgagattgcagaattacatttacaaattcaaaatatgcaaaaatgacatatggtaaaattagcaggcaatgttttatactacatctagaaattttagagatgtggaagttaatttgtaatgggtaccctcaaattaaaaaaaactctaaagagacatcaataatcagctctactaagttaaaaaatgtgtctataatccagttaagttatagatttgaaatcactaattaaaaattcaggaggcaaagatgaacatcaaattatcttaacacacataaaaagaaacaattcagataacagaacataagtaaaaatttctccatatgcaagtaagtgtcaaactgctaaaaatacattgttctaaaaatactatccaataaagataaaacatacagacttattaagcatttatcatgtattttttggaaaagctttctaaaaatttacttctggatttgagtcctacatacctgcacgtccactctcttggtaataattttccatggatttactcattgaatgatggataacaaacctcacatctggcttatcaattcccataccaaatgcaacagttgccactactacctgaaatattttaacattttatcagttaattaaatcaagtttaaatattttaaaggtaaattaggcttctatggaagatatagacctaacctgaatttcattggctgaccattttctatgaactgtggtcttatcttctggctccaaattggcatggtaagcacctgcatgaattcccagattctgcaaactaaccgtaacttgttcagagtctttctgagaaaaacaatatatgattcctgcagtaaaatatgtgcatttgttagatagatatggcatattcctggaagatagttttcaacacacacattcaggacattgattaatacaatgcacagaaggaaaaaaagaattatgaaaaatttcaaggccttgtgcatatattgacattttggtataattccagatttgagcaccagcttcctttaaagcagaaatgagcctgagccatcagtttttgttcctgttatctcttttctctctttaactttatctcccactaaacagtatttctcaaactgatgtctgtaagatgctaacaaatgtgctatgaatgcagtgttctccagattaattttgggttaatttagattaatttgcatgcaaattaatttggagaacattgcattcaacaaagttaaatgggtgtctctctttattttcagggatggtcagagcttctagtttgctgatacaccctgtgaacatccaggcagaataaatacctgcaacctttctcaaattcatttgaccctagaactcctttta

SEQ ID NO: 96504 - DNA, 30685 bp, Homo sapiens
agccactttcttcttgaaaccaacaaaatctcatagctactctattccactttggcttttgccatttgaccatggcactgcccagcacagtatgtgttcttctgagttcagtatgtctatttgtgtgtaaggcaatgacttcagtctcccaaccatacctcttattgaaatacgatggaaacttctcttgaacagcatgatatgacattgtttggtcttcacttagtttgggcgtatcatttacatatttagtccacttcttttctcattagtctgacatcatttaggtacggctgcttgcagccaatgtgatcataagcagaaatacaaatataaacacaaataaaatgtcagtacttgattacaaaacaattcataatatgctaacattaaaatttataggtcatttaaatgaaaatataaaatttcaaaatcctggagacccctttcccgaagaatacacctcttgatctacgtttcagaaacacggccagggagatcacgtctggtgaatggccactgctccttgcacacttgcttttattttttatttcttctctcagggtctttgaaggaagaaggctggagtgggaacctgtgaggagcaacaatagctgtggagaaacgggagtgacaggtcttgatggtttccatgtagttggttttagaattgcttttactccacagtgcccaatagagtgacaattaacagtcaaggcttctttgatacatactcaagcacttaatattacttgaaaaaaaaaaaaggcttccataatgactgttgtcgtttagtaggagacctgggggccggagccgcctgtggacaaccatccgccagcttctctcgctccgtcgattaggaggagtggtggcgacctcggccttcagtgtctccaatgaagtgaaatggcggcagcggcggggatgatgttgctgggcttgctgcaggcggggtgggtcggtgctgggccaggcgatggagaaggtgacaggaggcaacctcttgtccatgctgctgatcgcctgcaccttcaccctcagcctggtctacctgttccgtctggccgccggccacttggtccagctgcccgcaggggcgaaaagtcctccatacgttttctccccagttccattccctgggcatgccatagcatttgggaaaagtccagttgaatttctagaaatgcatatgagaagtatggacctgtatttagttttaccatggtaggcaagacatttacttaccttctggggagtgatgctgctgcgctgctttttaatagtaaaaatgaagacctgaatgcagaagatgtctacagtcacctgacgacacctgtgtttgggaagggagttgcatacgatgtgcctaatccagttttcttggagcagaagaaaatgttaaaaagtggccttaacaaagcccactttaaacagcatgtttcattgggagatatacctaatgctagatgacaagttagtgggtgcagcgcaccagcatggcacatgtatacatatgtaactaacctgcacaatgtgcacatgtaccctaaaacttaaagtataataaaaaaaaaaaaaagaaaaagaaacaaaggagtactttcagagttggggagaaagtggagaaaaaaatgtgtttgaagctctttctgagctcataattttaacagctagccactgtttgcatggaaaggaaatcagaagtcaactcaatgaaaaggtagcacagctgtatgcagatttggatggaggtttcagccatgcagcctggctcttaccaggttggctgcctttgcctagtttcagatgcagggacagagctcattgggaaatcaaggatattttctataaggcaatccagaaacgcagacagtctcaagaaaaaattgatgacattctccaaactttactagatgctacatacaaggatgggcgtcctttgactgatgatgaagtagcagggatgcttattggattactcttggcagggcagcattcatcctcaactactagtgcttggatggacttctttttggccagagacaaaacacttcaagaaaaatgttatttagaacagaaaacagtctgtggagagaatctgcctcctttaacttatgaccaactcaaggatctaaatttacttgatcgctgtataaaagaaacattaagacttagacctcctataatgatcatgatgagaatggccagaactcctcagactgtggtagggtataccattcctccaggacatcaggtgtgtgtttctcccactgtcaatcaaagacctaaagactcatgggtagaacgcctggactttaatcctgattgctacttacaggataacccagcatcaggggaaaagtttgcctatgtgccatttggagctgggtgtcatcgttgaattggggaaaattttgcctatgttcaaattaagacaatttggtccactatgcttcgtttatatgaatttgatctcattgatggatattttcccatcgtgaattatacaactatgattcacacccctgaaaacccacttatccattacaaacgaagatcaaaatgaaaaaggttgcaaggaaccaatatatgtgatcatcactgtaagccacaaaggcattcgaagagaatgaagtgtacaaaacaactcttgtagtgtactgttttttttgagtgtgtaattctaaaagccagtttatgatttagtattttgttaactgaatggttctatcaaatataatagcatttgaaacattttctaatagctatgatacttatacatgtgctttcaggaagttcattagtaaaacaattgttcaggaggatctaggtaattggcagattctaaataatataatttccaggtagtaattttaagagtactcttagctcttgccaaataagttcagggtattcaaatcttggactagtcctgcaaggtataaagaataaaaatcccggtgagatacttggaaacctcaggttattatttatctgggcaattattgtgtgggtgaggatggaagggcagggaataattgaacatctaaagccttgaatgagagaatactaattcttttggtatgatgatactcagaaatggagatgttgtagaaaaaaaatatcctttggaattttaactaaaatcactgaatataggaaattaagagatccgggaccatatttgataagatttcctaaaaataatgtaattattaatgccaaaaactgctcatgtatcttgatctaattacgaaataattacatatttacctgataaatatgtatctaggtcttcaaggtcacatttatgtggaagtccaaagtcaagtccttaggggataattttgttttggctcagttgttccctgcttcctctctctctctttttttttttttttttttttgagatggagtctcgctctgtcgcccaggctggagtgcagtggcgcgatctcagctcactgcatcctccgcctcccgggtttaagcaattgtctacatcagcctcctgagtagttgggattacaggcacctgccaccacgcctggctaatttttgtatttttagtagagacagggtttcactcttttggctaggctggtcttgaactcctgacctcgtgatccacccgcctcggcctcccaaagtgctgggattacaggcatgagccacatgcctggccctccctgcttcctctctagaatccaattagggatgtttgttactacttatgttgattaaaacagttaacaaactttttttctttttaaaatgtgagatcagtgaactctggttttaatataatctgaaacaaggtccttgggagtaatataattggtcacattctgtaaagcacattctgtttaggaatcacttatctcaaattataactcagggcctaactatatgagatggctgaaaaaataccacattgtctgttttcactagatgatgccaaaatattttgctttacgtatattacagttctttttaaaacactggaagactcatgttaaactctaattgtgaaggcagaaactctgctaatttttcacattaaaattctctttgaaaaaatacaaaaaaaaaatgactgttgtcaccatagcgatcagcagcagaactcattaagaagacctggctttcttcttcgtgtggaagagtaggaatgcaaagcgtggaagtatattggacattaattatttttgccccataagaaaggacattttcagcagggcacggtggcgcatgcctgtaatcccagcactttgggaggctgaggtgggcaggtcccctgaggtcaggagttcaagatcatcctggtcaacatggtgaaaccctgtctctactaaaaatacaaaaattagccggccatggtggcgcacacttgtaaccccagctactcaggaggctgaggcaggatcattgcttgaatccgggaggcggaggttgcagtgagccaagatcctgcaactgcactccggcctgggtgacagagcgagactccacctcaaaaaaaaaaaaaaaaaaaaaggacatcttctaagtgccgtttagaataatatagtacttagtacaaagtactgcaacttaaaatattatgtcttccttgcaaactgtatcttactcatgtttgtttatcttctttccaatatccatgctccattgtttgaaactcataacaagtgcttcataaatgctgatttgaagaagctgggaagtaagattaagtggcaagtccaaggttaccagctactaagtatcagttaggactcaaacctaagacgtttaactctgcattcagtgacacaactgtcatttaaggagtgctgaggaagagaaagcagctctgacatccaggtgctggaactatcagctgggccttggtgttgctaagaacttttctggaccatggtgttctgtcgaatgaaaacaatttcacggaacaccaaagtcagacaagagcattctgtaaccatgatcaagacaaaaacaagaccacgtcataattttgtctgaacacggacaaaatttaggcactgtctaaaccacaaaaatgacaaatatgtgtgactgttgcttctttatcattcatggctttagcctctgtctagtcttgactcctaaataagacttattaagatacccaatcatagaattactgccatttcctgacagcaaccaatccagagtaaggccttgctttcttgaactcttcccaaaatcacataacgcaagcccatagtaaattctaacaccttcttactgagatgcccccacggttcctcatgcatgcatttctcctggcttcaagaagtagtagctcaattcttttactacaagttgttcctggtgggtgtgttggagagcactgacaactcctcctatgtccaggggctgtgttgtgtatacatgctgagtgtttaattagacaaccctgtaagacttatcatccccacgtggcagataaagacatggaggttcatgaaaatttaacgatttgcccaagtcccccctcccctccccaggaaaagccagcgaccacattccaaccctccgctaactctgcattgagcactctctttcctatgccctccacctgcgcccattcccctcttctgcgggccgaccgggatcctgctgggggctacagcccaaacatgttacttttccaactgttgttttatgtgtttctatgagaaaggatattcggattcagaaatgctttgcaactccagagctgttgagcctgcggcgcggcccaccactcaacagcggtgctgagtggctgctcggtcgcgcgggatccactccgggcctccgagggtgggtgcacgatccactagccactctccaggggagagtgacgtccgggtggaccaatcgccgctggggcaccgaccgctgggcccaatcgcaggagagccgggtagaacagtgacagcgccgcggcagccgaccccgcctcctcggcggacagcgatgctcagctggctgcggccgagtcatcgcctagcgctggcagggccgctgaccgaccgacggaggcgccgattggccgattgtccactgcgcagaaggagcagctgctccgcgccccgccgcgccgcgctgaggccgaggtccgcagggccgcggggaagccgagggctgccggagaaccctgcaggtgtcactcgggacgcggaagtgcgcttgccgaggtttgcyttacmatacgcttgagactccccgacaagcgtaatttggtcgagttcgacgggaaagtactctccccaccccagcgccggccgcgtagtccgaggttactgtccccggcgcgtcctctgttgccccagtccagaggctgcccttgaacccgggcgcgcacgagcgcagggcatccgaggcgacagcccctggcacggcccgacctgtacccagcctggcaggaagactgtaatcgtggggtgagttaaaaataaggccctttcgattgggagctgctttttaaaacgccccctccctgtccgtttttaatacgcagcaaaataacaataacaattgtgcaactgtcgcttcccaaaaggaacctcattgttgaacttacgaaaaatcagttggcaatatacagtgtgggaactgtactgtgatcattggctaaccaagatgggtgacagtttatgatttcaaagactcaaaggcggcttgagtcctacaatgtcctactcataaaaatggaaagcatggcagcctcaggttgttacagagtactctactccaaagtaaaagttattctctgagaaagtgcttactgccttttctgttctctagtttgcttgtttaaacatttactccacaaaattgctcaaacttacccatctttgaatatctagcctctgggatgagacagatgatctttctccgttttcactttttatagaatacagctacctacccaggcaatatgaagattttatttgtagaacctgccattttccttagtgcatttgctatgactttgaccggtccactgacaacgcaatatgtttatcggagaatatgggaagaaactggcaactacactttttcatctgatagcaatatttctgagtgtgaaaaaaacaaaagcagcccaatttttgcattccaggaggtaagaaattacaatatccatagtatttaataaaatgggaatgtataccgggctttgagtyaaagaggaccgtgaactcatcatccattggtctctctagggcggccatcaaagtcctaaatcccaaacctaatggcctttactgggaactcacctcatttgaagtttcctgacacctttcaaatctgcctcttcttcttaaaacaccctcctgctctgtgacactagctcttctcctttctctcggaaaatttcaccacagtgtcatctcttctgtggctgtctccttgctttgtcctaaaaaaaaaaaaaaaaaaaaaaaaaaktctgaaaattggggcagggcaggctggaatgagctacttggtggacaggggtggctgaaacatggtgtttctgtctctcacttgctctattcttccccaatccttttactgtttctgcatgtcccagctttcagggactctagaaagtggcccatcactgaagattgtgagccagtgtctgtcacaggrtggggtggaggagcatttattatttggtggtggtatcaaatcagccttggctctcacgtgttgaggagcagctgtgtggggacatctggagtggggagtacccaccgttgacaccaaagatgtttagccagatattaaggaggctttcttcctccctctccagcaatctccccagtttttttgtgtgtaaaacaggaggcaggcacttcaccattctcctggtcccttgggcagtttttgacaaaagtctaccatttcaaaatgcaaagagatagtatccaggtttggaaatttttttttttttcctacaatgcctcaaaaacaaatcacacctgtaaactctaaactcttcttctgggggatattttgtgattgtaaaggagtggtgctgccttcccagtgaaagatgaaatgaattaaaaggaattgagtcacctcctgctggctctgtgagtctctgtgactgggagaagagcctgagaaggaggaaatggcaaaccgccccagaggcaaggttctagcacttcccgaggtgtcaggtggaaccttgctggggtgaggttaggcaatttggcacaatccctaatcttactcatttcctcattcccatgggaaacgttttcttgggagtgattatttctgagcagcctggaagacatcaaggttctggcgtagagtaaggtcataaaaaaaaagggccctgagtctcacccagcggtcttatctcccttcaagaatgtctcctaggtcattcccgggagtgagaagcttcgatcggctcacagtttctttttktaagtgtttattcatgcattaaacaaatgtttatcacacattatcctgtggtgacaaggataagcaaaacggctctgaacccgagaagcccagagtctctctaggttgagaaaaacacacataaacagaatagagtttaacaaatcctcttagtttcaaagttggggtcctacagcagggatgcycttcagatttcggctctggagacgtttgttaatatacatacttgaatcccatcctggaacctctaacacagtgttttttaaccttgactggacatgggaatcacctgaagtgttttttattttattttgtttattatgtatttatgcatgtatggtactttttgagacagggtctcattctgctgcccacgctggagtggagtggcgtggtaatagctcgctgcaactttgaactcctaggctcaagggatcctctcacctcagcctcctgagtagctgggactacaggcacgtgccactacactcagctaatttttgatttttttttttttttttttgtagagacagggtcttcctctgtttcccaggctggccttgaactcgtggcctcaagtgagcctcctgtctggtcctctcaaagtgttgggattacaggcgtgasccaccgtgcccggtcttattttatttttttaattgacagataatcattgtacatattcatggagtatacagtggtgttttgatacatacaatgtatagtgatcagatcaggctaattagcatatccatcaactcagacatctctcatttctttgtgttgggaacattcaataccctccttcttgctatttgaaactatataacatattactgttaactgtagtcaccctgtggtgctacagaacaccagaacttattcctcctgtctagctgtaattttgtatcctttaacaaatttcttcttacaggctcatcaatttctgtatttgattctgtgctttcttttggctgacctgtaggagcaggccccctggttgcagtgggagggaccagggaggagaggacaagaatgtctgggaaagtctgctgctcttgccctcttggactgagggaagacgggccttggtccagccagcttggtggcttctgcaaccatacagggggcaagtgttggcccacctccagcctggcccagctgctgagagccccctactgcccacagcagtggtctcatgtcaaagatttttgccgaattttcaaattgactttttcatttattgtttcttaattggattaatattcaagagaacctactactctagatcccttcccttaaagttggtgctcttagacctctgggaaccagaaaccacccctaccctcacctgccacccacgctggagtggtggcctactctctgtttgctccttaggacaaaggaacatttttgtttcccaggaggcaccaccatcgccttcagtgattcattcaatgactaaaaacggtttacatctgttttttaaatcagcttagcatttcccagtatacaaatggcacacactttttatattgactttggaaaatacagagcaatggcaagcaaaaaatgttttaagatcatgcaaaattycttccatcaagtaactagtgtaatgattgacacatcttccaatctgtgtgtgtatgtcatctgtcattgtcattttggtccttggaagttgagtttatcttactcctcaggtcatgacatactaccacctttatttactttttatttttatttatttgagatggagtctcactgtgtcacccaggctggagtgcaatggcacaatctcagctcattgcaacctctgcctcccaggttcaagcaattcttctgcctcagcctcccaagtagcggagactacaggcgtacgccaccacgcctggctaatttttgtatttttagtagagacagggttttgccatgttggccaggctggtctcaaactcctgacctcaagtgatccgcccaccttggccccccaaagtgctaggattacaggcgtgagccaccgtgcctggcctagtttttttaaatttatttttagagacagggtctcgctatgttgcccaggctggtctcaaattcctgggcacaagtgatgctcccacctcggcctcccacagtgctgggattataagcgtaagccaccacactcagccacggtatgctaccatctgtagacagtgtaagtctcctctttcaattttatcttattttaaattcttttatttagtaaataaaggaagatgtttctcactaatctatctgtgaagacataggtaaaaaaaaaaaataagggcaacagccaagctctccctaaataaaggttwatttttttttttttttgtattttttggtagagacagagttttaccatgttggccaagctggtctcaaactcctgacctcaagtgatcctcctgcctcrgcctcccaaaatatgaggattacaggcatgagccaccacgcccgaccaaaatctgaaactttttgatcaccacactttaccacaagtgtaaaattccacacacaagtactcaatggcaactgttttatgcacaaatttgtttaaaatattgtataaaattaccttcaggctgtatgtatgaggtatatatgaaacataaatgaattttgtgtttaaatgtgagtcccatccacaaggtatctcattatatacatgcaaatatcccaaagtctgaaaaaatccaaaatcggaaatacttctggtctcaagcatttcagataagggatactcagtctgcattgctttataaactgratgaaaatgtaagctctattagtcccgcccatccaccagagattccccacccataacctactggccacagggaaaaaagcatatgcaccatgatatttttatacacgttgtgttaactactgtaaacacattgtcttctttatatttctttgcaggaagttcagaaaaaagtgtcacgttttaatctgcagatggacataagtggattaattcctggtctagtgtctacattcatacttttgtctattagtgatcactacggaygaaaattccctatgattttgtcttccgttggtgctcttgcaaccagcgtttggctctgtttgctttgctattttgcctttccattccagcttttgattgcatctaccttcattggtgcattttgtggcaattataccacattttggggagcttgctttgcctatatagttgatcagtgtaaagaacacaaacaaaaaacaattcgaatagctatcattgactttctacttggacttgttactggactaacaggactgtcatctggctattttattagagagctaggttttgagtggtcgtttctaattattgctgtgtctcttgctgttaatttgatctatattttattttttctcggagatccagtgaaagagtgttcatctcagaatgttactatgtcatgtagtgaaggcttcaaaaacctattttaccgaacttacatgctttttaagaatgcttctggtaagagacgatttttgctctgtttgttactttttacagtaatcacttatttttttgtggtaattggcattgccccaatttttatcctttatgaattggattcaccactytgctggaatgaagtttttataggttatggatcagctttgggtagtgcctcttttttgactagtttcctaggaatatggcttttttcttattgtatggaagatattcatatggccttcattgggatttttaccacgatgacaggaatggctatgaccgcgtttgccagtacaacactgatgatgtttttaggtgagttccaagtgtagctttagaactaactatgtatttgatattcatataaaatgaatttagtctactgggggagaaactttaatctaaagccctctatttaagccattctagttcaattaaagggtaataactagtttgccaggagtcaataagccaaaagccgaattcactttaaaaatttaatccactgaataaccacaatttcccaaatgtgtatatttgcctcaaaattgttttgaggaacattcttcttatgaatcagttcttcaatatagctttcattaaagtgaagatttcttaaaatgctgctaataagactacttcccataaaaatatttaggacaatgatataaagtatactaaaaatacttataagaaaaaaactatatcaatttaatatattcaagaagaaattttttaaagacaggttttgcaaattgatctttcagcaaattggccatttcataaattgatttttgatgaattgctggttggcaaattagactgcttccttaactacctaccttataactgtttttgcaggattcaaatgagatactgcattgaaaaaggctgtggaactataaaatgagactctgggaaaggtccaatttactcttttctctaataaaagtgttaaccccttactatcttgcagggaagcagtgtgaccaaatagaattgggcctaacttccatctatagtactagatgatcttgggcaagttactgaactactctcagccctcattttctcatctgtaaaatgggcrtggtactacctaatttagaggattacagtgaacattaggtagctgtcaagcactcgcttggcacaatccctactattcaataatagccagtttttctccctgtcyccctaagagctgccaaggtcaggtaagttaatctatgtgaaaacactttgagaattgtaaagtggtctgctaatgtcatattttactattttatgatgtaattaaaactactgactattaagggtcataactgaagaccagaggtaatttgtgtttatgaagttattctgccacaaagatgaacaggcaagatgataaagaaccagtttaccaataaataaatcaatataataaaggcatgctaacactaagagtgccaagtctgaaaaaagcmcaaacaaaaatgaattagcagtctcaatttgctaaataagaggttaatatataattaggaaaataagcagatcagtttttttttttgttttttttttttctttgagatggagtctcactctgtcgccaggctggagtgcagtggcatgatctgggctcactgcaacctccacctcccgggttcaagtgattctcctgcctcagcctcccaagtagctgggattgcaggcatgcgccaccacgcctggctaattttgtatttttagtaaagacaggatttctccatgttggtcaggctggtctcgaactcccgaactcaggtgatctgccctcctcggcctcccaaagtgctgggattacaggtgtgagccactgcgcccggccagcagatcagtcttaatcggcagattatataaatagatctagacctaaaaattacatgaactcttgttctctgtactggaataagaattctagagtaaagtaaccttaaactgacctgtccatagtctactttaattcatcaaacagagttctacaattaattaattcaatttttagatacaatgagttaggatgcttgtagaaaaggaagtatttagacagagtgaaagtgtttcctattttaaattggccattagctttcagaatcagccagtgattttgaatcctttctctcacagccagggtgccgttccttttcactattgtgccattctctgttctacggtccatgttgtcaaaagtggttcgttcgactgaacaaggtgagtttaatttgcttaagaaatatgaatctaccatctttacaaactcaaatctgtgtacaatcaatgtttaatgcttcagaatattctacagccctttttatgcacggatctccttttgaataaagtggtaagctctgtgagggaaaggcttacactcttgcaagggagcccctgcctagggccttgtactttagagagctccctcggctctgggccgtgccccgccctaagaagaaaggagctctcagggccaagtgggagatgcccactgggagctcaccacatctccttccttctagactgaactctgcccacctgggtccctgcaattcccagcccagttctgggcttatgtccagtaagggcctggatgatcctcttcctcagccaccttctcctgagggtggactgtgcccagtgtgctcacctgtagaccaaggaaggagccaaggggcgactccttctaaagggtgtggctggactttggaatcacagggtggggctgttccacaccctgtaatgaccctttctgagcagggtggtgcaaggggtagagcagaatgggggtgggctccagctgggcaccaagggctgagggccagttcaccctgggctaccctgttcctacgtggaattctgaaaacgtctgagaatcctaagtgtgtgcgggtctcctagatcattcattacaaagggatatttttcacagtaggaaggcataatatattttagttaacagtttgttggccagatttcaaataactgaccacttttaaatcctaagaatataatatataggcctctgataatgttcttacactggcccctacaactgtcacagctgggcctgactcagagtcctggcagaaaacggggccccactcagctggttcaatcaagaaactttcatgaaggccattatagagagtgggcattgtcgaggcagccagagagatgccccagataggaagcagagaagaaacaccataacctttctcccccatcatccttttaaccaagtgcagcaggaactsgggccagcaagawagtccaagtcatataatttgtggggtcagcctccaaagcacagagcagggtacacaaagtcaaacagttgaaggggcaggcagagaataaccaggatgcagcaaagacaaaaattaaatttccattgagaactagttactagttagatatcaggcatatgggcttgtcctccttcccttttgtatcatatgaatcttattagacattggcactttctttaatgtcatatgttagcccggtgctgtgaatgtacttatttgatttatgaataattcataattatgctgttgtatttttaccagtttagtcaatactggagaaggctacataattcaataaattaaaaatatatttcttcttttactttctctcttttttttttttttgagacggagtttcactcttgctgcccaggctggagtgcaatggtgtgatctcggctcactgcaacctctgcctcctgggttcaagcaattctcctgcctcagcctcccaagtagctggaattacaggctcctgccaccatgcctggctaatttttgtgtttttagcagagacagggtttcaccatgttggccaggctggtctcaaactcctgacctcaggtaatcagcccgcctcagcctcccaaagtgctgggattataggcgtgacccaccgcacccggcctcttatttttcactcrtaagatgtagctatatattcacacatctgtttatagatgatgtgatgatgattgctttgaaaaccaataacaaatggaaaaatttatataaactatgtaaaaatctatctgcttctttggaytatgcaatagtttcttagatatgacaccaaaagcacaagaacaaaggaaaaattgatagattagacttcatccaaaaacttcattcaaagtttgtcctttgaaaaatttttatgtttcaaaggacaacatcaagaaagtgaggccaggcgcagtggctcacatgtgcaatcccagcactttgggaggccaaagcgggtggatgacccgaggtyaggagtttgagaccagcctgaccaacatggtgaaaccccgtctctactaaaaatacaaaaaaaaaaaaaaaaaagaaaagaaaaagaaagaaagtgaaatgacaaccgacaacccacagaatgggagaagatatttgcaaattatatttgtctgagcaggaactcgtatccagcatatttaagaactcttaaaattcaacaacaaaaagacaactcaatttaaaaatgggcaaaggatttgaatagaagatatacaagtgaccaatatgcgcatgaaaatgctggatatcattagccatcagggaaatgcaaagcaaaaccacagagtgggctggggtggccaaaataaaataggccatagcaagtgttgatgaggatgtggagaaattggagccctcatacactgcgagtgggaacataaaatggtgcagcagctgtacaaagcagtttggcagttcctcagaaagttagttgccttatgactcagcaatccctcccctacttacataccatgagaagtgaaagcatatgtccacataaaatcttgttcatggcagcattattcataatagccaaaaagtgaaacctatgcaaatgttcatgaactgacaaatgggtaaacaaaatgtggtttatccatccagcaaactgctcttctgcaataaaaagaaatatcgttctgttacatgccataacatggatgaactatgaaatgattatgccaaatttaagaagctagtcacaaaaggccacatattgtcatttaaatatgattctgtttacgtgaaatgtgcagaataggcaaatccatagagacagaaatttgattagggcttgactggggctggggaaggggaatgactacttatgggtatacagtttcttttcggggtgatgaaaatgttccacagatagtggtgatggttgcacaaatctgcaacatactaagaaccactgaattgcagactttaaaagggtgaggtttgtgggatgttaattatatcccaataaagctattgggaaaaaaaatttacctgctttgacttagagctaaaatagagctgtcaagaggtatagtttatttttgtttatatttggtttagtttataaaggctttttaaaattttttttattatactttaagttttagggtacatgtgcacaacgtgcaggtttgttacatatgtatacatgtgccatgttggtgtgccgcacccattaactcgtcatttagcattaggtatatctcctaatgctatccctcccccctccyccctccccccactccacgacaggccccggtgtgtgatgttccccttcctgtgtccaagtgttctcattgttcaattcccacctgtgagtgagaacatgtggtgtttggttttttgctcttgcgatggtttgctgagaatgatggtttccwgcttcatccatgtccctacgaaggacatgaactcatccttttgtatggctgcatagtattccatggtgtatatgtgccacattttctcaatccagtctatcattgatggacatttgggttggttccaagtctttgctattgtgaacagtgccacaataaacatacgtgtgcatgtgcctttatagcagcatgttttataatcctttgggtatatacccagtaatgggattgctgggtcaaatggtatttctagttctagatccttgaggaatcaccacactgtcttccacaatggttgaactagtttacagtcccaccaacagtgtaaaagtgttcctatttctccacatcctctctagcacctgttgtttcctaactttttaatgatcgccattctaactggtgtgagatggtatctcattgtggttttgatttgcatttctctgatggccagtgatgatgagcattttttcatgtgtctgttggctgcataaatgtcttcttttgagaagtgtctgttcatatccttataaaggcttttaaaaagtcatctccgccaggtgcagtggctcacatctgtaatcccagcactttgggaggccgaggtgggaggatcacttgagaccaggagttcaaaagcagtgtgggcaacagagggaggctctatctctacgaaaaataaacataaaaataaaaaagtcatatcatactgttaaatatagtaatattttaaaatgtttacattttggcatttcttattttgaattacggtaactgtgaattgtgacttcattattctaggatacttactttgttcttaactgcaaactaaacaatcttttggatgatgtcaacatttctataactaaatgtattcgcatccttcattattatttaaattggccattttgtgaaaatattaggcactttaaataatcagaggagtggggaaatactgccgaagttttcagktggctctcattatttctattatcttaaataagaaaggtaagaaagtggaattctggtaattattttgcaatctctgcgctctgcaccactgtgaactcatagctgaagctgccttggactattttacctgggcatcacccatatactccttgttattataaattgggagacagtaaaacagacttgatttttgaggtctattgcattaaaaaaaaacagaatttagaagatgaactcagttgtacttatcctttaatcctgttttatctctggcaactattaaacaagtcgaactgctcagagaagttgggcaataagctaaagctacttcataatagtatggttccatcagaacagatggtgcagtgtctgacctatttcccatcaagaatagattaaaactcttacataatagaactagtactgtgcagtctgttttccatagcactattcctggctgcagaaagagatcagaaataaaagaaaataatgtagttagacaagtagaagaacatccttccaattaaactgacttaatgtattatcataaatcatggaggcagtaagtctgcatgctacttgatgactggtaaatgggatcctgaattaagctttgattcattcatttgacaaatatttattaaatgtctgccatgcacccggacagctgagccctagggatacagctgtgagcaaggcagatgtacaaggcagatcgacaaagctttcattttagtcaaaagaagacacataagtgagcacacgatattttgcagagatagacgtatgttttatgaatgtttgtcctatcattcaatgaataatttgaagcaatatatgagaatatgtacaataaaatgaaaaagtttaaatagataaaaatcaatacacagtctaaaagatgaagaccatggggaaaattagaatatacacataagccatatctaactttgaaagataaccctcaagcttggccatttccttcctatcagtccaagcaaacacaattatttacatgatttgtattgtcagtaagaaaaatgcattgcagtttttcatggaaaagtaaacttggcaaagtagggaacaagcatagtgacttgttgacaaaatctgcagaaagcagaagctacatatataggaactgagaccaagaaagccaggtcaatctgactgaaaatggtcatgaaattttatatctgatgatgagcaatttgacaaagaggaagaaaagcacatgaagatggccagcctgtcttttggaagtttaactcttcagttgacatggtcttggattccagacaaaactaaacataggtagaatactgtctgtttctctctgattgtgagcttgcactgaccatgcagacttcatgaacaatgctgagtggcctacccttgaccaactttggtgtatagcaagtgtgaccatagcagaatccccactcttcatcttgtaaggcaccttagggcagagrcagttgcaagcaataaggtggaaacatatgttttaaagaatcacttaacattaaactgtggcataaaccttcactagagcacaagatggttaatttgatgagtcaaacatgcagaatctagtagtgatgggattttttggtgactttgaagagggataaaattccagttgcagaatgtataagaatctcctctctttgtctgcagctgtcacttgccagactgaggaacagataagaaggttttctttacctttcaaaaggctcttgcaggaagcattgcttgttaggagccatcctgtgctttcaggtgtcacagattagcatggggttggagggtgggagacagcatcctgaagagcaggggtaggtgtggctttgcctggggctgtggcagagaggagagacatgcagttatcaaaagagtcagctgcactgtctttttagctttgccctgtggacactggaactcagctatttggagtttccaacatctctcacatcargtccaaggagaacctttcccttagtttcctcagctgcagaatgggctgctgacttctcagggactttgagggaataactttcatttcattcacccagcagtgccctcatgtttactgttttcaatgagtaacagttgtctccattagtttgtgtttgttgttttgtaattctgccttttttttttcctctctctctatccctactccaaacaggtaccctgtttgcttgtattgctttcttagaaacacttggaggagtcactgcagtttctacttttaatggaatttactcagccactgttgcttggtaccctggcttcactttcctgctgtctgctggtctgttactacttccagccatcagtctatggtatgtcattatttttaatcattttatcagagggtatatggattaagtgaattccctaacctcaccagtaaattacataggtctgttgaaattttgcctcagaacgtgcttttctcaagaacttttagacatgaagtgctcgcttcagcagcatatatacaaaattggaatgacacagtgaagattggcatgctccctgtgcaaggatgacaggaaaattcatgaagtgtttcatattttaataaaataaatttttttaattaaaaaaaagagaaccggtcatggtggtgtatgtctgaagtctcagctagtcaggagactgagacgggaagatgattttgagcccaggtgtttgagaccagcctggacaacatagcaagacccccatctcattaaaataaataaaaatacgtgaaagcatctgtcaataatttggggagacttaggaagaaaaagagagtgacatgggtgaagaactaaaagaaggattgtgttcattataactccccacctttaaaccattgattaaattagcatctaaaattagagatgtatacctttaaactatgatttcccagagtacaatatcccctgatggtcaaagattgctgtaatgagattgactttcacatggattcttgtataaatgacaaaagcagataggatgtgctgactattgagttctctttccagagttggcttgtttaatgactttgtcttgttttaatgacttgtttaaacgttaatgtttaaatgtttttaaatttaaatattcaaattaaagaagcacaaaattccatttatgaatagtacatataatggatagatcrgaagcataaatataaaagcaatatttatgccttctttttgctttctatttaacaaaaaatgtgagccaactagatgaatgattgctgaaacgtccaagcaaatttatttgacacattaatgaagagctcattaatctgtttctgctgagctctgtgcatttcatgtggctgatagcatagcacagtgacgggaatcaaggcaatggggccacaagaagccaggccttctctgctttctcctaagcactttggggtaaggctctgagttagggaggaaagtgcctataagcacaggtgttaagcatcctgccaagatggcaaactccctaaagggctggctcatgtcttatagtaggagctcagtacttattgtttctattgaattctgatacctagatctgtgtcagagaacaacagtatttgcagttcctctaattttgatgaaaagttatttatactagttatcttttttaaaaagagactattcacctatcgaattaacaaaattaccaatacatgctgtgctggtaagcacatgagacaactgatcttacacattgttgataatagtactattcagctgtatcataaagcaattcatgaatatatcaaaagctcttttttcaaagttcatagtgattgatccagcaattccttttagaaacatactctaaacaaataatgagtaattttgtcaaaaattgatatataaaaacgttaattacagcaaaaawattttaagtgaccmaactgtccaacagygggagaatgtttaagtaaatgatggtacagccatttcatgaaaaatgacttaactaacaagaattgtagcaggcaccgtggctcacacctataatcccagcactttgggaggttgaggcaggaggactgcttgaggccaggagttcaagaccaatctgggcaacatagtgggacccccatctttaccaaaaaaaaacagatttttttaaacagtaggaaaataacacttaaagaaaagaattgcatacatggtgagtagaataataggtaattctaattttagtcttcacatgtttataaattctgttataacagatagataaaaggcagttgtccttttaataataaggtaaagtagatgggcttctgagctttttttttaaccttacactgctcaatattttaaaaatcaaaattacatactgtcttacctccaaatgtccaagcttctgagcttcagctatagctattgaacaggaacttcagtaatagctttagttataactagtttatgtggactacacagagttaaccatgggacagatgggataccttaggggtctagaagagaaaaaaaatcatgcagttttaaaattattttaagaacaccrtgcatgagtcagctggattcaaaatgccaggatactcctcctaataatctgcataatttattaaaagctatgtaactgggaaaaaaagttggaaaacagattacttatttatgtattgtcttaatctcaactttaaaatgtcttgtttccttttatagtgttgtcaagtgtaccagctggaatgagggaagctatgaacttcttatacaagaagaatccagtgaagatgcttcagacaggtgactgtgatttaaacaaacaaaaaaaatctatgaatgcacatatcatataccatgacttctgaagactataaatgaattccacaatcagtgcttcactgagaaccaattttacctatcttttcttctaaactgaacagtcagagagacagctcctggctttagcttcttgtggtaccacgcactttgagcactttgtgcgtatcatgcaatatacttgcaatacacagaacaaatttcaaatmcgcctcacttttagacttagaagagaaacattaaaacttaagggtgtaaggagggatcaagaaacttgataaggtcaaaagcaataatctctctgacatattccaggctcttacactgagaccaaagagaaatctttacctcagtttcttcatcagcagaatgggtttctggcctctctcagggataattttgaaggcataatgaaaattatgatgaatcactcattggtaggaaaataatgatataagtttcaaatatgtatrattttacctatacttggtaatgctttrttttatagagcctgttaagctgctattgatagtcggagcttatatactgtgacttctgaagactatacatgaattccacaatcagtgctttgttgatacaaaatccttaaaagggaggcactttaaagaatatgtatttttcacttttcttaatatgtttcatcggtgacaggcatgataatatttctatatgtaatgggtaattgggaaaaaatagatgataaataaaattgctctaaagaagttaaaaaactgaatgaacagctaatactggtataaagtaactaatgtttggagccaacatttgttccttgtgtcagcaaaagratattcacattccatgatccctggctgagaattctgcctctagtctttcttacccagctgttgtctatccttgttcaattataaatactgctaagggcatttttaaaatacgatcttgtastcsttaaatttgaatccgtcrrcacggtcactcataggaaaatgatcaaacaagcaagccagtcatgatttgactccttcccatctcatttcttactgccttacgctcatcctgaggtccaccttggtctctaaaaacaccatgtgttctcatgcctccatgtcttttcacacactgttccatttgctcttcctcccacattacattgaaactttcaagcctcagtcgaaacattgcttcttctggatagcagccttcttgacatccctcctcactccccagtccctacagggcttccatagctctttgtgtgcacttcgatcccagcattttccatcgacttgtaattgtttctgctacctgacaatcatcgccttgagtactgggacaacctttgattactcattatatcctcaataaatatttgttgaactaaactaaatgactacaaaattttatttttacttgtaaaaatcatttagagctatatatttaatgccttatgagagtaaccactgttatcatgccaatcattaagccagccttgcaaacaaattgaaaaatatgccagtttatacacttttaaaactgatttacagtattttcataggtcctttaatacctcccattttcgaagttaccataaataataacacaaatgccctaacgtgcaactaaatgagtaacttcattgtaatctcttgaaagtagatacaatcttctgttttatagtattgcttagggctttaagaaaatcaatgattgcttgactagtgaatagcactcataatttaatatactagaaatccttatttccaagatcattccttttaggtttagctagtatcttctgggcttggagcccgtgtaataactaattctcagattgactgatacatttttgttttccttcctgtccaaggttcttcccaaaccaaaacaaaaagcatcttacagtttataaagtagatattcattctcctcattttacagaagaggaagataagtctcacagagatttggctggaccgtggttattcagtgcctatcagtatgacacatgaatggacttcaccctactgaatgaagtccagctacttcatagctagggtttgcagtaatagattataaaccccaaagcaagaattgtacaggggtagcatgatgtactcatcaaaaacaaattaacaaaaaactgtacccaactaactgcctataattattatcttttttgagcttagacaagatggtctataaactctcttccagctcaacattccatgattttacacatctcatctgaactgaagaggtactgtgtaatacagttgaagggttaacagatgattacttgagcaaaaactctatttgagatgtagcaagtatatcaggagattagattgaggtggccaagggcaaaaatgtagcacaaatgaacttagccatctccaaagtgtctagcctaagagacaattagtaaatgtggtgctgaagagactagagaaccatgcaagctgatgggatggggaactatagactcaaaacagaaatgaaaaaaaaaaaaatctaatttcccatcatgtaacccgattatctgaagaaagaatgttaatggaaggactggtctttatggagcccagataaagagaaaccagagaggaaaaaacatgttccatgttatccagcagtgtacaaagggggttagattaccatatctactagaaatgaagattctcatcattacagaggactagtcaatgggattgtccacagcctgcattgcacggcctcatacatctaaatcccttttctccacttccatactcactagataattgtgtccagagttggttccttctggtgggttggtggtctcactgccttcaagaatgaggccacggaccttcactgtgttacagctcttaaagatggcatggacccaaggggtgagcagcagcaagatttattgtgaagagcgaaagaataaagctcccacagcgtggagagtgacctgagggggttgtggctgctggcttgggggtggccagcttttattcccttatttgtccctgcccatgtcctgctgattggtccattttacagagtgctgattggtccattttacaaacctctagctagctgcagagcacagatggtgcgttttcacagagcaccgattggtgcattttacaatactcttgtaagaccgaaaagttctccaagtccccacccgacccagaaagtccagctggcttcacctctcataatcttctaattactcattcaatgcccaagaatcttgacaatagaatagcatggcctgggttcagtattcttttaaagaaatccctgcatatgagaaccatctgaagaatttaaaaataaaaataaaataattaattagtaaaaataaaaatccttggcctcatgtactagagattctgcttcagtagctctgcagtgaggtcttggaatgtatttctaaaacctccccaggtgactgatacacatccagacctggaaactactgccctagatgactgattttcaaccctaaatgcacattagaataatcagctttggggtgggaagtaaaatgaatacataacaccaactcttattctcatccagtagttctcaacctgccaagtcaaatcacttggggagcttttgaaacttccaatggcctagcctcagctcaaacacattaaattagaatttctaggtatgagagccagacagtattttttttcaaacattctccaggtgattccaatatgtggctagagttgagaatcactactctaggtcaggggttagaaaccattttctgtaaagggcctgagagtaaacagtttaggctttctggattatacagtctgtcacattacttaactttgccattgtagcacaaagtaaccaaagaccatacataaataaatggacacagctgtgtgtgatcaagatgggacctggcgcaaatggtttcattgctaaacatttaaggaataaacatattagtactacctacagcttttctagaaaatagaagcaaggaacacttcccaactcattttatgaggtcagcattaccttcatgtgaaaccaaagaagttacaagaagagtaaatgatgaatttatatccctcatgaacgtaaataaaaaattcacaacaaaatattaacaaatcaagcaatatattaaaaagattatatatactgaccaaatgaggtttgtcctgtgaatgcaaggctgactcaacatttaaaaattacttaatcactatatcaacagaataaagggaaaaaaacccacacgatcatatcaatggatgcagaaaagacatttatcaaagttcaacatccgtttatgataaaaattctcaagaaactagggatcaaactgataaagggcatctattttatttttttaaaagcttactgctaatgatactttatggtaaaaggcctggctgctttccctctaagattgggaataaggcaagtgtatccagtttcacaactcctattcaacaccatactgggagccctagatataaggcaagagaaggcgataaaagggatatagattgggaaggaaaaagtaaaactgtttatctgcaaataatatgacatagaaaattctaaagaaccttcattaagataaagaaactactagaactaataaatgaatttagcaaggttgtgaaatataaagtcgatatgtatgaatcattgtatttctgtatactagcaacaaacaactgaaaaaattaaggttaaaccaaaccatttaataaaagcatcaaaaaacaaaaaatacctaggaataaatttaacaaaatatgtgcaagacctgtatgctgaaaactataaaacactgctgaaattaaagaagacctaaataaatggaaagaaatatgagttcatggattagaagactcaacattaagatatgaaagttaatacaaaacttctagaagaaaataacaagaaaatcttcataattttgggttaggcaaagattttagacaggaccccaaagatgtaaaacacatacacatagcttaattggatttcatctaaattaaaatgttctgctttgaaatacacagttaagaaaataaaaaggagtgggtgcagtggctcacacctgtaatcccagcatcctgggaggctaatgcagacagatcgtttgagcccaggagttcaagaccagcctgggcaacatgatgaaaccccatctctacaaaaaatacaaaaattagcagagcatggtggtgtgcacctgtagtcctagctacatgagaggctgaagtgagaggatcacttgaacccaggaggtcaaggctgcagtgagccgtgaatgtgccagcctgggcaacagaatgagaacctgtctcaaaaacaaacaaacaaaaaaaaggtaagaaaagaaaaaagagaaaaaagcaagccaagactccagaagatatttgcaatacatatacctgacaaatgcttaataatcagaatatgttaaaaacttttacaactcaatgagacaaatttaaaaagagtgtggggaagtggacaaagtatttgaaaggacaagtcacacaaaaaatacagtaatgttcaacaccatcagtcatcaaggaaacgcaaattaaaaccataatgagatactactacatattcactacagcggctaaagtttaaaaagtgtgacaataccaagagctgatgacaccgttaagcaagtggaaattcgcgcatacacttacatatgatgcagtagctctctcctatgtcatttgccccaagacaaatgaaaacccatgtccatacaaaggcttgtctataaatgtttatagatgcttcatctataatagccccaaactggaaatgacccaaataaccttcaatagatgaataaacaaaatataaatatccatacagtgaatactactgagcaataaaaaaaaacaaattactcacatattcaacaacatgaagagttttaaaaacattacacaaagcaaaagaaaccaaatacaaaacaattacatactgtatgattctatgtacatgaaattcttgaaaaaaaaaaacccacaaactaatctacagtgtgagaaatgagatgaggggttgcctggggcttggggcaggagacacagggattaaaaagtgacaggagagaacgttctgggatgatggacatattttttattttgattatgttggttatacagttatatacatttgtcaaaatatatgaatatactgtgttatgtaaattatacctcaataaagttcaaaagattatattgacccttttgggaaagacaggtagcaaatgaagaggggatttacgtaggcaaagcactccaacattcttgtccctcaaagttatttgatttctttcttctatactagtgactttcaaaatatggtccttagtttagtagcattaccataacctacaaacttgttagaaatgcaaattctcaggcttcaactcaacctttctgaatcacaaactctaggagtggggttcagcaatctgtgtttttaaaagccctcctatgattctggtgcacacaaaagcttgagaactgatgctctactctatgtcaaggacttctggcatctccatttcacttagtgtgtgcctgtggtgaatccaattttacaaagtattaagccacatccagctccttgaaatatttgagtctagaattatcttacataaggacattatacaatattctaaaagcacattcaaaatctattccttcattaagtggtgttgagtcaaaaaaaaaaagtctattccatcacacacctgaatttcttttttttaatttctgtatccagcaaaactaagcttcataaatgaaggagaaatagtcttttcctgacaagcaaatgctgagggaatttgccactaccaaatcagcactacaaggaatgctaaaggagttctaaatcttgaaacaaaacttggtatgtaccaaaatggaacctgctgaaagcatcacagggtctataaagcagtaacacagtgaaaaaaacaaagtatctatgtaacaactaatatgataaatagaatagtacctcacatcccaatattaacattgaatgtaaatggcctaaatgctccacttaaaagatacacagtgggatttccagccagatggctgaataggaacagctccagtctgcagctcccagtgggatcaacagagaagataggtgatttct

SEQ ID NO: 96505 - DNA, 20434 bp, Homo sapiens
aatggcagtttgttggggcagtcaggcggggttgcctagggatgtggaggggacccgttgccttggagaagtagactggttgagggtatgtggcaggacagttggtcacatgctgtctggcctcctcacagcaaacttgagctgggttggaatggggcaggacctgtcgggagggacacagatgagcaatggatttggaagggacagaatttctgggcggaagcccgcaggtgggcccaaagggcacctggcctgagctccatcctgtgctcagggggtagacgagggccccaatgggctgaagctcatctcggaagtgattggggagcgcctcggcatccccatgagtgtgctgatgggggccaacattgccagcgaggtggctgatgagaagttctgtgagacaaccattggtgagagccccctggcacctgcatacacagtgcatctagttgcatcccctccccaaactgccccaaccccacttagccatctctttcccataaggcagagaaaggaaaatacaagcatcagaggtgaaggaggctgggacacccccagggaaggggcttcagggcctgcttagggaaacacagtgatgagccctccctcagagttggtgcagtggcacacctgtggtcccagctacttaagaggctgaggtgggaggatcgcttaagcccaggagtttgagtccagcctgggcaacagagagagactcccatctctataaaataaatattttttaaaaagagtccttccctcaaagccttgccccctcctcactttaggctgcaaggacccggcccagggacaactcctgaaagagctgatgcagacaccaaacttccgtatcacagtggtgcaagaggtggacacagtagagatctgtggagccttaaaggtgagaggggcacagaggcagctatggggtgaggagaaggccccaaaggaggtctggctgagctctgcaaggctgcaggtactccaggctctcactattgagcagtggttcccctttcctaccatgtcccatgcatataggaggagctgcagaagcaaggccagggccattcaggccggctgattattcatcatcagaccgtggacccccttgctcctgtcccattttagccccgtgtgggactccccaccctctggctccaggaggtggtccagggggacaaggagatgcccaggctaatgggagacaaaacatccttgacacccagacagactaatggccagaactatggatcctggacagctgttgacttgagggctgtacaatggaatggtcatagatgggaagatcaactagagagaagagtggttttcagaaaatgtcctcgaggagggagtatggggcagggcttaagaaagggggtgcagcaaggggggaaaccaagaggcggaagtaggcttctaaaaggccacacactatacctctcttctgcagtgggtgtcacggctgatgaaatgagtatgagggggctccacatggggcctataggagggggtcttttctcacctatgacctccactccttcaagaatgtagtggccgtgggggctggcttctgtgatggcctgggctttggcgacaacaccaaggcggcagtgatccggctgggactcatggagatgatagccttcgccaagctcttctgcagtggccctgtgtcctctgccaccttcttggagagctgtggtgttgctgacctgatcactacctgctatggagggcggaaccggaaagtggctgaggcctttgcgcgtacaggaaaggtgggccccgggagaagggagaacagaggggcggctctgtaggcatccaggtagaggtgcttggcgggaggcatctctggagcacaaacattaagactgttgtgcacatccccatccctcttttcctcccaagaccccactcccatctgagctccagtctctccaccccctactgacaacccttctctcccatttccatccactcatcctgttttctgcacagtccattgagcagctggagaaagagttgctgaatgggcagaaactgcaggggcccgagacagcccgggagctatacagcatcctccagcacaagggcctggtagacaagtaagtattggccacagccccactgattaagggagccacagccagaagtgctcgccctgttcatcatcttcctaaacctgccacaaatctgtgaagtggacagaaaggggagtattaccttacatttcagacagagtccagagcttgcagagtctggcatgcccattgtccgccagctagttcatggtctttgaactccttccagtctagtgctcttcacactacattacctggatccctttgtgcccctccttccttgtcctctgctctggggttggagctctggggcagcaggaataagctcatcccacttctgtccatcacccctagtttgagtctcttccccaaggccaacccatctgttccctgaatcctgttctgggtgctgaggtgtaaggagaaggatgggcttcaaggtgctcgttttcagaaagacagcgggggtgattgggctgatcagagcagagctgtgctggtctgagaaagactcctagaagaagacagtatgaaacaggttcagaatatccactcatgactggtcagggtaaagcttggaaaagggagcagctgggcaaaaggacagtaagaaggaaatgagtatttattaagcactttcacatcatacctaattacatcttcacatacacaatcattcctttgttatattggccccattttacagttggtgacactgaggctcagagaggttaagtgggttgctcaaggctgggtgtggtgtctcacacctgtaatcccagcactttgggaggccaaggtgggtggatcacgaggtcaggagtttgagctcagcctgaccaacatggtgaaaccccatctctactaaaaatacaaaaattagtcaggcatggtggtgtgtgcctgtaatcccagctactcaggaggctgatgcaggagaatcgcttgaacctgggaggcggaggttgcagtgagccaagattgcaccactgcgctccagcctaggcgacagagcgagagtctgtctcaaaaaaaaaaaaaaaaaaaaaaaaagtgggttgcccagttggcacagaaaatccaagccagagaatcatgcaggccagttcaacatggtagggagcagggcaattagcaatctgaccttaaacctagggctagggagttcacattctcagaaggtagaaactcacggccatccttcctgagctccaaggtgggagggcaagggacaggagggttaggcagtgagtgggggtgggggtagagtggaccaggagtgggaggctaagctgagcctttccctctccaatctaggtttcccttgttcatggctgtgtacaaggtgtgctacgagggccagccagtgggtgaattcattcactgcctgcagaatcatccagaacatatgtgagtggggccagggcccaggccaggccgcttttttaccccagtggagaccagcagaagcctggggtacctagtcaccaggatctccaggactcccagggagcagagtcttctcatcttttcactggaggacaggaggctatggggcccagctacgcacctggagatcctgaactgtcaagccactggcagcctcatgccaccacatttgccagaaatgcagttgccctgtccctctccagatgtggggctttctccatatcctctgggaggggtggaatcaagccccagtgctgcctgcttggtggcgggggtgatgtatgtggagaagggttgggggagaggccggtagggcaggggctgctagtggctgtctcacatacaccagtaatcctgttaaagggctgaagaagtatcttagccacaggagcgatgaggcaaggattgtcagggaggggtctgggcttctgagctgatgcaggccccaaggacccctttgctgacctctgccaggacccacacagcttcgatggatctcagtgtttgttaacaaaatacaaagatctcaaacaaaccccttttagcttctcctagcaacatctgtgtcctcagaaacctctggttctcccccttccccctcccccaggctgccctggcacccaaattgctgccatgctggcatctgtagctcggtggcttgacattctccccagggacttcccggttcctagttctttgccagctcctccccactctgtgcgacctttccaagccttccctcaccctccccgccagcaccctctttggggagcaggaacttaatctgctgacagagctacacctttcataacaggctcagatcactcagctccctgtgacctttgtattcacccaggcttccttctcagtagctctagctgggggaggtgtcagctgggcccctcctgtgctatctccccagaggacatccctgactccacccctttcttcctcccaaactctgcacctcttcctcagctgctccagaccggccagggtaaccagctaaccatgcctggcatctggaagccagcaggccagagggtggcccaaaggctgatgaacggtagggaagggtgagcagattcctatgttggtgggcaccaatattccaagggcagctctctttgctgaatgagggccttctcgtgaggtactgacaacaccagcaactcgagagctgggaaactcaaggaggaggaagaaaatcaaaaccaccctactccctggggtgaggaaagaacaggaggggaggaggaggagtgtgctctgcacttgccttgctccaggatggggtggcagcagaggaatgtcacaggtcagcagcctaggcctccagctataaatagtccggagggcccgagaggctcccgcccgtccagcagggctgtcagcttcctgtgtggcagcacctggcacactggctctggccagcattatgctaaaaccctgttactctccaatgaaccagggaggcgggctcctctctgcgcctatcccttgagaattctgtcttaccagtgaagggtggggctgcccagatcaggcagcaggagtgaggggcacagtcaccccaggccttgctgagcccaggtctgggtactgagtgtccagagctgcctccccaggaggttaaggtgggggcaaaggggaagcttcaagcactttgcctacttttgttcactccccagtgcactgtgactcaggccttcccatcaggcctatttgtctacccaataaagcgtgttttttccagaaacaagaagagttgggagagggagcttcagtgcatgtggcagtgcgtgtgctggcgcgtatcattgcacgtatgttttccctcttaccgtaggaaaaatgaaaaaagaaatccctcctccataatcgcagctactccaggggtcagcggcggtgcccactcagtccccatccctctctctcccctcccgccagcgccccctcccgccctcgccgcaagctggccccggccttgccggcccttcttaggggctttatcatgcctcctgcaagaatagagatcacacacgggacggaaacgttagactctcatcccttgtgcccattccttggtcacgggccaagctgccgcatccttagcggtccaggcatcgcggtgcccctcgggcccctacctggactaggcccacagccgggctctagggggcgcgcgatccacctccagaaggccggctgcgaaaatctacccagctactggcgacgtcaccgcaccgtaggctgaggattggctgactctgatttagcatcctaaaacttccggttccagagcttggctcgccaaagaccctccctcgagggagagaaaccacagcccccagaattcagcgggcctctccgagagcacggcgcgtctgaggatgcgtagtaaggataacgggcccggaagccggaagttcaaagccggcctccagccagagtgacggcctgcgcggactcccgccttagtgggcggagttgtgccgcgtctgatgcgcagttccctttatagcgcggcaagccgaatcctagaggctaacccggcaggtgggagggagaaagttgctttctgcaccaatagctgaggcgttcagggttgtccagggacgctaccctcacrtgtctggttccgagtgctgcgttcggctgtgctgggaagttgcgtagacagtggcctcgagaccctgcctgcctgaggaggcctcggttggatgcgaaggagctgcagcatccaggtacgctgccggctagggccgagcaggggctgccagtcccactgcctgcgcgcccacctgggccagtctccgcttgccgcgtcctcccatcccctagtctgcaggcctggtgcccttgaattcacccgcttctgttgcgttgcggaccgcgagctgcactgcttcctgcccaagcccaagctcctcgcagcagtaggtcagtcttgctagagctcagcgctaatcctgtcaaacctcgactcctgcctggcgtctcgaccctccacgctccaactctgcctcttccttgctctatagacctctgcgtcctgataagtggctctccggggcacccttcgtgcatatcggctatccagctccacctcttgaccgctttcacttcctggaatgctctcactgctcctcttctccaggccatccttctaaaaagacagttccactcccaccccgattcccacccctacacctttctgctaagttttctcaagcccccaccctgtctttgagctgttgtctctgaactctcacagtgcctctccatgagaccataagctcctgtatgacagaagccatgttctttttagcggcctccgtagcatgatgtacgttatgttatgttatgttatgttatgttatgttattttgagacagggtcttgctttgtcgctcaggctgcaggtgtgcgccaccacgcccgggtaatttttaaaaaaaggttttttttttgttgttgttgttgttgtttttaaatagagaaaaggtctccctatgttgcccaacctggtctccaactcctgagctcaagccatcctcccgcctcggcctcccaaagtgttgggattaccggcgtgagccaccgtacccggccgatgtactactctctaagtgccaaacaaaaagtagataaaagatgatggataccttaaaagccctgagttgaccactatgcagtgtatgcatgtaacaaaatcgcacttctacccatacgtttacgcaattttttttttttttttttgagacggagtcttgctctgtcgcccaggctggggtcccgtggcgggatctcggctcactacaagctccgccttctgggttcatgccattctcctgcctcagcctccagagtagctgggactacaggtgcccgccaccacgcccggctaattttttgtgtttttagtagagatggggtttcactgtgttagccaggatggtctcgatatcctgacctcgtgatccacccgcctcggcctcccaaagtgctgggattacaggcgtgagccactgtacccggccgttattttatttatttatttatttgtttgttattttatttatttttttgagacggagtctcgccctgtcgcccaggctggagtacagtggcgcgatctcggctcactgcaacctccgcctcccgggttcaaatgattctcctgtctcagcctcctgagtagctgggattacaggcatgtgccaccatgcctggctaatttttgtatttttagtcaagacagggttttatcatattggccaagatggtctcgaactcctgacctcaggttatcagcccacttctgcctcccaaagtactgagattacaggtggctcacgcccagccttttttttttctttattatcattattattattatttttagagacacagtcttgctctgcaagtgcagggccgtgatcacagctcactgcagccccaaactcgttggctcaggcaagcctcccacccaaacctccctagtagctgggactgcaggtgcatgtcaccacacccagctatggttctcaatttttattctagcctaacacactggaaagatacagtacacctccatcagtggcagtgacttgattcagcagtggttttcaaccaggaagggggatgtagttaaatgaaaaaaaaaaaaaaaaaaacaggtgtttctggaatttttttttttttgaggggtggagtttcactcgttgcccaggctggagtgcagtggcgcgatctcagctcaccacaacctccgcctcctggattcaagcgattctcctgcctcagcctcctgagtagctgggattacaggcatgtgccaccccacgcctggctaatttttgtacttttagtagaggtggggtttttccgtgttggtcaggctggtctcgagctcccaacctcaggtgatccgccctcctcggcttcccaaagtgctgggactacaggagtgagccactgcgccgggccttggaatttcctacctgccttttctccttaattgttgccttctttgaactgttgctcccttggcctctctctttctggtcttatcctctcctttggttttgcttattacctccatatgtatctgaaacatagcttcccttctaagctgtatctatctaaatttgtatttccatctgcctgatagacatcatcacatgaatgttgtgttgagtatcttaattttttttttttttttttttttttttttgagatggagtctcactctgtcgccaggctggagtacagtggctgcaacttccgcctcctgggttcaagcaattctcctgcgtcagcctccagagtagttccgactacaggcaggcgccaccatgcccagctaatttttgtagttttagtagagatggggtttcaccatgttggccaggatggtctcaatctctggaccttgtgatctgcccaccttgacctcccaaagtgctgggattacaggcgtgagccaccgtgcccggccggtttttttttttttttttaaatagagatggggtctcgctgtgttgcctaggcgtagtcttgaactcctgggctcaagcgattctcctgcctcagcctcccaaagtgctgggattaccagtgtgagccaccatgcctggctgagcatcttaatttttttttttttttgagacggagtctggttttgttgcccaggctggagtgcagtggcgcgatctctgctcactgcgagctccgcctcccgggttcatgccattctcctgcctcagcctcctgagtagctgggactacaggcacccgccaccatgcccggctaatttttttgtatttttactagagacggggtttcaccgtgttagccaggatggtctcgatctcctgacctcgtgatccacccgccttggcctcccaaagtgctgggattacaggcttgagccaccgcgcccggccgagcatcttcattttaacgtgttcaagcccagctcatgatcctcctttttttttttttgagacagggtctccctgtcacccaggctgcagtgtaatggcatgatctcggcccactgcacctctacctcctgggctcaagcgatcctccaacctcagcctcttgagtagctgggactacaggtgcatgccactacgccccactaatttttgtattttttgtagagacagggtttcaccatgttgcccaggctggtctcaaactcgtgggctcaacgatccgtctgtctttgcctcccaaagtgctggcattacaggtgtgagccactgcaccggccacgtgatcttcttgatggacactgtcaccaccctgtatatacagtgatacatacctcttctcttgtttcttatttctgttaacagtatcccagtctacaaagtttcctaacttggaggtattaatattttcagctttgccctaattcgctccattgataaatccttttctacttccaaagtatcttctgcatctgttctttccacttctactgctaccactgctttagctcagaatctgaagagtttttttttttttttttgagacagagtcttgctctgtcccccatgctggagtgccgtggcgctctcttggctcactgcaacctctgcctcccaggttcaagtgattctcttgcctcagcctcctgagtagctggggctacaggcatccgccaccacgcctggctaatttttgtatttttagtagagacagggttttgccatgttggccaggctggtctcgaactcctgacctcaggtgatctgcccgactcagcctcccaaactgttgggattataggcgtgagccactgcgcccggcctgaagagtttttgctaattggatattagggaaaaccacaggatggattaagacaagagagggaaggtaaggttctagacagcaggattatgtctgttagttggttttatgtcacttttctagccaagctgtaccatcctgtttttgttggttggtgaatgcttccagctcttttcctccagcccttggaagaggtggtcctataattgttaagcatctagctagggtgatgagtaggaatagcaataagtgacagggaagttgaaggctgcagggctctttgcaggcggcttagcgttcagctccatgggtgtgtgttttgttcactattgcatgcacagcttggggccatttcaaacctcagatttcaaacctgaacacaatcctttctcatcttgaacttgtgtcacttagtattcttcctctgaccttacttaatatcactttccatagtgggattatatttcaaagaagctgtgtctcagctcagcttggggtccacactcaagacctgcctcaaaggcaatgttcagcccttagggtttactctgagaagtatttacatgtctgtacccatgtctgacccctctaaaccagcgaatcctgagctttactttcaatttttttttgttttttgagacagggtctcactctgtcacccaagctgtagtgcagtggtacgatctcagctcactgtagcctcaacctcctgggctcaagcaatcctcccacctcagcctcctgagtagctgggactacagccatatgccaccatgcgtggctaatttaaaaaaaaattttttttgtggggacagggtctcactatgttgcccaggctggtctcaaactcctggcctcaagtgatcctcctgactcggcctcccaaagcatgggattacaagtgtgagccaccatgccctgcctaggttcttgactttgttgtttgtgtgtatgctttggtgtgtgtgtgtgcgtggccatggtaaggggcgggattttaagtgtctctgcctacagtgctgagagccattaagtggagagcaagctgccaaaaactaaaaatagggccctcttaggcctcactggcaggcttattgggcccagttctctcaaggctcctcaggactgggtccaaaggtccttgagacattcccctcttggcttccaccctggcactctttttctgtctctttttttttttttttgagacggtgtctcactctgttgcccaggttggagtgcaatgatgcgatctcggctcaactgcaacctctgcctctgggattcaagcaattctcctgtctcagcctccgagtagcagggacgcaggcatgcaccaccacgctgggctaatttttttttttttttttttgagatggagtcttgctctgtcaccaggctggagtgcagtggcacgatctcagctcactgcagcctccgcctccgggttcaagtgattctcctgcctcagcctcctgagtagctgggactacaggcgcgcactgccatgcccagctaattttttgtatttttagtagagacagggtttcaccatgttggccaggatggtctcgatctcttgacctcgtgatccacctgcctcagcctcccagagtgctgggattacaggcgtgagccaccatacctggcaccccccctttttttttttttgagatggagtctcactccccgtcatccaggctggaatgcactggcgcaatctcacctcgctgcaacctccgcctcccaggttcaagcagttctcctgccttagcctctcgagtagctgggattacaggcatgcgccaccacgcccagctactttttgtatttttagtagagacagggtttcaccatgtttgccaggctggtctcgaactcctgacctcaggtgatccaccctcctcggccttccaaagtgctgagattacaggcgtgagccactgcatccggtcccaccttggcattctgaacacagtcttgcctttcactgcagtttctgtcagtcttcgtgcagcttgcacataccccaaccccgtccttgatggacatcatgctctggttgttgtttctttaaaaataaatatgtatttttggccaggcgcggtggctcacgccgtaatcccagcactttgggaggccaaggcgagtggatcacaaggtgaggagatcaaaaccatcctggctaacacggtgaaaccccatctctactaaaaatacaaaaaattagctgggtgtggtggcgggcgcctgtagtcccagctactcgggaggctgaggcaggagaatggcatgaacctgggaggtggaggttgcagtgagccgagatcgtgccactgcactccagcctgggggacagagtgagactccgtctcaaaaaatatatctatatatctatatatgtattttttattttattttattgaggtagtcttcctgacttttaagaaacctatctcgctaatttcagtcagtcttttaatttcagttccctcaacagagtagcacctaggaacacattcatagtcccaaattgagggacattttgttccagatgagggattctctactaaactttctcttgtttcctagcttggaatatccagggaacagttaaattagaagtaatttatctcatgcaaatatgagttaacaatttgctggggacccagtaagtttctttttagcctgtgggataggttcttagtgttgggtttagaacgtagaattaatactgtagaaggttaagtataattgaaataatataaaagtacttttgacactatttcagttatattatggcttaaacaagctttagtgttgacttggaaacctaaccaccatgaataagatcgtttttatggggaaacaaattggatattgcctgaaaggttcccatttgatcttcctagagagaataattcactgcaaatgtttcatttctgctacctccattagttccctcctagctagaaaaactgatgcttgcttaatgttaccagttagagcagccctggctggtgcagtggctcatgcctgtacacaatcccagcactttgggaggccaaggtgggaggatcacttgagcccaggagttcaagagcagccctggcaacatacatagcaagaccctgtctctacaaaagtagaaaaactgggcggtgtggtggtacacacctgtagcgtcagctacttgggaggctgaggtgggagggtggacttcagcccaggaggttgaagctgcaatgagtcatactcacaccactgcactccagcctgggcaacagagtgagaacctgtctcaaaacaaaacaaaccccagcagtccaggctggtccatgccaktcacttctgtccacaggcatggaaggccaaatgttggctttgatgacattcagagacacctggttccaggcttgtttctgtatcttgtaggcacattttatttgcccttttgaatcatagagttcctaaatgrtatcttccagtatccctatgagactttacctagayataggggccattcagtatagagtgcagacagaccaagcaggatgcagaagttatggaatggcgttaaacagggagatgggctgggcagatgaggccttatcctcaggtctaaattcaatctgtctttgtaggggacaagatgccaactggcaagcagctagctgacattggctataagaccttctctacctccatgatgcttctcactgtgtatggggggtacctctgcagtgtccgagtctaccactatttccagtggcgcagggcccagcgccaggccgcagaagaacagaagacctcaggaatcatgtagaactggggggctttttctcctgagcagagaggcccaaggcatgctgtggagagacttcaccygccaccatttccaggtcaacaggactagagygttgatggttttcaaaccctgttggaagaaagtgcccatggtttctctggttctgccagtttgacagtttatggaggcttttgaatcgtaatagcaatgtgagggtgaggtacacctacagacattaaataatttgctgtgtctgtgtcttggtgttttttgtttacccaaatagcatatggaccacaaaaggggagccttgactaccagttttctgggtatagactggattaccatatcttgagctcttagcacccatgaagtgggtgatatacagctccaggagtagtatctgccctcatgatcttagaggaaaggttgtcccaggatttatataaatcccctgaaataattctgtaaggagcttttctctgggtagagcccattcctgagctgattactggatctaggtatctggttactctggccagcatggccacatgtgcagctctgcatcaaggagggtagaggcccttgtttgacagccgtaatcaaactgcatgcagcagaggaggatagttcgcaagaggaagggctgttgggcagcgtgtggtaaagcagttcacctccttaagctcagtgggtgtagtagagcataaggatagattcactgtgctactgcacgggaaacctacctggaggttttattgcagagatgtgaagaggatttgaaagaaaacaaagtgctttcaagacctcattaggaagtgagagatccttgccaccattccattttgagctttgaggctcagctggttcacctcattcttgatgattgcccagaatatcagcctctctggacacctgtcctctcccatacactcatgtgcagactgcgctgacctttgcccctgctcataaacctcttccatgattttaaaacaccaactttcggctgggcacggtggctcacacctataatcccagcactttgggaggctcaagcaggaggatcccatgagcccaggagtttgagaccagcctgggcaacatggttgaaaccctgtctctacaaaaaaatttgaaaagttagccaggcatggtggtgcatacctgtagtccggctggaggatcgcttgagcccaggaggctgaggctgcagtgagctctgattgtgccactgcagtctagcctgggtgacagagaccctgccagccaaaatccatccatccatatatacataccaactttcctatatcctcaacccctgtactcccatctttgtgtcagcctaggcattcctgcctgctctgctttcccacagtagggtcataattctcccagatcctcagtgccactttcgaatattactttccctacccaagcatcagattagtcctttttgacaaactttcttatattctcatttctaccattctagaccttggagacttcaggtctcttgattccatttttccccaatctgtcagccccctttgcctgcactgcttccttgtccagcatatgcccatagatgatcccctgaacaactcaccacacctgcagtctctgccttcatctgtcttgttaccaagcctggaccttgctcctttaattaccctttctaactcaccctcttctttcgagtatgtaaacttgcttaaggccctctatcccacaccaaaacagctattcaaggtttgttttttgttgttgttgttttttgtttgtttagatggagtctcgctctttcgcctaggttggagtgcagtggcgtgatctcggctcactgcagcctccacctcccaggttcaagcaatcctcccacttcagcctcatgagtagctgggactacaggcgcatgccactgtgcctggctaatttttgtatttttagtagtgacagggtttcaccatgttgtccaggctggtcttgaactcctgacttcaagtggtcctcccgcttcggcctcccaaaatgatgggattacaggcatgagccactgtacctggtccctggggtagtcttgtacaacaaattgtcctaagtcctgcacaactatcagatgtcctagatatttggtaggtgaaaaaagtttatataataattagctgagcatataacctaactcccttttacataaaaacaaagtattttttgtacagttctgcaggcatgcaactaaatagaggcaagactgtacagtagtttgttcaccatttcagaaaatcgtgccattaatggctgagctggctcctggtgtttgagtctctgatacaacagaatatagatcagtctgcacaggatagtagagtgttttaaggccaggcacagtggcttacgcctgtaatcccaacactttggaaggatgaggtggaggattgcctgagcctaggagttagaggttactgtgagccatgattgcacgactgcactccagcctggcaacagagtgagaccctgtcttttttttctttttttgagacagtcttcctctgttacctaggttgcagtgcagtggcgcagtctcggctcactgcacccttctgcctcccgggttcaagcggttctcctgcctcagcttcccaagtagctgggactatgtgtgtgcgccaccacacctggctaatttttgtatttttagtagagatggggtttcaccatgttgaccaggctggttaactcgaactcctggcctcaagtgattcacccgctttggcttcccaaagtgctgggattatagatgtgagccacggtgcctggccaagaccctgtctcaattaaaaaaaaaaaaaaaaagggtagggggtgtgttgtaaatacagaaagtagcccaaaggctgggtaccatggtacatgactgtaatcccagctacttgagagtctgagatgggataatcacttgatcccacccaggagtgtgaatcaggcctgggcatcataatgagactatttagtctccaaaaaagaaaaacaaaaacccaaaaaactcaaaaggtattgggctgtatagatgagaaccactggctacagggtcaaggtcagtgcagtgtcttggtttgggtggctaaagcaaattaccatagatggtaatagcaatttatttctcatagttctagaggctgggaaatccaggatcaagttgccagcagatccagtgcatcatgaggacacacctcctggtttgcagatggtcgtcttgctgtgtcctcacatggcagaaagaggaagcaagctctccttgtttgttttataagggcactaatcccatcacgagaggtccatcctcagaacctaatgaccccctaaagagcccacctaatgctgtcccactgggggttagggttttgacattggaattttgaggaggacacaaacatgcagtccataacacattccctctcatgatatgcaagacctctttttttttttttttgaggtagggtctcctctccgttgcccaggcgggagggcagtggcatgatcatagctcactgcagcctcaacctcctgggctcaagtgatcctgccgcctcaccctcctgagtagctgggctacaggcacataccaccacacctggctacttttattatttttgtagagatggagtctcactgttgcccaggctggtctcaaactctttgcctcaagcaatcctcccaccttggcctcttaaaatgctgggattataggcatgagccaccacacctggctatgatggttaattttatatgtcaacctgactgggtcatagggtaaccacatatttggtcttactctgggtgtatctatcaggatatttctgggcctcattcaacccattgaaggcctgtacagaacaggaaggctgattaagagagaatctctgtctttgaggtggaaaatcagtcttctgccttgtgacgtggactcagactggaactcataccgtcagctctcttggttttcaggcctttggaattggcctggaactataccattggctcttctgggtcctcagcttatcacctgcagatcttgggacttctcagcctccagaaccatagaagccaattccatatagtaaagctctgtctctcatctatatatcttatcggttctgtttctctggagaacagactaatgcatccatattgacaggaaaatagttcattcattgtaattgctgtatactatgccactgaatgagcatatcaatttgttccattaccctagtgaagcattattgggttgttcccacttttcccctcttataaatcaatagcaatgcagtgagtattttgtatgtttacttgggcctatgtgttagtttctccaaaggaggaaatatcactggtatttagctttaccagttgttaagttgcttttccgaagtggttatgtgaatttcactttcaccagcatttccctattctgttggtgttgagtggttctattaattttaatttacatatcattgatatctgataaggttgaggacttttttttattgatttattggccattagtatgtttaccctctgggattttcctatttatatccttccctcacccccacttttttttttcgagatggagtcttgctctgtcgcccatgctggggtgcagtggtgcgatctcagctcactgcaacctctacctcccgggttcaagcaattctctctcagcctcccgagtagctgggactacaggcacatgccaccgtgccaggctaatttttgtatttttagtagagacagggtttcaccatgttggtcaggctggcctcaaactcctgacctgaggtgatccacccacctcagcctcccaaagtgctgggattacaggcatgagccactgtgcctggccccacttctctttctattgagttgtcttctttgaaaaaacagtttgtaggcagtactttatatattctggataatagtattttattagttacatgggttgcaggtttgactgaaatcatcttttggagtttttatagggtgagggtggctgtagagttccatgttgcctgcatcatatgtctctccagagcaaacctgtggacagtggatctgagaccactttttagaaccttcttggctggggatttggtgggagtggtggttttccagaccatacaggaagagcactcattattcacatgagaaatgttctaaaattgacataaggggcaggcccaggattcagaattttcaacaatctcctgatctcacaagcctaggcattcagacttccttgcttcttcctttcaccacctgggtggggtttttttatggtttcccctctttcactaaggctgttgctctttcagggtcccagctttaactgggggtttcagtttcctgcctggagccagtcttgtctttagttgtcagtattaaaacaagtccttaaggtacgtttcccttatcccctcagtaattgcatcggctattttcctgtctgctccagttttcagttcctttgtctttagtctttcttggaagctctgctatgcatttttaaaaaacagcttagaaaatacttcacctatcatttctagatatttgtctcagtttattttagtctgcattaagctagaactgatacctttcatatactctcatgtctcttctaaacataatacccttcccttccattgcttttttgcctggcaaaactccacctaactctaatggcccagctttactctcaagttttcctccaccttgccaagaataatttagaatagttcttatcacattgcattttatttcccccttactggagtatgagcactttgaggatagaaaccagatcttgttcatctttgtgtctgtagctcctgctatagtgcctatcataaagtaggtacttaatgactatgttactgaactgaaaatattttcctgcatgaatactggatttttttttttttttttgaaatggagtctcgctcttgctctgttgcccaggctggagtgcaatggcgtgatctcagcttactgcaacctccatctcccagctccaagcaattctcctgcctcagcctcctgagtagctgggattacaggcacgcaccaccacacccagctaatttttgtatttttagtagagacggggtttcatcatattggttagtctggtctcgaactcctgacctcatgacctacctgcctcagcctcccaaagtgctgggattacaggcatgagccacc

SEQ ID NO: 96506 - DNA, 13581 bp, Homo sapiens
tatctatagaagagttcgttggtccatatataagaattcatttaataaacagattttaagtcttttactactcagcacaaggcttttagcatagcagaggctcagtaatgtttgatgaaccaaattgaatttctgcaaggatattcccataaaatccaaggaggtaatacaaattctagaatcacagtattataaggggtgcattgaataaattaagtttctaagcattttgtgatgaagattcaagtagaggatggagggaacaagagatagattattataagcttcatgacatcagcagttactatctctggacacagccgtagcaatgtgccttcaactctaaagggtgtcaaatgaggcaggaagtcatcatcaatatcccttcccattgataacataggataaggcaataaaatctttccaaatctttttccatgactttcgctctagaagccacactggaagtattcaggggagtgcaaaggaggcagactatggacattgttagaaattattatccaagaagaaaaagaaaactgtgcctgctactctgtcattgccatttgatctggagcatatttctagactctggaatgaagtccactttgctttgagaatatcccttgaagaagattccagactcaagaatcagttccaatgtctccttcaaggtgatcctgaccagggatcaatcccaggaacctatccttttctaatttccttagtcatttcaacctcagagaagaaatggcaatgccagtactatactgtgtaagatgtcatagcatgccagaatgatgaaaatcttaccaaagttatttcccttaattcttcacttcccttatggcaaaaatgactgaattatccaaaaattctatcagtaggcttctatggcatccttagcctgattcagaagccatagacttttaatctaaaataattcaaataattcattataaaaatatataatatgctgtgtcaaaaatcacaaatttttgatttaatacaaaggctagaagctaagtagatttgaggctgttaaaatgccttcttaattcggtgatatgagagaaaacataaaaaagaggtaaattttttttaagcaataattttgaaggtcaggtacatttctgtattcataatctgaaaatacagctaaacaacctaatcattataaaaatgtttttgttgcatataacattttgctaattttggacataatggaaaacccttgtcttatgaataataaatatgtacaaaaactctatcaacatataatttgtaagctttccaacaagaagtctaatggaaattcaataaggtatatcaggagctcaccattttttttaattacacgagtctgctgcttcatttgatcatttggaacaccaaaaacttctataattactaatgaatcacctttgttagatgatgaatgagtaagaggcaactggataccactgatgagctgcacaaatatatatgaatataagaatttagcaagatattaagttacatcaccatttatttcaaaattaagttatgtattacaaaaagttgatggactctaagtcagctcccacaaacattgaaagtggaatacaatacaaattttaaaatttaagtcttttatcctcagttatcagtagataaacaccaagaatatgtacaaaattatagtgaaatccacaatgtccacaatttttgatttattaacatatttttgttttaaaatcatttgttatgatcacatttcagggaattcaggtcgagttactctgataacgtactgtttttgaattcatatatatatatatatatgctggaaaaaatttaaagcaatagaaatattactttttaaaaaatgtaccatttaactccctgtgatagcattttctgagtttcacaaaatcagttatttcatatgtatattagggactgggtatcaaaaaaatcttaacaaagtaattaataataattgtatttaaacttgtatttgccaagctaattgttgaagcaaaaatgtgttataatttaaggaacaaaatgagcacacaacaaaactatatttgaaatgtactgacttaggctaagagatagaagatataagcctaaaaacgcagttataaaaattgaggcataattccaatttctgaaggttacataaggagaaacaaatatataattaagtttgattataaaggaataaagaaaggaaaagagggaaggaaggagggagagaaggagtagaaaagaaaggaaaagaaaaaacactaatgtgtgatttttcctaattccacagattacggcattagctagaagccagtatgactatgcaactgtttagcaatcagcatggaatgggcatcagcataattagacatcaaagtaactagaaagaacaatggccataaacatatagtacactggtcccaataccactatagacccgctaaatatcactttacaggtaatagacccttcccaaaatggagtaggttcagctcggtgtacctcattccagaaagaaaaaaaaaattatctaattttgaaaaacataattgaatatgaaaactgaatgagaatttagggcaagcttgtccaacctgcgggccacatgtggcccatggtggctttgaatgcggcccaacgcaaattcataaactttcttaaaacattatgagattctttttgcattttttaaagctcatcagctatcgttagtgttagtgtattttatgtgtggcccaagataattcctcttcttccaacgtggcccagggaagccaaaatattggacacccctggtttagggagcattgatcaaataatttgtaaataaattaacaaatttgtttgtacaggagccaatgcagaggaagggatatcaaacaataagccctcagtggtcaactctgttgttacccattggccttacccataagattttggatttagaaagcagtcctgtagcttttataaatttgaaaataactggcctagaccaaaactctcagattgcaggtgacgaagagtaaagcagcaatgtcaaatgccttcatcaagaacttaagaaagcttatagtaaaacttggctctctgattcccaaatcgtgccttctactatctgagcaagtcataaagtaatcacaaagctccctagagtgatagaggcaacagagaaagacccacatggccatggcagcagcttcctggagaatcattaactctccatgccagttacacctcaacaagagactcctcagaatacaaacgtggcacttgtgagcatttgtgcacactagctgccttccaccttcactttctcaataaaagagcacatatgttctctttactattcataacaggaaaaataatgtatttgttcaatgaacctagatatattgggcatatactttgtgtaaggcacaaataaggtggaacaaaacacatctgttttttgtttgtttgtttgtttgtttgtttctttgagacgaactttggctcttgctacccaagctggagtgcaacggtgcgacctcggctcactgcaacctctgcctcctggattcaagcgattcttctgcctcagcctcccaagtagctgggattacagttggatgccaccatgcccagctaagtttttgtatgtttagtagaaacagggtttcaccatgttagccaggctggtcttgaactcttgacctcaggtaatctgcccacctcagcctcccaaagtgatgggattacagatgtgagcctccatacccagcccacatctcttatccttaaagaatcctcagacaaatggagaagacaagttacaagtaaataaacaattataaaaccttgtgataaatgccataatatatgcatgcagagggtgttacggaaaacagcaaagctatgaaaagaagcacagctaacctagcctaggaaaatgctttcaaaaagacatgattcctaagtcttgaaaactgagtcaaaatgaaataggcaggtaaggctgaaagaatgctctagtcacaggaagagcctacgcaattcgtggaggtgagtcatggttagagaaggatcctagttccacatggttgtagaacaggatgaaaggctagaagtggtgagagatagggctaggcaagtagggcaaggcctgactaagatagtagtcaagagacacaaataaatattacgtatgcatgataatattagcactgtagcaaaatctctccggtcaacttgtggagaatagatatggaggactgagacaggctacctgaaaccatcaggaagccaaagaaatagacctgatgacaggtagtaaattcctgatacaggagagcagcaaaataggtcagatcaagagaatggagaaggaaaatatttaggaatagaatcagcagaatttaacgttggtctggatgtgggatgtgaaggagatgtgaaagattagaatggttcccaattttctagtccgagcagagtggaagaatggggcaatttgttgacatttaagtaagagcagaagtagatttgattaggaagggatgttcaagttttactattttaaatttgacagaatggtgattaaggaggtaaggatgctcagtgagctaaaatatgcctttagattcccaaaatcatgtccaattaaagacttgagcattgttggtggtgaaactatgaatgtttatgtaacagaatccaaggagaatagtttgagacaaggtttaaggaaagactttagttaacataaatatcttaagggaaggcagagaaagaggaagccacaagtaaaaatgacaatcacttggaaggtagggggtaaaaggagagtccagtcccagagcatagaagagcaatgtgtgtagaaatggaagggctcttcaaagtggctgatttgccacttctttttaccagatcaactacaaaaagatgtcaacattataatagcattgtaaagtgaagtcagtagttaattctttgccagaccttgaaggagtaccaacaatccagtgttgtaggcaattgctgcctatccactaaatgcttctacatcagagtcacaaactccttaacagacaatacaaaagccagctacatacttcacaggcactgtttcctgcaatggtcaggatcattctagtcctggtcatctttgctatactttccacattaatttctggaaaacagctctcaatcctcccattctcagctgagataaagtggctaggtcctgaagtagacgtggagtgtagcttcccaaatcctgtggtattacgatggtggaaaaaggagctgagccaggaaaagtcgcaggagaagcacattctggaggccccagcatttcttgcactctaacagccaggtaatggggagcagaggagcgctcagcagctggcagagcttcactaagtaatgacattgctggccagggacagaaacataaacactacaaaattccaggtaggatctgagatggtttatacagttctaggagtaactagttaaatagaaagagggaccaatgaaaccatagccactctattgatttgcaaacaacaggtacagttatagcctaaaatagaactgctcataagtaagtggagagaaaaagcaactagaggtttttcaaaagatttaatgacattttaaaaagaaaataagcatagcacttaggttatagaggaaaaagaaaaacgttttgaaaagtctttactaatggaaacaaatcttagacaactgcttttatgctccataaggttttacaggatgtgataaaataaaagctaaaataataagacgagagtctggaggaaaggtgctaggtgggatacagacagaaataaaaaggaagcaatatgaggtcaaccgcaatggggcaggaggactaattatgcaggagaaaaaaatcatttctacattgaaatcagtaaagaacaaaatcaaatacagactttgaatcatcaacataaagaaaaaatgttaaaagctctcccaggccaaggcaagatgggtcaaagtcagagtggtggtcatggtcctggaggtggcaagaaggatgacaagytctaacaactcaaggacaagaaaaagaaatatgaacctcctgtaccaactacagtggggaaaaagaagaagaaaacaaagggaccagatgctgccagcaaactgccactggtgacacctcacactcagtgccagttaaaattactgaagttagagagaattaaagactatcttctcatggaggaagaattcattagaaatcaggaacaaatgaaaccattagaagaaaagcaagaagggaaaagatcaaaagtggatgatctgagggggaccccaatgtcagtaggaatcttggaagagatyattgatgacaatcatgccatcgtgtctacatctgtgggctcagaacactacrtcagcattctttcatttgyagacaaggatcttctggaacctggctgctcggtcaggctcaaccacaaggtgcataccatgataggggtgctgatggatgacatggatcccctggtcacagtgatgaaggtggaaaaggccccccaagagacctatgcagatactggggggttggacaaccaaattcgggaaattaaggaatctgtggagcttcctctcacccatcctgaatattatgaagagatgggtataaagcctccaagggggtcattctctgtggtccacctggcacaggtaaaaccttgttagccaaagcagtagcaaaccaaacctcagccactttcttgagagtggttggctctgaacttattcagaagtacctaggtgatgggcccaaactcggacgggaattgtttcgagttgctgaagaacgtgcaccgtccattgtgtttattgatgaaattgacgccattgggacaaaaagatatgactccaattctggtggtgagagagaaattcagcgaacaacgttggaactgctgaaccagttggatggatttgattctagggtagatgtgaaagctaycatggccacaaaccaaatagaaactttggatccagcgcttatcagaccaggccgcattggcaggaagattgagttccccctgcctgatgaaaagacgaagaagcccatctttcagattcacacaagcaggatgacgctggctgatgatgtaaccctgcacgacttgatcatggctaaagatgacctctctggtgctgacatcaaggcagtctgtacagaagctggtctgatggccttaagagaacgtagaatgaaagtaacaaatgaagacttcaaaaaatctaaagaaaatgttctttataagaaacaggaagacacccctgaggggctgtatctctagtgaactacggctgccatcaggaaaatggttgggtgatttctcagtccctgaaagggatgaggctgggggagttgcccagaggaatctctgttcccattgatttttattagcaaaacatcctgtgtcttttggagtacgatgtgtaagtgcccactgggtggcctgtctgttggtcactgtgcagcagtctgcttcccaataaagcgcgctctttcacaaacaaacaaacaaaaaagctctcccaacatgcagaggaaaagggaatatgttaaagttgacacaaattaacagacactgaagacagatactggagaaagacatatggataatttttctttttaagtaatcaaatgatattcacagacatatggggggaagaatcctgacctacaaaagcctaattgtggagactgaggaaaagaaaagggctcctaaaatttccaggtaaaattcatcaaaggcgagaaaaagtaacatgcccacaaagtaattagtgggctgaactgagacctgtatctcacaatattaaatgcctaaatacaatgaaatcatatagtagaactttgagaggagaaggttttagcctcaatatgtcaattcacaggcagataatcattcatgtaaaattacaacaggaagacatttttcagatatagaaggatgctggaatactacccacatatagtacctgaaaagattaacagaaatttaaaagaaattgaagcaaatcagtggaattcaaaatactaatgtacactatctagtttatataataaccaaaaaatgtaaaagaaaatttattaatcttacccttattgtaagtgtaattggcataccctcttttatgttacttgggttaaagtatgatttactctctcttaagaaatgtggtttcaaaatatatccagaaccaccattatccaaaaatttcccattttgcagatccatgggcagaccaggggtctggaaatttaaagccactgtaagaaagaagtattttgacattgtcaggtaatagagaatacaaataaaggaacacaaaccacttactgaaatctaataatggattctatgtccccaaatgttctatgagcaagtatcattagcctaataattcatgatttttaaaactctttctcctgccatgtctatattaatgtatattgatgagttgcaaagtttaatctgtaagtaaattactacacagctttgagtaaagaaatcaaaatggtatccagtacagattacagaataacaatgttcatgtcaggtaacacttaagaaatgtcagaataaagagtatcagtgcattgaatgcaagaggtaaagacatcaactatgtcataaattttcaagtccatgagatgctgttgtcacttgaggagaaagtgagaaacaggcaaagcaataattgtcgttacaatatggaagtacctcagtatagcctggtaaatagccactgtagagagtaccacactccaccctccacccagccccaatatcccccctcctcacacctacaggccttgccacaatccagtagaagggtaacacctggtactttctgatgggttagtgcagtgctgtactagctgttcaatttggaataagagtctggtgagggcaaataaccaagttaggcaatcttattcacttttcaaaactatgaatgtagaagctcatgtaaagtataaatgatagaggtcacttgatttgaagaggccttgagcatacctcaagcaaaggaatttgatcttcaatgtccatttgggtttccttgttcccttcctccactacacatgtctcatattaactcctcgtgaatttaaccaccattccccaaaccatcactgagatttaccccgcttcaacccagataggaatgacttcaactcttacaacacatgacccaccattagtgcctgaccccaaagcccccgggctaaaaaatcttttacagaaagcccttttcacgagtttttcatacattcataaaatgaattcattttatgttacttctgcaaacaactcaatatcgtatataacatacccatttgacaacctatattccaaaattcttggggattaaaattagaagagtctgctcttgttgctttgggatatattctggtaatgaacttcctggtgtgaaaaataaactcatggactgaaaaagaataattaaaacattgtgaaagaattcaaataaatttaaaaagccactatatatatatatatatatatatatatatcatataattctataatagtttcaacaattttgatatgtattgtcttggcaaaaatttgcaattcatgaatatcaaaataaatccatgcctttatgtttatagtataattcactattatttagatgttagtgacaattttatcataaaatgtatgtacactgatcattcaaggaaaaaattgattagataatttatatattttttacacccaaattatttcactttgttgtaagaatacataaaactccaaaatataatccattcatttttcaaaacaaaagcagcattttcccttattatttttccactttgattttcacagtagggcagaatcatatggaagtcacacaaagctatacgattccagctaaattaatcctactgaacatttcacaggttctcagggttgaaaggcaccccaaagttgtccagttcgacttccaatcccttcactccagcatcttcccccaaagtttattcaatctgtgtttacatgtctccattgaaaaactttcaatgcttttaattatttcaaatgtcgttcttactgggataatctctacgtatttgtagtatacacacaaacaggaacaaacatacacacacagtctattttagtttctgtacatattctttgtgtttcttcttgtctatataatatttaagtcacttgagattcaaactaacttaaaccctttaccatttggcaccttcttcaaatttttgaacacaaatttcatgcttctccaaggattttcttttttcattaaacagatcctgtttctgcaaccattcctgctgatatagtgactcatcatgggagaatggttactgcttatggctcacttcatttgctaaaccaactagaatagaatcacctctcccttcatcctaaatactattatttaggaagcattgtcaaattaaaaattacagttaattttatcaatatttattttcaaaagttacacattccttgagagaaagtttattttgaaaccatgtgtgtataaatacagcataggtgtccaagtatcatgctcccttatctagtcctaacagatgtctgtccttaggcaaaacacatactcttctgagtcttaatgtttctcatttacaaagtaataaatgtgaatgatgactaaggtctcataacataatatgattttgttatttctgagattaacctttagaaaataaacatgtttgttattacaaatacagttcatgtttactgtaaaataggaggacatcaaagaacaaatcaaaccatatgtcatcattcaactgataaccactgataactccttcacatatatcttcccattcttttgtatgtgtataatttttagttgaatgataatgtttgttccctttcacaaaccgttatctttatttactataataatgtgaacatcatttcatttcaataatattcatctacaacattattttttaatgattttcattatgtttataataataattggcatccttgaagttaaacctttgcagacatcattgattatttactataacttttggtgcaagaaaaatgctctatgccccttcaaagaaatggtaatgttatactttgactctactcagaactatctaattcctttccaaaatttttgcaagtatttaatatgatgagagtaatacaattataattaatttatgctgtgcctacaggtcctgtcctcatgaacaacatgaggacctgtcctcatgaacaacatgaaggaacagagaccagtaaagcatgtcattcaaactctcttaaccacaccttacagcaagaaatacattttacaatccaactcacatgcacgatgcacaattgcttcataaaaccatatttattattactgcttgcaatacacttttcttctattctattctattctattctattctattctattctattctactccattccattccattccatcccattccattctactctatactactctattctattctattatttaactgtagtccagacctactgaattgatttttggttacaacacacaggttaaaaaaggaaaagagcctttaaaaaatccaggatctctctaatagatagttagagaatatgaactaaagtatacttcaaaatctttgggtatctatgaccagcccaataaggttaatcattaaagctttcagaatccgcattcccaaacagccagcagcttttctcaagtcaattgcaggtgctgattttccttctgtggtatttctacacaagatggtagattgcatttttttaacttttaatttttgtgggtacatagataaatatatttatggagtacacgagatattttgacaaagatatacaatgtctagtaacacatcaggataagtggtgtatccatcaccccaagcatttatcctttgtgtaacaaacaatccaattatactcttttagttatttttaaatgtacaataaactattgttgactgtagtcacctgttgcactatcaaatactatgtcttattcattctaactatagttttgtatccattattgtccttacttcccccatacccctgctactaaaaaaaactgccattttttgaggattagcagagtcacctggctcttaagttagttgctcattcccttttaagtttgggacattccccacataatgagtcttctttctattctctttctcaggccccgttttaccttgggcactgccaaacagaataaccacctcagttttagaattagaggcagtgaaaggaagatgcagagacagatggcacctctacaggtgtgcagtggggcatgcacactctgcacagccatctggtagtccagcctgggcgccatttcttccccttccttcaccataggcatagagcctccaagtctgattaaccctaccctcttcaatgcctattaaatccacaaagttcatcctgtctccactctcactgccagaaatctttattaccgccttcctgcctgcaatctcaccctttggctgctatcagaggtatcgtttagaaatagagtggatcatgccactcctgagagttcaatcttctcctgcgcaccttcgcttccaggacaaagttcaagccttctaattcggctctgcctccctctgcagccctgtcactgctctcctatacaagctgctcaccacagccccccagccctcaacaaatgtggccacatcggacattctcaatcaaaatgtcatggcttaggaaagttaattaatggctaagttccatgaaataaaacttaatgagacctgaggtatgtaaccccattctaaattatgttaaatgtgttgaaattttatgagaatatacattttataaatatcattgagcaatcttaacaccctagcagtgaatctaactcatttaaacatttcatctatttgagtcacaaaaatttacctcgcaattttgaaagttttcgggcttgtgtctccccaatagaattattttcattaaattgctgatataatcttgaatgttgaaagcttttgaatttctcagctttcgtataaatgacaagatcagataaggccagagcaatttttagcttcctggtctaaaaataaaatgcagtaattttacatttttatgctaatcattgggaaaaaaaattttttctagtaaagaaaatacactttcaaacaaatgattttcatcttttcataagattatctcctcaaacaccatttgattaactcaatatgattatttttgggaacaaaaaaatatttaatgttaagataagctagcttaaatttaaaaatcatgattaatgtaataagtattgaggaccacaattattactatttatttttttcctaaagatctcagtgtattcccatgaattttataattttaggaatttttgtcattaataaatttatattgaaatgacttctattacatagcgaacatttgccatttcacaacctgg

SEQ ID NO: 96507 - DNA, 57375 bp, Homo sapiens
ccctcccggacggggcggctggctgggcagaggggctcctcacttcccagtaggggcggctgggcagaggcgcccctcacctcccagacggggcggctggccgggcggggggctgacccccccacctccctcccggacggggtggctggcctggtgggggctgacccccacctccctcccggatggggtggctgccaggcggagacgctcctcacttcccagacggggtggctgccgggcggaggggctcctcacttctcagatggggcggctgccgggcggagggtctcctcacttctcagacggggcggccgggcagagacgctcctcacctcccacacggggtcgcggccgggtagaggcgctcctcacatcccagatggggcggcggggcagaggcgctccccacatctcagacgatgggcggccgggcagagacgctcctcacttcctagatgggatggcggccgggaagaggcgctcctcacttcctagatgggatggcggccgggcagagatgctcctcactttccagactgggcagccaggcagaggggctcctcacgtcccagatgatgggcggccaggcagagacgctcctcacttcccagatggggtggcggctgggcagaggctgcaatctcggcactttgggaggccaaggcaggcggctgggaggtggaggttgtagcgagccgagatcacgccactgcactccagcctgggcaccattgagcactgagtgaaccagactccgtctgcaaccccggcaccttgggaggccgaggctggcggatcactcacgttaggagctggagaccagcccggccaacacagcgaaaccccgtctccaccaaaaaaatacgaaaaccagtcaggtgtggcggcgtgcgcctgcaattgcaggcacttggcaggctgaggcaggagaatcaggcagggaggttgcagtgagccgagatggcagcagtacagtccagcttccgctcggcatcagagggagaccgtggaaagagagggagagggagaccgtggggagagggagggagagggagagggagagggagaggggacatttcttatatgtagatctcttggtagtgaactttgttttttttaaaaatattatttcatttttaaaacatactttaatatagaatacaatgttcacagccttttaaaaaagtttagtattcaatgttattccattatctctggcattcatcagagatggaccacagcattctgaaagacagtgcatttcaccagcactgtaactcctgaacagtaataaccaataaactattgactcatgaactaagctaggctcctccaatgataattttgtaaacatcttttgtaaagaaagctacaaatatttattattattatcatcattattatttagagatgggatctcactctgtcacactggctggagtgcagcagcgtgatcacagctcactgtggccttgaactcctgggctcaagtgatcctcctgtcttcctgagtagctgggactacagtcatgtgccatcacacctggcttatttttaaattttttgtagggacagggtcttgccatgttgcccaggctggtctcaaattcctggcctcaaacgatcctcccccaatgtcctcccaaagtgcttatagacataagccaccacacccagccatcagtatttttttgctccttagaaaataatgtataacttttcactggtggcttttaggattttctctttgtagttggttttcagccattttactctcatgttcttaaatgtggttttctttgtgtttatcctatggccccacaaatcctgacaggcttggttactgcccattgcccttaaacagttgtggtgattgcttatgttgcttaatttttactagattttatagttattctataaaatacaagctacttcatcatatacagatagaaccaggtgaaccagctttacgggtaattctagttaccctgctctggttaaaaattactgtttaggttattactttaaacaaagctatagcaatcaaaagtatgtgatattgatataaggatagaataaatataaaaggaatagaattgagagtccagaaataaacccatacatctatgatcaattgattttctctaagggtaccaaaatcattcagtggagaaagaacaatgttttcaacaactgatgctaggacaactgaatatctggaacaaaaaagataaaaatggactgtcatctcacaccacatacaaaaattaactctaatttattaaggattcaaataacagagctaaaactagaagaaaactttggtgtaaaccttcaggagtttgcattatctttatgacatcaaagaagcaacaaaataaaatataaattgaactttaccaaattcaaaatcatttatgcttcaaaggacatcaggaaagaaaaaagacaactaacaaaatgtgaaaaaatatttgcaattatctacctgataaaggtctagtatccagaatatatgaataactcttaaaactcaacaataaaaagcctgattttaaaatgggcaaaggatttgaatatacatgtatccagaaaatcactgaggagaaagtatgtatcccagaacaagtttttaatgcagacaaaagtgccctattctggaaaatagtgccaaaaaggacatttattagtagggaagagaagcaagcaccaggatttaagaagggtaagctagctctaatgttttgtgcaaatgctgttaggtttaaaatcaggactgcccttatccataaagctgctaaccctcaagccttgaagggaaaagataaactcctgctgccatcttttgattgtataacaagaagatttagaaaaccagaattctttttctagattggttccatcaatgctttgtccctgaagcaaggaagagactgccttttaaagttcttttgatattggacaatgcctctggccacccaaactctatgaattcaacaccaaaggcattgaagtggtctacttggctccaaatatgatatcagcctctacattagggggtcataagagcctttaaaggcccattacacatggtactctatggaaagaattgtcaacactgtggaagaaaaccctgacagagagaacatgaaaggcttcagtaggatgccacatcaagccccaaacaataaactcctgctggagaaagctgtgtccagatgttgtgcatgactgcacaggatttataacagagctaaacaaggagatcatgaaagagattgtggaaatggcgagaaaaaaaatggtgaagggtgaaaggtttcaagatatgactattgggagaaattcaagagttaatatacaccacaccagaggaattaactgaagatgacttgatagggatgaatgcttccaaaccagtgccagatggtaaggaagaaggcatagaagaagcaatgcaaggaaacatattgacattagacaatcgggtagaagagttccaattattcatgactgctttgacttatattatgacatggacccttcaatgatatggacactgaaactaaagcaaacagtgaaagattggtatcatagagaaacattcttagagaaatgaaaagccaataacgtcagacaagaaattatgatgtatttccataaagttaaaccaagtgtccttgcctcttctgcctcctcttccaccgcctccacctcttccatctctcccactcctgagatagcaaaccaactcctcttcctactcaacttgaagatggtgaggatgaggatgatgatccacttacacttaatgaagagtcaacatattctatctcccttatgattttattaacaatattttcttttctctagctgtgttattgtaagaaacagtattatataaatatgccgtaaagatatgtgttaatcaatcatttatgttattgataaggcttccactcaacagtagactattagtaatgaagtttcgggggagtctgaaattatacatgaatttttgacagtgtagccactcgttttccagccagtctcttgaagcaaaagtatccacttacccttggacttttggaaatgtggactttctttcgttttcattaagcaatcttttaaatccaactccatattatctagaaggtgcccctaacccccacattgttcaagagtcaattgtactaattcatgctataatataaatgaactttgaaaacacatgctatcagcatggatgcagctggaggccattatcctaagtgcattaacacagaaacagaaaaccaaatactgcatgctctcacttataagtgtgagctaaacactgggtactcatgaacagaaagatggcaacaattgaaagtggggactaccagaggaggggagggggagaaggggaaagggttgtaaaactaactattgcatactatcctcagtacctgggtgatgggatcattcatatcccaaaccttagcatcacacaatatgcccaggtaacaagcctgcacatgtaccccctgaatctaaaataaaagttgaaaaaaagagaaagaaagcatatgctgtataaaagaagttagacacaaaaaaatacaatatgattacatctatatgaaatgttcaaaataggcaaattcatacagacagaaagtagattcatggttgtcagtagctggagagaggtgggaatggagaataactgctaacaggtacagagtttctttcggagtcatgaaaatgttttggaattagaaagttgtgatggttgcacaactttctgaatatactaaaaatcactgaatggtacactttaaaagggtgaaatttatggtatattaattatgtctcaattctaaaagctacatctgattaaaaatactataaggcatccaattttagagatattaaaatgtaaaaaatgtgatacaaagacatttgtttcaccaaagcatttagaaatacgccattgataagggtatctgcatccatgaagagttctttggtaggtgttctctgcagatgtgggagtcaggaaaatatgttggtgttgaaatggtctccctaatttcaaaaagaataagacgaacctcagggacagaggccaagcagaagtctttaaatagcagggacaaaatgatgtggttaggcaacatagatagtgtggtattaagaataatacagggattgatactgcgaggatttagaaggactgattaactgaagttaggatttctataactgaaatagatgggcagtccagttgtgaacatctgaaaactccagaggcatgacttaagatgtcacaaaaactggtggtccctcatccaattccacacatgatttaattcatagatccacaagtcattgaagaaaaacctaactacctttgagaaaggaccttgcacatattaatctttttaaccttaccttgttttccccctcattatatctttgcccaattttcttcacttatttttatattatattatttatactatacatcataagtggcttgaaatcctttttaaaattagagagactaaaaattaaaaacctgaaatccagatagtcttttttttattattattatactttaagttttagggtacatgtgcacaatgtgcaggttagttacatatgtatacatgtgccatgctggtgtgctgcacccattaactcgtcatttagcattaggtatatctcctaaagctatccctcccctgtccccccaccccataacagtccccagagtgtgatgttccccttcctgtgtccatgtgttctcattgttcaattcccacctatgagtgagaatatgcggtgtttggttttttgttcttgtgatagtttactgagaatgataatttccaatttcatccatgtccctacaaaggacatgaactcatcattttttatggctgcatagtattccatggtgtctatgtgccacattttcttaatccagtctatcactgttggacctttcatttttaaatgtcatttttaaatatttattttctagccattctcttgaacaagaagtattcacttacccttggacttttggaaatgtggactttctttcattttcattaagaaatcttttaaatccacctccatattatctggaaggtcaaagtaaaaaatgctgacattaaaaacctgatactgaattggcacatgaaataaagaccgatttacaatagttagctaaaatttcactctagctcacttttctgtctcaaatgattgaaactatttcaatagaacttttaacactttttaaaaccacccagtgaatagttaataatattactagcaaacaatagctaacatttttgagttccttatatatactaggaacccttttatggtgttttacatatattaaatcatgtaatcgtcataataattctgtgatgtgcatactcttcgcatgcctatttttttttttttttttgagatggagtctcgctctgttgcccaggctggagtgcagtggcgcaatctctgctcactgcaagctccgcctcccaggttctgcatgcctatttttgaaagatgaaagcaaatggaaattaaataacttgtccaggtcacaaagtcaggaaatgttaagaggttgtattttaattgatgcagtctaaggccagaggagacaatgttattagaatacacacatacatgcacatgtacatgtacacacacacacacgcacgtgcacacacacacmtacacagtcacaagtgaagtaaggtgcaataatgtgacacagcagacaatctagggctataattatattaaggagactttgagtttaaacaaaatggcagacctgggtagcacagaaaccatcccactacaaacccctagagatgctctatgacatataacattccatggatgtgtgactgagtcatatgaaggaaataacaaaaagttaactgggaactgaggtccagaatgctaagcattgagtactaacaccaaaactatctttgggatagagatgagacccagaaatggctaggtgcttgatttaaatgttcatacagagtcagaaaaaaagattcgagcccataaaaataaggttaggaacttagatatcaaataaaactgaaatgcttaaagggtttcaatcctggttttttaaaaaagaaattaaaatactatatttattgactcaaataaacaaggaggcctaaatcttcccaattctgaaagacagtggaaaaaaaaaatctcttgtgagaaattgaaggcccagcatgcatctcatgtgggtgtgaagtctaaatttataccactctgatgatgtgagaaaactgagatcaaaacataaaaattgatctaggtgaataacaatctggggaacctggcaaaatcaataactaaactgtactggagaggtattcttaaacctaggactcacaggattcccagacacaaattggttaagataagcccaaaataaaagttcgccaaaaaccaacagaactcagcagcttctagaagtactctcaaatgatttgacttcctaaaagtaaatgtgtataggaaaggagatcaagtacatattacatgaagtcaaagacagaaaacaaaggtaaatatggactacttgaaaacaatcactaaaactaaataacttatttttaaatgtagtgagccctcccacattttatttggttaaaaatcaaaatggagcaagtactgtaaaaaaaaaatgaaagcagatctcctctgaaaaagattgcatatcaaaataagctgctgttgtcatgtttttattatacaatttatggtatttttccacccatgcttataagtaatgaatggtaattaaataagcacatatagtatccatatgagtatgaatagatatgttcaataaatatttaaattagtagagtggtttggctctaatttgtatcaacctaagcctccaaaagaaaaatgactcccattagcatcttatccttataggtacactctaagactatttttcataagtagaaaaaaaatgaaaagaatctcaggccaaaaaaatgctcaccactgacgttacaacagttaagggcttcattraagtcctcctcagttaaattaacattcaaacatttcaaggcatgctccaaatcaggtataccaatcttgccattatcgacatgtgacaagatgttagcagcttctttaatctctacaaagataaatgtacacaagctattatggtgtaaaaaacattcaaaataatttgtccaaaatctaccataggtaaacctcaaattaaatatttatctgaatcaaaatctctccaaaggaaacacaatattttctatttgtaactgatggcccacttccctcaagcagcacttgaaactaaaaaacattatggcaaagagaataatatgatgggctattgacatgtattataataagactttgtcttcattcattcatccattaaaaactgaatgagctacatgcctccctgtacatgtagatctaaagatttctaccacctgatgatgtaaacaaaggctaaaatttgagattgaagctcttgatccccagggcctcagatagttcatactgtgcttttgtgtgaattgggaaaaggcacctcctctctatgcattagttacaaaaaagggtacctttcactaggcaactgcaatccagcacagaggttcaaggcttggagtatgaactgcatttcagcctccacttatgctctctcaacaggcacctttgtgcaaagcacaactcacataaccaaacggggcagtcctgttgatctcacaccaatttaaaatataaaacataatcattatgtgctttttaatttttctggtttttgtctgtttgtttttgtttttgagatggagtctcactctgtcacccaggctggagtgcagtggtgccatctcagctcactgcaaactctgcttcctggttcatgccattctcctgcctcagcctcccaagtagctgggattacaggcatgtgccaccatacatggctaattttttaaatatttttagtagagacggggtttcgccatgttggccagactggtctcgaactcctgagctcaagtgatccaccggcgtcagcctcccaaagtgctgagattacaggcatcagacaccaaacccagcctaatttttcatctgtaccatttctcaatcaatttctccctcaacctccacatgaagttgtctatgtttccatatgctgaaaattgttgcattacaccaggagatctaagccttcatggagatcacttggaaagaacaccataatatcatcttagacctacattcattctactaacagttattttacagcttctaagatcaacaataaaatattcagtccctcgtatcaaagagtttcaagtaaattccttgataagggagactaaatctgtcatatctataaacaaaattataatatatcatatagtaagtgatatgagaaaaatacacacacaaaattatggaagcactgagaaggttcacctaacctagatttaaaaagtgatgaactctgggaaggaagtcttatggcatcagaaatgacatttgaactgagtttgggggggaaatgtcagtttgtctgtcagggaatgtatccaaaggaaacagtatatgcaaataaatgcaaaagcaaatagagccaatttaaattgtgctaagtagtatgactacagaataaatacaaatgcagaaatgataaacggtgagtctgaagagataagaagacaaatctattcagtcattcattcaaaaaatattcatgattatgagttaacaacaaaagatttggaacaatagcatagtaaatattacataagtatcagatgttaatattagttaaccttaagagtctaattaaagagccaggactctgctaggtcctggagatacaatggaaagcaaagaggagacatattccttggcccaatgataccaggcaagtgggaggaagagatattaatcaaataatcgaaaacagaaacggatatttataatatgaaataagtgctatgaaatggacagaatttaataacagcatataacaaaggaaacaaaaaattctgacctatactagccactgatgataggcttttctataattgactcatggagtcaaaagagattattctccagctttcagacttaatgttgttttccctttttggtttcggacttacttgggaccaattatccctttcttctcactcatttctccctcttggaatggatatgtctatcctatgcctgtgtgttttggaagcatgtaacttgctaacttcacagacttactgctggaggagaatttgcctcaagaagaattgtaccttgagtctcacccatctgattaagatgagactctggaatttggacttttgagttggcacgggaacaagttaagagttttggggctaccaagatggaatgaatgtattttgtacatgaaaagggcatgaattttgagggccagggatggaatgctatggtttgattgtgtcccccaaagtttatgtgctgaaaacttaatccccaatgcaacagtgttgacaggtcaggcctaataagaggtgattaagtcacaaaggctctgccctcatgaatagattaatgtcagtgatttagttattgcaagagtgggcttattatgaaagtaagttcagtctcctcttgctctcttgctctctcaaactttcttgcccttctgccttctgccatagtatgacacagcaataaggccctcactagatgtgggcctcttgaccttggatttcccagcctctagaattgtaagaaatgaatctcttttttttttttatacaaattatccagtctgtggtattctgttacagcaacacaaaacagaytacaacagtaggcaaagaggatcagggaagaatattccagggaatagaatatgcaaaagtcttgtagtgggaggaaaggggagtatctaaggaactaaagtaaagccaatttagttgaagtacagaaagcaaggataatggtacaaaataacgctagaaagatagggcatggaggattttaatttttatcctaataacaggaaatgtttgaagagttataaatagggggaggtaacatgatcagattactattgtggaaaaatagtaatctggctgaagtcagcaggaaaaatgagaaatacattggtacttggcaattattctaaaaaatatctcttattattgaaaattttctcatatacaaagttcttactcaccgtttacctttggtaattttagatttgaagcctctttcctgaaatctgcaaatttagagagagacattacacaatgaggaatggcatcctgatcttaccctgtttgaaaggaaaccaatggatagattgaatacttcttttcccactaacatttatcattgataaccattcccttcttctcaaaagttgttccctggctcccaaaatatccattctctcctcactctttgcttactacttgggctccttcatggttatcttccaccaactccttaaatgtggcagtttctaatgtcacagatgcttcctttctccctaaggggagaagttaatccccagccggtctattcaataaaatccttaattattagtctaaattgtccttcttgatctcttacctacctatmtactatctagtcccagaatttttcctaagaacattatacccattacttaattaaatgtaattaatgaatgggtattacattatacccattcactccacatacttcctacagagatgcaagttggtgtagagatctgaggaacaaacgatagaaataaaatctgtccatttgcatagatggactctattgtattaaagaacagtttagaataactcacagctagcccaggtattaccctgaaacaaacagaggttagaatacacataaattatatttgccttaatttgtatttttgttttaagcaggataaacaaaacaaataacctataaaaagtactttcaaaataataggtttgggcaattttacatgataactctaaacaggattgctgaacctaggcactattaatatttttggccagataattattggggggggcaagggtattatcctgtaaattgtaggatgtttagcagcaacccttgcctctattcactagatgccagtagtcctctcccatcagttgtgataaccaacactgtctctagatattgccaaatattctctggtgtgaggtggggggcaatgggggatttgattatactttttattttgtatttatttatttayttgagatggagtcttgytctgtygccccgactggagtgcaatgacgtgatcttggctcactgtaacctctgccccctgggttcaagcattctcgtgcctcagcctcccaagtagctgcaactacaggcatgggccaccatgccaggctaatttttgtatttttttagtagagacgggatttcaccatgttggtcagattgctctcaaactcctgacctcaggtgatctgcccgccttggcctcccaaagtgctaagagtataggtatgagccacttcccccagcctgattacatttttcagctgaagctaaatttaaaggcaggaaatggctttctaaatatggggtaaactctatctcagtacatccaagctgaggctatatagatggatcaggtaaattctttgtaaataaagtaaacaacaactcgacacttacaactggctatagaaataaacattaatttttcaacaataccttgcacttctcaaagggcctttcatccaaaaacagaaagctacaaaaccattaagacctctctaaaacacataaaaggaaaaggattaactttgaaataaaattattcttcaaagccatgccacaaatatataaatactctgagatcaattttacaatccaggtcatcagatcacccagaaatttgatactgtaatgactaaatctctgtgggcacatataacacatagacctgaatatggtctacagtaaagtgtccaacaagtttatggtgtgatttaggggccaagtattaagacttaaataatacttggtaaaatagtttgaaatccttggataaaaatttagaagaacagtaatatcaaacatttggaccagaaagcccatggctgacctccctaaattaaaaaacaaaaaacaaacaaaaaacaaaaaactaaataaaattcagaagaaattttttatacaagctgctggttgtctgtcaaatcaactcatcttcaacaaaggagtcatccattacttcttgaagtatgtcatcagtaaaagaaagcctatcagtgttttcaagtacatctggatttttgtctttgtcaaactgacaattttctttcgtggagtccaatgtattgatagtctcattcaatgctacaaacagagaatatacatacaacatgtaattcagtccatggatctaagtcttttgagcataacaataaaattgatggcctctttgagatctacactgtcgaataaggcagtcaccagtcacatgtggccatttaaatatttagagtggtccattctccactctgataattttctataactctacttcaatagttttctccactccaatagctttctatttgtagctctaatagttaaaaataacccttttctttattcttaaaattgatttgttaaatgtctgggtttgaggtgagctattctgctacagacaaaagtatgctaaagtttccctagttattctgttaataagcgcaccatttcagtaaagtccccttcattcctcataactcctcctaaatgccaatttttctctttccttccctgcatcccttgttcctgtcagctaacttcacccattttagagaatcatcacagcctcttatgtttagcacagtcacaaacatttggactaagaagaccatggctgacctcccttgatttaaaaaaatgttaaaagttcacatttccaaagtatattcctaaaaaggcatctctcaggattttgttctatgatatagtcatttgtcattggtaagaagtttcaaaaacaggtcagtgaagaagagttgaagggatatttgagtctagagagaagattcatttagtgggaaggaaagagaacatgtgagttatcttgacatttctggaaggctattaatgggaggaagagtccaaatgtyaaatatggttccaggaaatttccaccaaatatgtggaataatgttctagttctatagctgtcgaaaattatagaatgagctacttcaaaaagtcataaggacttccaagacaaagagtgaaatgagtgaatgtaccttacctagcgtatccctgcaaccaactaattttattttgattgttaaatagtaaatataaaagttgagggaattctgtctctaatgaactagggaactatcaaaccgtctattacagacctcattctctgaccacaataaaatacaactagatataaaaaacaaacttaaggcaacaatgacatttaaattgctttgaaatttggccgggcgtggttcatgcctgtaatcccagcactttgggaggccgaggcgggcagatcacaaggcaggagttcgagaccagcatgaccaacatggtgaaacactgtctctactaaaaatacaaaaattagccaggcatggtggtgtgcacctgaatcccagctactcaagaggctgaggcaggagaatcgcttgaaaccgggaggcagaggttgcagtgagccaagattgctccactgcactccagccgaggcgacagaatgagactccgtctcaataaataaattaaataaataaataaattgctttgaaatttaaagtttcctcctaaataactctcagaccaaggagaaaatcaaaatgcaactggaaatatttataaaataaccataataatagcctaacaagtcaaagactgttagatacaccaaagtttcactaaaatgaaaattgactgccttaaacatgtttattacccagtaagaaaaaaaataaagtaaataaataatttaaacaagaaattagaaaaactattaaatgagyataagggaacaatataaaggacttactaaaggtaaaatcagaaattaatttttaaactataaatagaaacgctaaagataaacccaagagctagtactttaaaaacagagataatagaacattcagtagcaaagaaaaaagttatatatatacctatatatataaatttaagaatgagaaataaccatatatacaaaaaaatgaaaagaattagaagtgcatagggctgtcctaatagtctaagtcattttaacctcaatacaatttaaaatttcctggaagaatcaaattaccaaactgacaaaatgaaacaaaagatggcaaaaagcaatccatcaaagtcaaaaaatcaaaaataaactagaaaaaaatgtgaaatgggtaagacaaagtattaatgctcctatcagaattttaaataaataataccccctgttgataaaagtgtgaatttccacaaatctttaggagggtaattaggcagtagcttgttaacattttacatctaaaaatactttggcccagcaagtccacttctaaggaatttgccctacagaaaaattgtgtgcaacgtgcacaaagatatatgtacaaggatactcaccaaatgtttgtaatagtaaaaaaatggcaataacctaaatatttattaaaagtattgtggacaaaattatagttcattcctctagtataacattatgcagtcttttaaaagaatgaggtaggtttacataatatagtggaacacagaattatatctaagatatactgtcatatattgcactcaagttgtgcaatattatggacagatgtaaagaagaaagcctaaaaggatatttaccaaagcttcatagggatatttctgaagggtaacattaatgttacaagagacttgcactttatacttcttacattcctggtcatttaagttttttacagcattaaaaagaactattcattcatataataaagatgtcttattttaactattggaaaagatcatactcttgttatttttcccatctccaatcacaaatgtacaattcttaaatttcaaaataaaatgtaggaagttccccataactgaaagtgttcaagtacacatgaagcaaacatttggcacagatactataaagaagatttaaacaccaaatttagggttttactaggtgaactttgaataagttctgtatcattgccttctaacagtattaccataaagctcttaccaatataattggaaaatttctgggtgtccctcaaagccctcatacagtctttaatgttcaccatgttatcttctgcaaggaaaagagagagatgacaaacaagaacccctagacaaagtaatacttaaaggctagtatcaaaatcagcatatgacttatatatttctcgaacattttatttacaaggtacttttagattcattttcatccattaagcctcgcaataaccctacaatgttgtaggtatactaagttctgattctacctataatgggaactgaagtacaaagaaagccccagtaactctgaccagtaatttggtcaaaggtggcaaagctaggatttctattcacagaacttgaattcctaagatgtttttcattcgctaaatcaagatagcaatgaggacagagcattctaacaagcccacttccacaaaatctagacccgcttgtatagaagtattctcataactgcaaaagaggaaattaagaggaaaggctccgtttcaaagattacatttatagtaacataagcaaatacctatagaccttgcacatcttctttactcctacaaaaaaaaaacctgagagtaatatttaaaatgcttaccagaaacaaaatctgattgaagaattttctctacctcttctttaggtgacttaatcccaacatttcttagaaagtcttccaagttcttcccagctatcatgtcaccttccagcaaatcagcagctaagacaacttcctgtaactctataaatagaaaaaaagttaattaataaaaagcagtagccatcactcaagacatttgttagtggaaatccatagtttattattgtatcctgaactgaggaataagaaatctcagagagaaattctcccctcatagaattctatggccagcagcacaatgtgcaaagagttctcttgatctatcacgtttctctggtgcgtttataaaatttgcacaaccaaaatcactcatatagctgaatttttcactgcaattatacaaagtaattattttgctgtggacctctaatgatatcaaataaaattaactcatcagatataggcaaaataactttcagaattatgaaaaacgtaaaatatgagacaagatttacaagggctcattcagttttccttttcagttccaccaggacccaattgtaccctagtgtctggaatgttgctttatttccagcactggttaagtcagaccagcattcaaagtctggctccaggatttgtaacctggaactgtgcaactgtgagcaaattattactacttaatgtctcgtctaaaatgggataatactatctgcctcacaaggttgatgtggagagtaaatataacaatgtataaaaagtacttaagatagyattagacatataatgcctcaataaatgtcatatttatagaataaaattagttttattattattattaaagtcaacagaaactagctgcaaatagtaatcacagtttaagtcttatgtcctgcctcactttctattcctctaacatcactgggatgcaactacagatggcaatctgagctttgctgacacccagaaaacctgtatcagctctgctttcttgccttagcacttgatttccttcaaaaacagtttctttgcacaaccaccttgagtagagtctgctcatcctcccatgctccacatactgtaagaccaggaagcagaatagcattttcctgtctttctgctgctgctatcaggccattttagttccaccttcaatcaaaccttatccctctcccatgaggctcaggcctgttattcaactatgccactctcctgacaacagtattgattactgtctgatcactccttcacattctctgaggattttggcactttgatcataatcctccttctacctctcatcccaatatcatccaatgataataaggatgagcctggcctcagagcactttgacctcttaacttcaaaaggcctttatttcctttccaaagtcatccacaccaatggctacccttaatccttatcattacctagaattgtctattccacctctaaaatcttaaattkcaaggtcagacactgaccatattcccttaaaattacatgtgtagatactgaaagaaggcatagaacttcatactatgcctattctcttggctcctccaagttctttaacaaatagtctagacagagtaaaccagctttatcagttagtaatgaaggatacattctgaaagccaagttcctatatgccagccaatgtttaatcaaaaccaastttcatctgcgtataaacatatcaatgccaacatgttaaccagaaattaggtgaacacacagcattaaaaacaaaaacaaaagcaagtcctttcaataaaagtaaatctaaccgttataaataattcagtacttaccttctaacctggcagcatcacgcatattccttactacttttgcaaattcttcaaattgtactttgtcaccttctgtgagaaaaaacacttttaatagaccaacctcattacgcaaaagtcagakccaataaagcaacctataaaaatgtaaaccatttgatgcactcctaagaatcatatttccttttcatatttttgaataaccaaaggattaattttatgggattaataaatattaagactatagaagtcaggctgatggctgggcgtggtggctcacgcctgtaatcccagcactttgggaggctgaggtgggtggaccatgaggtcaggagttcaagaccatcctgaccaatatggtgaaaccccatctctactaaaaaatacaaaaattagccgggtgtggtggcatgcgcctgtagtcccagctactcgggaggctgaggcagcagaattgtttgaactggggaggtggaggttgctgtgagccaagatctcaccactgcactccagcctgggcgacaaagcgagacgccatctcaaaaaaaaaaaaaaaaaaaaaagtcaggctgagttctcaatttcaatcaatcaatggaaacaatataatccatattcccaaaatataaaaccaagacatattcctagacaaaattaagagacatacctcagtcttagttttgtctttcaattgtttgaagataaaaattctacaccagaaaactttaaagacgtctttcagtgcctgataggcctatgactacaatttctgatatgtgtttacacccatttcttacacagtacacaagtactagattacaaagttaaagtgatgaacacaggaaacagaagcagctttgttttcccagccaggaataaggaagcttaggatttagaaatattatagtttattatcatagactagaacaaagcacaacaagcaaaatgtgtcaccagcagataaaagcctgaacagggcttaagtatatagctacaattaacaatgtctcaccttctatctaccttagctttaaattgacacttgaacttttaggaactattctctagagtaaaaacgcatgtctttttgcagtatttttgctgcttctgtcatttagtagagtcctatatatcactaactgtaaaggctctgtccctgaatctgtgttctctctctgatgggagaaacggtagagaaggatagaagtgtttgtacattccattcctcatgcttcttttatacttttataatactcaggatggccttccactagcttcacatcagtcaacaaggttacataatcaaatattctaagaccatgttatataaagacgctcttaattaagtgtcttcaatttacagtagcttaaagctcagcttaaagtaggcaacgggtactgtaattcagtcacctaaatggagtcccctctgaatctagttcttggtatgtataatcaagtagaactaaatcacagctacttacaattctggaaggaagggaagggaagggaagggaaggagagggaaggggaggggaggagaagggagggaagcaaaggagggagggagagtgggaagggaagggaagggagggagagaggcaaggaggcaaggaggcaaaggaagaaaggaagcagggagccatctgacgtcaacaggtactgataacactaacaaaatctacagctagctttggacctgtttaccaagggacccaaatctgtaagcatgacctgtgatctcatttgatccttaggttcatacaacttgctgaaatagaatagcaactaccaatattaggaaagatttcctggatatctttaaataaatcctgtgaaaagaaatgtggatggatagagctgctgtcaagaatttgtagctcaattattctttgctaaaccaccaaaacaggattaatcacagctgatgccaggttgcaaagttagagcctgaaacaaagattcagatctggcttcaatggatattgcataaaaartcatgaagataagttcagagtcttgctgccaagccgaaaagaaaacaaagttattaagctaatttcaaacacatcagatatcagagtcaggagaaacagagaatatcagtttaagtttaaaaatctaaaacaaataaagctagagaaaccaccagcagagaagagattgtcccaggccttaaatgcctaacaacacctattaatgatttcctctaattcttcgcctatggattcaatgtctcacattcaccttgaccattttccataccctcttacacatttttgctcaacaccaactttcttcactcaggtctttcagaagaaacaagagagctcataagctacatgactagatatttgggaagtatttctgaatatgccaaatgataaattaccttttctatttttcaatgctttttttgtaatcatcataaaattattttttaattttaaatatattttaaaatattaaggagtcaacatggaataccaccaataaccaagaactcactcttcaatttcactagagagaatctgaatcagttgtttttcagggttttttttctttttaacataacctggtcaaaataataccctagatcagtaattttaagttctttcttatatttctaaggtcttatggagctgtttcagcagttcacttggtcatttctcccactttggtcagagaagctcaactttaatattttatatattaggatactgtataagatttaatttggaaaaaaagcattctgctttaacaatatcaaatataaacaaaaataacaaatctcaaaattttgcaaaccactgcattaaaataagaactaaatacctttgtactaagtgcacaatgttaaaagaagaaatgatatgacaaatggcgtacagatacagttttcaatatcatgtgtatatttaggcttaaattgtaaaatctgcattttatatactgtcttttgcttcataagtacagaataataaacacaggcctggtgcggtagctcatgcctgtaatcccagcacttagggaggccaaggccagaagatcacctgaactcaggagtttgagaccagcctggacaacatgacaaaaccccgtctctacaaaaaattagccaggcacagtgctgtgcacctgtagtcccagctacttgggaggctgaggcagcagaatcgcttgaaccgggaggcagaggttgcagtgagccgagattgcgccactgcactccagcctgggtgacaaagcaagaccttgtcccctccaaagaaagaataataaacacaatatatgagtttttattatcataaaaaatacttttctagttattttatttatttatttatttatttttattgattattcttgggtgtttctcgcagagggggatttggcacggtcataggacaatagtggaggcaaggtcagcagataaacaagtgaacaaaggtctctggttttcctaggcagaggacactgcggccttccgcagtgtttgtgtccctgggtacttgagattagggagtggtgatgactcttaaggagcatgctgccttcaagcatctgtttaacaaagcacatcttgcaccgcccttaatccatttaaccctgagtggacacagcacatgattcagagagcacagggttgggggtaaggtcacagatcaacaggataagaatttttcttagtacagaacaaaatgaaaagtctcccatgtctacctctttctacacagacacggcaaccatccgatttctcaatcttttccccacctttcccccctttctattccacaaaaccgccattgtcatcatggcccgttctcaatgagctgttgggtacacctcccagacggggtggtggccgggcagaggggctcctcacttcccagtaggggcggccgggcagaggcgcccctcacctcccgggcggggtggctggccgggcggggggctgacccccccacctccctcccggacggggcggctggccgggcagaggggctcctcacttcccagtaggggcggctgggcagaggcgcccctcacctcccagacggggtggctggccaggggggggctgacccccccacctccctcccggacggggcggctggccgggcggcgggctgaccccccaacctccctcccggacggagcggctggccgggcaggggctgatccccccacctccctcccggacggggcggctggccgggcggggggctgacccccccacctccctcccggacggggcggctggcctagcgggggctgacccccacctccctcccggatggggtggctgctgggtggagacgctcctcacttcccagacggggtgactgccgggtggaggggctcttcacttctcagacggggcagctgccgggcggaggggctcctcacttctcagacgggcggttgccaggcggagggtctcctcacttctcagacggggcggccgggcagagacgctcctcacctcccagatggggtcgcggccgggtagaggcgctcctcacatcccaggcggggcggcggggtagaggctctccccacatctcagackatgggcggccgggcagagacgctcctcacttcctagataggatggcggccgggaagaggcgctcctcacttcctagatgggatggcggccgggcagagatgctcctcactttccagactgagcagccaggcagaggggctcctcacgtcccagacgatgggcggccaggcagagacgctcctcacttcccagacggggtggcggccgggcagaggctgcaatctcggcactttgggaggccaaggcaggcggctgggaggtggaggttgtagcgagccgagatcatgccactgcactccagcctgggcaccattgagcactgagtgaaccagactccgtctgcaatcccggcaccccgggaggccgaggctggcggatcactcgcggctaggagctggagaccagcccggccaacacagcgaaaccccgtctccaccaaaaaaatacgaaaaccagtcaggcgtggcggcgcgcgcctgcaattgcaggcacttggcaggctgaggcaggagaatcaggcaaggaggttgcagtgagccgagatggcagcagtacagtccagcttcggctcggcatgagagggaaagggggagggggagggggagggggagagggagagggacgttattttcatatctcataaaataatactttgttggtctggttcaaataaatgctatctattactttctgtggtacatgttgcctataaattccattaactttaacaaaagaacctgaagcactgccacagagaaaaagggaagaaaatctatattattgggtagaaattagccttctatttttcatcaacccttttcacctcaaatcttccaataaaataatcaatacatttaaagcccaaaacttctagcctcaactaaatggaagcttaatggatgaaaaggataataaatgattacagaaaaagacagttctttgacaaagacccctgacagcatgctcgtgttactaatctagttctgtataaacattccacataaaagaatataaacgtactaggtacatttttaacttctaggcactaagactatgagagagtagaaatgtctacctgtaggctgggtactctccttcctgcatgtagaatatgagcagtaaatgatggagacttactttacattttttagtctatagtctttgttatacaatacttttttgaactttgtttttattttgtttgcttttttttttaacttgctaaatagaggtggtagctatcagcaggtgtgtttttctaccaaattaaataaaagcctatttcaacaaaacagtatgaatattccaagtactgttattataaaatttgaatagatctcttaacatttcctaatcatgccctctgtgttcattgggatatgccattttccagtaacataccacacaacttgaaggtactcaatgcatatttgatcaatttagagcaataataaattacataataatatttttatattgaatagccaaacaatctgaactttctttatacaatatttcctaaatgcatatgttggcatttcaatcatattcgaacactccgtctcgccaagtacaagatacaatgacaagagttgacagaaaataaagtaatatcttggtatactttttaattttagtatttgtaacactcaccatcaactgtcactagttccaatgcagctagaaattcatccttttttaaattactattcaaactagacagagtattccacaggtcagaaacactcatcgtctcctttctgagatcgtcgagggtttcaatagcatcaggcaatactaaagggtagataaaacacaagttttacgaatgcttatgcaagaagttaatacagtaaactgtcatctggaatagacaaaaattaaggtttytatggtttaaaagaataataaatatagcataaatgaattgccaactttcaaaaatgaaaacataataaaatatttagcctaaaatataatgtatttttgaggatcttgaaatattttaagaacttacagtgccccaaccctgaataaacattataaataataatttttattgaagttagatttttaaaagtgtgaattcagaaacattttcaattgataatacaattaagtagcttttgttctatatctctccctaaaattctcctctggctcctacttcctcttcaatctaccactgtagacaacaaaaagaagactatttcaatgcaaaatcctggagcatcttaaacaaaggagtgcaattatcttactacaaatttgtaaaaagtcactgtgctgctatatagagaatggattctcaggaagattagacagttaggaagagccagcagatattagtgaccaagattttgtttataacctgtacaatcttctcagctgtgtgatcttctccagaaatgctgtcagacacaagaaggaaggtaattgggttcattcggggttgagagttttgccagataggtgcaacaaaagtacacggaggcaagacagtctagggtattaggtatatatagataagataatttaaactaaataaggaagaaaagtgaaaacaggaggagactgatggattaggagaaagcggaggggtaaagggatataaggtcccaatgaggtatatggaaccaataaagaagacatgctttgagcagtctaatgaagaaaaaagaaaaagaagtaaacataaacatgcaatattaacaatgagatataaaatacaatgacagagatagattaggtaatatactatataactctgtgctaataaaattttaaactccataaaagtgaatttcctaggaaaaatgaagtaactgacaatctctttctctgtatgatatacccctatataggagacaaattaaatcttatattgtaaggtaaaaagagctgctacttaaaatctactgttacctaacatgtaagaacaaaataatacgatgttactttcagccccaatttttagaatgcatactaacttcactccattaaaaatatacacatgtgaccttacacttctttatggtgaacttctgagtggcaaaactatcttttccatattaccacacttacagcttaacataaagcctagtacatattaatggttcataaatgttactgaatacattggaagatagaaagaaatggggacagatgtaaccagaaattctcatattagtactcaggcactagaaggcatcatttttcctaagttgaaagacattttaaatcttttccccaaaacgaatgctatacatggttctagccctctataagtgcgctaatgaaaaataaaattatgatagcttttaattcacttgcatgtagaagacattctagaattaggggtcattagaggagattaaagccaaatatagcagcaggaagccaggcatttatttgtcggatgacctgcaggataactagctctataagagactaaaagagtgtttacgctcttctaaaatctgtcaaactatttggtccacaaaaagcagaagacatgatattcttacgtacctaatttttcagagaagcattccgtgttgctcatcatagtatcaatgaattctttaaaattcactttttttgtttctacaggaaaaagaaacacatttttttggcatcttttaagtattattatgaaaaatattgaattatataaaatacgttatatattcagaaatatataattatatccatcaggtaatactaaccaataaaaatatatgggtataaaggggaaaagcaaatcaayttacagtagagaagtaaacgctgaaaaacaccaagaaaacgggtcaaaattcttccagtccctctcaagcatacataatatttttaacttttatttatttttatttttatttatttatttatttatttatttatttatttatttatttttgagaaagagtctcactctgtcacccacgctagagtgcagcggtgcaatctcagctcactgcaacctccacctcccaggttcaagcgattctcccacctcagcctcccaagcagctgggattacaggcacgtcaccatgcccagttaattttcatatttttaggagagatggggtttccattatatgaatacacaatggtgtataccacaatttatgtatacattctgtggatgaatatcatgctgctttctttctccttttttgccattaagatcagtgctgccatgtacattcttgaatatgcttcctggtacttaagtccaagagattttccaggatttatagctaagaatagtatttctaaaccatgggatatgcaaatgttacaagatactacatattattttccaaagtggttttaccactttcaccatatttaccaatacttagaataacatatttcttactttttcccaattttagtggatataaaaatgtatgtcatgagccaggcatggtggcttgtgcctttagtcccggctactcaggaagatgaggtgggaggattgcttgagcccaggagtttgaggccaacagatccctcttttttttttaagtatctcattatgacctaaactttgcacttccctaattactaaggatgttgagaaccttttcatgtgattattagcaacttgtgtcttcatgtggaaaacttctataatatctgttgagttgttggtttgtaaaagttgcctatatattctctacgataatcatcactgttgtaagtgttgcaaataaccagtgtgtggcttgtatttcattctctttgttgtatcttttaacaaagagaagttcttaatgtatgcaaatttatcaatcttttctagtttcttatttcatatcttaaaaaatcctacgtcagaaaatttttcttccctttgttttttctaaaccttagttctcacacctggaaattattgaatacggagtgagacagggatctaactattctttccatttgaataagtaattttttcagtaccatttattaaatggtccttctttccccagttatccaccactttatcatatatgttgccatgtatgtttgtggatatgtttggaagttccttatcttgtcctattggtaaatttctctatccctttgccattctcacactcttttagtcactacggctttataaggagatttgatatccaggagagcaagttcctcccaacccccaccccccaacacacacatatctccacaaatgttcttcttcaagagtgctttagctattcttagcctttagtcattcatataaatattagaattagcttacaaaaaagtcagggttttattagaattgctttgaataaataagttaattagagaattgacagtcttgggtctctgaatctacagacatgggatacattcttatttatctagattttaatgtcttcacatagtcttattttctctatacaggtatcatacaacttagacatattcctttttttactttttattatggaaaatgttaaatatacacaaaatagaatagtgtaatatgttcatatactatctctagcgtcaacaattatcaactcatagacaatattatttcacctataaccccagtctcctgtcgagccactctcaccctttcctttagaagagctgctgctaggttatatgggcacagatactcaaaaatggtttaactttattgtgaattgtaggttttgacataataatgaatccctatttgccccaatttaatgccttttgtcctgacttctaccttgtcagacagcaataccacaaattctgctttctttttgtctgcatttttgcctaggaaaaaaaatcttgaaaagattatttaaagaataaataaataaaatttttttttaattaaaaagactattaatactggttattcctaaataacaggcttttgagtgttttcttgtacttttgagtatttccatactttttgtattagtttaattttaactttttataataaaaaaattagtcatttttctaagaaaaaaataacaaattgaccctccttccagatgtgtcaatgcagtttgcctgaaaatatatcactcaccaccagcttcagtcagttctgtgatcttcttaaattctggcttagaaaggtaaataccaaaattttgaagacaagtatttagatcctcataatccacatttttatctttaattttatcaatggctttaatgacaccaggcaacgctaaaaataaaggagtatgctaataagtattaaatataagtcaaaaataaaacaccactaacaagatgaattttagttctaacactaaattaacaaaaatataaatcacttcagcagtgttatatactaaaagcatatctagaatctttaataaaaaaagtaagtatcaaaatcaaagtcaaaaatatattattctaggccacacacagtagctcacacctgtaattcaaacactttgagaggccaggcggaagaatcacttgaggccagggatttgaaagcagcttgggcaacaaagcaagacccctgtctccacaaaaaaataaaaaattagctgggcatagtggtgtgcacctgtattcctagctactggggaggctgaggtaggagaattgcttgagcccagaagatgaaggctgaggtgagctatgatagtaccactgtgcttcaacctaggcaacagagcaagaccatctcaaaaaatatatgatagatagatagatagacagatagatagatagacagacagacacacatacacatatatattattctactatactatagtctctgaacctaaggaagcaccaatttaattgcactgatagtaccataactgaaatacataggaacaaaatattatataatttctccatttaattcaacaatttaaaattctttgtactctgcttctcagtagcagaaatacaagcagaaaattttcaatccaaaatgataaacttggataattttgtggcaatacatggctcagtctttggtaaattcaccttagtttatctttctaaatatacatattattacttaggaataactattctacatctcttcttataataacttggaatttactcttcataaatttggtcagtattttctccacaaaatttaaactgataaatttttactgcaattaaagcattcttaaaggaaattacttacaaatatactgaactcttaagaaggttggctaactggaattcatctggtttaatcagaaaacttcaaagtagaggtggcaccttaaatcacttgaagaaaaagatgaaaaaacacagagagagagagagaaagtgtgtgtgtgtgtgtgtgtatgaaaaaaacagaggttgtgtatgcgtgtatattgtgtgtgaatattgtttgtgtatattgtgtttgtatattctacccctctctcaataagttttataatatacaaacacacacaatatatacacatacacacatatacacacacaaactctagaacaaattaaataggttttctctaattgattaggataggtaaagtaggaagctrggcagcagagggcattaaagccattaccaggtataaactttaagtagtcactggaaatcattatggctttctaaacaaacaagtgatgatcaaactgatgtctgaacttgatgattcttaaaatgattatttaaaagatgattcttttaaagaagatgtgtaaatagtacatacagcaagatacatgtccctatcttgtgaaagaaatttttaagtgaacaaaattcccatttaaaaattaaaagctcttttttaattttacaggtagaaacagcaagtcaccttaagcaaatttgagataaaatggaaaatcatttgcagccactgtaggggtagaataacagaaacatttttctttcatcagctcagcttctatacatccaataccacatggaatgcagaaatctggggaaagggtggaccatttatacaaaaagcccaggtaaaagaagagaatgagtttccaactattattcttgagattcaaagttagcataatctgtcagagagggatagggtaaaaaaaaaaaaaaaaaagatgaaatgaggggcctggtcactgtattgagtcagcaaggggaaagatggttctaaattcatgaggtggctgataagaactctattctcacctaaccctctaagacttgggattgtaaagtggctgctgagtgaatataaagagctgtacctttgagaatcttgtttagtttgtcatggggctttcttgcttgaactcacacaatgcttccttgatgcaggtccatataaagagctatacgcttgggagtacagtggctcacacctgccatctcagcattttcagaggccaagcggggaattgcttgataccaggagttcaagaccagcctgagcaacacagggagaccacatctctacaaaagattatttttaaaaattagctgggctgagtggcatgtgcctgtgatcccagctacttgggaagctgaggtggaaggattatttgagcccaggaggtctaggctgcagtgtgcaatgattcagccattgcactccagcctagatgacagagcaagacccagtctcaaaaaaaagattatgaatggctagtaagcatgtgaaaatatgcttgacatcattactcattaaggaaatgcaaaactaaaaccacagtgaaataccatttcacacctattataacagttataataaaaaaaaaaatcaagtgttgagaagatgtgaagaaactagaatcctcatacattgttggtgaaaaatgaaaatgttataaacactttggaaaacagttttgacagtttaagagttaaacataaattcaccatatagactaaaattcttctcttaggaatctccccaagagaaataaaagtgtatgtccagaggaagacatgtatacaaatgttaatttcagtattattcataacagccccaaactggaaataatcaaatgtccatgagccaatggaccaccaacaaagtaaagaatatccatacaatataatatagatttatttagccttaaaaggggatgaactaccratacatactacataaattaaccttagaaaccagaagtgtgatgtcaccaaaatggcagaacagaagcaatctggcttcattctcccctactgaaaaccaaaaacaaatatccagtgccaagattaacaccagtaatatcccagaactcacatctgaagctgaaatgactcctgggggcacagagaagtgaaaatctccaagcagatgktaagaaaaaaggacttctatatccacaacacccctcccccaaactgccaggtaccatgaggaaaagtccccctgaaatcttcatttctacagtggaaaaagtgagaccatggcagtcagccagcttccccaccatcttgggttcctttacaggaaaaccattcctgaatcaacccaaaggaagtattatgagtgcctataggcaataaaccccctgagggcagctagaaactaaaagagaggtgggaccagcaaccccaggccacaaaattctgctctttatctcagccaaaggagacaccaaatcagagtggctgttcagcagtaccacactgtaggaaggcacatgccatggctccactcagcatgaacctatagacagccttcccacacagctagagtatcgcttttgagacctccccatttgagacatgcaggactctgaacagttgtgaagccaaggcaaatctgggtttaaaatacaatctagtaacaaaaagatgcagtgatctagggttaaggtgactcaacaggcaaagtgcaaaaatcctctaagcatatataccctgggaagaccaaaacaagctagacagcaaagactggaataaataattaatggttcaatgacaagatatagacatatgtccacaaggaagaacagcaaactaggaaccatgacctcctcagatggacagagtaaagaactagtaactgaccttaataagacagcaatgtgtgagctctcagataaagaatccaaaatagtggytttaaggaaatctcatcaaagactgtagagacaaagaaggtcaccaagtaataataaaggggctgatccagtaagaggatataacaattataaatatgtatgtacacaacaacagaggacccaaatatataaagcaaacattaatagacctaaagggagagagagactgcaatgcaatcctagtagaggacttcaacacaccattctcagtaatggacagatgatccagaaagaaaatcaacaaagaaacatcaaagttaaactacactctagatcaaatgaacctgacatttgcagaacatttcatccaactgctgcaaatacacattattctcatcagcacatcgaacattctccaggataggccacacgtcaggccacaaaagaagtctcaacaaattttaaaaagtcaaaatcatatgaagtacttttctgatcccgatataataaaactaaaaatcaataactaaggaattttggaaactatgcaaacactgagactgctggcaagatggctgaacaggaacagctccggtctgcagctcccagcaagaccaacacagaaggccggtgatttctgcatttccaactgacgtaccctgctcatctcattgggactggttgggcagtgggtgcagcccatggagggcgagcagaagcagggttgggcatcgcctcacccacgaagtgcaaggagcaggcggcggcggggagggggtgggagaggctccctcccccagccaagggaagccttgagagactgtgctatctgggccagatactatgctttccccacggtttttgcaatccacagaccaggagattccttcgcgtgcctacaccaccagggccctgggtttcaagcataaaactgggcggctgtttgggctgacaccaagctagctgcaggagtttttttttgtaccccagaggcacctggaatcccagcgagacagagctgttcactcccctggaaaggggctgaagccagggagccaagtggtctcgctcagcgggacccactcccatggagcccagcaagctaagaaccactgggttaaaattctcgctaccagcacagcagtctgaagtcaaactaggaggatcaagcttggtgtggggaagggcrtctgccattactgaggcttgttttcccctgacagcgctaaaaaggcctggaagttcggactgggtggagctcaacacagtgtggcaaagtggctgcagccagactgcctctctagattcctcttcactgggaagggcatctctgaaagaaaggcaccagccccagtcaaggggttatagataaaactcccatctcactggaccagcgtatctgggggaaggggcggctgtgggcacaacttcagcggactttaaacgttcctgcctgctgactctgaagagagcagcagatcctgacaaggagggctctcccagcacagcgcttgagctctgctaagggacagactgcctcctcaactgggtccctgacctccatacctcctgatggggagagacctcccaacagcgattgtcagacacctcatgcaggagagctctggctggcatcagcctggtgcccctctgggacaaagcttccagaagaaggagcaacagcaatctttgctgttctgcagcctacactagtaatacccaggcacataaggtctggaatggacctccagcaaactgcagcagacctgcagaagacgggcatgactgttagaagaaaaagtaacaaacagaaagcagtaacatcatcaacataaggaacccccatacagaaacaccatccaaagatcaaaggtaggtaaatccataaagatgaggacaaaccagcacaaaaacgctgaaaattccaaaaaccagaatgcctcttctcctccaaatgattgcaactcctctctagcaagggcacaaaactagacagagaatgagtttgatgatttgacagacgtaggcttcagaaggtgggtaataacaaactcctctgagctaaaggagcatgttctaacccaatgcaaagaagctaagaaccctgacaaaaggttacaggaactgctaatagaacaaccaatttagagaagaacataaatgacctgatggggctgaaaaacacggcacaagaacttcatgaagcatacacaagtatcaatagctgaatcaatcaagcagaagaaaggatatcagagattgaagttcaacttactgaaataagacatgaagacaggattagagacaaaagattgaaaaggaatgaacgaagcctccaagaaatatgggactatgtgaaaagaccaaacctacgattgattagggtccctgaaagtgacaggggagaatggaaccaaattggaaaacacacttcaggatattatctgggagaacttccccaatctagcaagacagggcaacattcaaattcaggaaatacagagaataccactaagatactccttgagaagagcaaccctaaggcacaaaatcatcagactctccacggttgaaatggaggaataaaagttggctgagcgtggtggctcacgcctgtaattccagcactttgggagcccgaggcgggcggatcacraggtcaggagatcgagaccatcctggctaacacggtgaaaccccatctctactaaaaaaatacaaaaaattggccaggcgtggtggtgggcgcctgtagtcccagctacgtgggaggctgaggcaggagaatggcgtgaacccaggaggcggagcttgcagtgagcggagatgtgccactgcactccagcctgggcaacagagcgagactccttctcaataaaaaaaaaaaaagttaagggcagccagagagagaggtcaggttacctacaaagggaagcccatcagactaacagcagatctctctgcagaaaacctacaagccaaaagagagtgggggccaatattcaacattcttaaagaaaagaattttctaactggaatttcatatccagccaaactaagttttataagtgaaggagaaataaaatccttacatacaagcaaacgctgagggattttgtcaacaccaggcctgccttgcaagagctcctgaaggaagcactaaatattaagaarggaaaaactttcttaatataagaaaaactttcttaataccagccactgcaaaaaaaaaaaacagtcgtatataaagaccaatcacactatgaagaaactgcatcaactaatgttcaaaataaccagctagcatcatgatgacaggatgaaattaacatagaacaatattaaccttaaatgtgaaggggctaaatgccccaattaaaagacacagactggcaaattaaatgtattcaggagacccatctcacatgcaaagacacacataggctcaaaataaagggatggggaactattcaccaagcaaatggaaagcaaaaaaaaaaaaacaaaaaaaaaaaactgggggttgcaatcctagtctgtgataaaacagcccttaaaccaacaaagatcaaaaaagacaaagaagggattaatgcaacaagaagagctaactatcctaaatatatatgcacccaatgcaggagtaccccgattcataaaacaagttctttgagacgtacaaagatacttagactcccacacaatgaaagtgagagaatttcacaccccactatcaatagtcgacagctcaaggaaacaaaaaattaataaggattttcaggacttgaactcagctctagattaagcagacctaatagacacctacagaactctccacccccaaccaacaatatacattcttctcagcacttcatcgcacttattctaaaattgaccacccccaatcaacagaatatgcactcttctcagcactacatcgcacttattctaaaattgaccacataattggaagcaaaatactcctcagcaaatgcaaaagaatggaaatcacaacagtctctcagaccacagtgcaatcaaattagaactcaggattaagaaactcactcaaaaccaaacagctacatggaaactgaacaacctgctcctgaatgactactgggtaaataatgaaatgaaggcagaaataaataagttacttgaaaccaatgagaacaaagacacaatgtaccagaatctctgggatgcagctaaagcagtgtttagagggaaatttatagcactaaatgcccacaggagaaggcaggaaagatctaaaatcgacaccctaacatcacaattaaaagaactagagaagcaagagcaaacaaattcaaatgctatcagaaaacaagaaataactaagatcagagaaaaacagaaagagatagagacatgaagagtacttcaaaaaatcaatgaatctggaagctggttttttgaaatgattaacaaaatagactgctagcaagactaataaagaagaaaagagaaaagaatcaaatagacacaataaaaaatgataaaggggatatcagcactgaccccatagaaatacaaactaccatcagagaatactataagcacctctacacaaataaactagaaaatctagaagaaatggataaattcctggacacatacaccctcccaaggctaaaccaggaagaagtcgaatccctgaatagaccaataacaggttctgaaattgagacagtaattaataacctaccaaccaaaaaaagcccaggaccagatggattcagagttaaattctaccagaggtacaaggaggggctggtagcattccttctgaaactattccaaacaacagaaaaggggggactccgctctaactcattttatgaggccagcatcaccctgataccaaaaccaggcagaaacacaacaaaaaaagaaaatttggggccaatatttcttatgaacattgatgtgaaaatctcaataaaatactggcaaattgaatccagccacacatcaaaaagcttatcatyacataaacagaaccaatgacaaaaaccacatgattatctcaatagatgcagaaaaagccttcaataaaattaagcaccccttcatgctaaaaactctcaataaactaggtattgatggaacacatatcaaaataataagagctatttatgacaaacccatagccaatatcatactgaatggacaaaagctggaaggattccttttgacaaccggcacaagacaaggatgccctctctcaccactcctattcaacatagtattggaagttctccccacagcaatcaggcaagagaaagaaataaagcgtattcacataggaagagaggaagtccaattgcctctgtttgcagatgacatgattgtatatctagaaaaccccatcgtctcagcccaaaatctccttaagctgataaacaacttcagcaaggtctcaggatacaaaatcaatgtgcaaaaatcacaagcattcctatacatcgaaaacgggcaggcagagagccaaatcatgagtgaactcccatttacagttgctacaaagagaataaaatacctaggaatacaacttacaagggatgtgaaggacctcttcaaggagaactgcaaaccactgctcaagaaaataagagaggacacaaacaaatgtaaaaaaattccatgttcatggataggaatgatcaatatcatgaaaatggccatcttgcccaaagtaatttatagattcagtgctatccccatcaagctaccattgactttcttcacagaattaaaaaactactttaaatttcatatggaaccaaaaaagagcctgtatagccaagacaatcctaagcaaaaagaagaaagctagaggtatcacgctacctgacttaaaactatactaaaaggctacagtaatcaaaacagcaaacagcatggtactggtaccagaacagatatatagacccatggaacagaacagaggtctcaaatagcaccacacagctacaaccatctgatctctggcaaacctgacagaaacaagcaatggggaaatgattccctatttaataaatggtgttgggaaaactggctacccatatgcagaaaactgaaattggaacccttccttacacctaatagaaaatataactcaagatggattaaatacttaaatgtaagatctaaaaccataaaaaccctagaagaaaacctaggcaataccattcaggacataggcatgggcaaagactttatgactaaaacaccaaaagcaatggcaacaaaagccaaaattgacaaatgggatctaattaaactaaagaacttctgcacgcaaaagaaactatcatcagagtgaacaggaaacctacagaatgggagaaaatttttgcaacctatccacctgacaaagggctgatattcagaatctacaaagcacttaaacaaatttacaagaaaaaaaaacccatcaaaaagtgggtgaaggatatgaacagacgcttctcaaaagaagacatttaactttgggaggctgatgtgggcagatcacaaggtcaggagatcaagaccatcctggcaaacatggtgaaaacctgtctctactaaaaatacaaaaaattagccaggcatggtggtacgtacctgtagtcccagctactcaagaggctgaggcaggaaaatcacttgaacccaggaggcaaaggttgcagtgagccaagaccgtgccactgcactccagcctaggtgacagagtgagactttgtctcaaaaaaaaaaaaaaaaaaaagaagaagcaatttatgcggccaacaaagatgaaaagaaagctcatcatcactggtcattagagaaatgcaaatcaaaaccacaatgagataccatctcatgccagttagaatggcgatcattaaaaagtcaggaaacaacagatgctgaagaggatgtggagaaataggaacgcttttacactgttggtgggaatgtaaattaattcaaccattgtggaagaagtgtggcgattcctcaaggatttagaaccagaaataccatttgacccaacaatcccattactgggtatatacccaaaggattataaatcattctactataaagacacatgcacatgtatgtttattgcagtgctgttcacaatagcaaagacttggaaccaacccaaatgcccatcaatgatagactggataaagaaaatgtggcacatatacaccatggactactatgcagccataacaaagaatgagttcctgtcctttgcagggacatggatgaagctggaaaccatcatcctcagcaaactaacgcaggaacagaaaaccaaacaccacatgttctcactcataagtgggagttgaacaatgagaacacatggacacagggaggggaacatcacacactggggcctgtcagggggtagggggctagtagggggatagcattaggagaaatacctaatgtagatgatgggttgaagggtgcagcaaaccaccatagcatgtgtatacctatgtaacaaacctgcacgttctgcacatgtatcccagaacttaaagtataataaaatagtctatttgcttacaaactgaacataaaggaacactttttaaaagaaatcgacttgctaatattgtcttcaataaatccagacacttcaccacttacatccatcagaaatgacaaatgataatgtagcttttaacataagtctcttcatttaagtataaaaggcaatcttgctttggactaatctttccttatctggggaattttttggaaagagacaaaaagcttatctttcgtttttagcatatgtataaacagaacaaaataaaaacagcaagccttaatatctttcgtttctcattttaatcttgctaaaaaatatttaatcatttgtataaaaatattgcaagcaacaaaagcgtattgtggtaatagttctacaactcaataaatttaataaaaatcagtggatgagtgaattttatatacataaattataccttgataaagctgtttttaaaagttctaaatcaaaggtgaaccaaaccagtatttcattcaaacaagtccatgggaaaaaaaaaaacaaaccatatcacccatcaattcctaatcaatgttgctaattacctatttgatctccgcattatcattattaccatacatttatggctcacttttcagtttgcaaaattcacgtgacaactctgtgaggtaaacaagttagctattattactctgatatagcaagtttttaaaaactggcaactgacttgcctaagagtcacaggactattaagtatccatccaaaagcaagcccagttctgttgaacctaattcttctcaacacactgctcttccctctaaatcattttaaaacaaatttcctacctaccattgcattcaggaaaacttcgctccttggcgagagcatttacaaagtcatctaactccaccattccattctctgtttttaaaaagagtttagattatacattctggtgtatttttgcataaaggcaaatttacattttaacacaactatttttaaaatktacttgatccttcatttcatcatcctatttctccttcatatcatgtctcataattctttctagattaagtcagttcatttgaacaattattgagagcrtattagtgccaagaaccatgctaggcaccgagaatacaaaaataagaaagacacagtccttgctttctcaatatctattacatgcaaaggactgagttagatactaatttcttaacagatctaggaaaaaagaaagatgtccatatagatagaccatgagagagttaaggagtctatttcataccatcttgaaaacccactcaatatactatccattaagacaccttaacaatactaaccagccctgataaaaccaaggatycccatcyctatctccctagtatccatgtggtccaatgttttacctatttttagatataaaccctcagagtgatcatgtcaatcctgataagcagcaaaaagggctcaataattttagtgccacccactctttatataatttttaattgaatcttctttcagatttgccttagctaaaaaattgtgcccagattctgaggattcacttctaatgttattctccaatcagtctttccccaaaatgtcacctctttcctctcctcaattgaacttctgttgtggaaaatgcttagttactgataaaaataacttccctagtataaaaacccttcctagaaacttaaactctgcctttaacttaggctagtgactgggatatgccactcaacatctaaatgttaactgctaagcatacctggctctaaattccsccgtattttgtaatctccaattattaatctttggatccttgggctakttgtgcagatatatccataccccttagatattgtggtcttrccatctgaacctygctacaactggatcagtctccccagcactaccctactattaataggcacagatagggatagtgatgaagagctttactgaaatgatctggaaataygaaaggctccaaaccaayccatttggtcagaacttaaaggaatttttttttactattttccatttttatatctgaattttctttagaatgacccattctgtcccattcctaatttctaattgagaggaattcctccaatatttaatactatccgataaaaatatctaactttctcagaaacttcagtgttatcagtctctcaccatttctactagtgtctgtcacaatcttctggaattcttcatctaataaattaattcctgttgaaggcaaaatagactgaagttcttctgctgcaatgtaattttcttgaagtttactgatagcttcacagaagttttctaaatacacaaaatgtagagaactattaggcaacagaatttatgtgtcaaaagcaataatactcaaaatctttagaaattagagaacaagttttatctattttatattaccttatagattttataagactgcttttctctccatatctgtttatattacattatatttaatctttctcttacagctcaaacacagaacygtcctaacattctataaacatttataatctacttgtttgggggaacagyctgttccagtggcccagccaatgctgcttgcttctgattaaaataaaattaatggggccaggtatggtggctcctgcctataatcacggcacttcgggaagccaaggcaggtgggtcattggaggtcaagagtttgagaccggcctggccaacatggtgaaaccctgtctctactaaaaatacaaaaattagctgggtgtgatggtgcatgtgtgtagtcccagctactcaagaggctgaggcagaaggatcacttgaacccgggaggcagaggtcgcagtgcactgagatcgcaccactgcattccagcctragtgtgtgtgtgtgtgtttgtatgtgtatgtgtgtgtgtaaaattaatgagtccaagaaataaaaataccgaagtgttttgtttaaattgaagaattccaagcaaaaatgtagagttcttcaccctcccattaatttactctaccatgttttcagttcataaccttcaaaaaataaaatcttagaagcaaatacacatagacgtcatgtgcttcttactgatgcactgagatgggtacaatatcacttctgaggtaatctgaccaaaaatgcataacctgaatttatttgtgaaggaataaaagaaaaatccaaaatgaagagtattatacaagacaactagtcaatagtcttcaaagtgtcaaggtcatgaaaaattgaggaagcatcccagactgaaggggactaaagaaaagtgacaactaaatgtaatgggtgattctggattagatcctggaattgaaaaagaacattcatggaacaactgacaaatttgaataaggtctgtagatcagtaacagtattgcatcagtgttaatctcctggtttagatcatgtcctaatggaaatgtttgtactatttttgtgactcttaagaatgtgaaattatttaaaaatgaraagttagaattttttaatgtaaatcatacaggcagtcatattccataaaagtccaattaccattaatttgttttgggaagttatgccagataaactatttcatacttctctatattcagaacattaagtatggctgtggtagatgacatcattttattttagtgacacgagaaaggtagatatcactttcttctgacagcctcttctacccatgtctgtctgctgtttcattattcctttaaccaaggttttaattcttttgaaataaaaataactctcagaaattcaaatgaggcacaaagtagcagcagtgcattggtaaaggaatcagaatcaggatgataatcactgtgcctccttaatagatcacattccttttttccattgagttatttgaattatgcactaatgtatgaatcacaaaattttcactaaacaatcattttatctattacattaaatactaaatgtgatatgacagtaagtttttaaaagagaataaatatgacttaagtaacttcagcagaggactacaggaagaaatctttaactgggttccacacacactgcttctatgatgaaagtaatacaaggagagaaaatatattggttgggaaaccattgctcatctttgagaaaaatcataaagacttggagccctagatatatagtattattttttcctgatattctccttccataagagataatacctgaagtactatgaatattatatatttaaattacagcactctaagcaaaaatttcacacagatttcctacttgtttaaatgtttaataaattacaaaataaacrtttccaaaagaaaccaggccttctactttctaggaaatattaatgattgcaattaatcactgaataagtttctcaggaaaagttaagctcctccctaaagagggcatctggaaaggaattatcatcaaaatcacaatattatatccattagtctatgtgtcagaagtggcaggccggacgtggtggctcatgcctgtaatcgcagatccttgggaggccaagacgggagcactacttggggccaggagttcaagaccagccttgggaacattatgggacccccgtctctatgaaaaaaaaaaaaagttagctgggtgtggtggcatgttcctatgctcccagctacatgagaggctgaggaggtgggaggatcacttgaacacaaaaggtcgaggctgcagtgagctaggatcacgccactacactccagcctggttgacagagtgagattctgactcaaaaaataaaaaatagacatactattcagtggcattaatcacatttacaaagttgtaccaccatcactactgtacatttccagaatttttgcataggcatggtggttcacgcctataatcccagcactttgggaggccaatgcaggaggattgcttgaggccaggggtttgagaccagcctgggtaaccctgtctctataaataatttaaaaattaaaaaaaaaagaagtggtggttacccagggtgttaacaattgaaatgcttacaactatctaataattgattcattctgttcatttctgtgatgactgaagaactcaagaacctagatttttacttacccagagtactaattgcagttttttccgtagacgaaacctgtttttggagactggaatgctttcttacagctggcttctgaagttttgggatactagaaatatcacttttatccagagacttactgaggcttgtactactcttcaagctttgtggtttagactttgagtcatgaatttcacccttctctgaatgttttttaaagtttatgccattctttgaatatggttcttggactcctacattactgctgccaaccccacccagaaattttcttatttgccaagtattttttggtcttttagattcaaggtcatcattctccataattttgctataatattggttgctttttttatttaactttttggatattgaaggttcagggagtttggaagacaaactatttttcttcttatattttagatagcatcctgctacacttgataactttctgtctgaagtaatttcattcaaaggtgatccttctgtaattgctaaataagagaaatatacaattatttcatttacctgtataatttgcaatacatttcaaaaataacaactaagtcctcatgaaaactattcaagaaattatcagtttcttaaacatataaaacaaaccaaaaaaattaaagaactgacagtcaaaagattggactattaactaggtcaaatgtaatgtgctgctttaatatatttacatattcccatccaaagctatttaaagttacagtaaaactaaaatgatagcctaatgaagtatatggttctcattccccactccttcccaattgacaaagataatagattaataagctaatacagatagaaattccttacttataaaaggcagaactatgaggaaaggggagattttatttataaaattagaacttaagtaattactctcctaaatattcttggtatttgtggaggaaaaaataacttcatatataaaacaacatctttagaaaattattaacacaatgccccaaactgagacttcatttacaaaatktatctgatgtttcagaatcttatcttacattttaataacacattttaaagtatttcaaatgttataatatttgatcctcamaacaactctatgagactgtcaygcagcagcaatataatctcaactatgaataaattttgcctagaggaaataaaaaagtttcttatcttagactctatgagaattaacaattgaaaataattaaatgaaaatattttaatattaaagtctgaaaatacttaaagatggtgctatatatgtatctctaagtgcactatgtatcagataaataggttagtgagcaggtaaaaatataatctttgacacttctgatttaggcttttggaccacaccaaacagcctgcccagaatctctgattctcactgattaagggctttcccagtccttcaaatgcagagacatcaacataaggcaacaagaaacatgaaaaatcaaggagacataatactaccaaaagagcacaataatctcctgatagctgaccccaaagaaatgaagatacagaaacttcctgacagaattcaaactaattgtctagagaaagttcagggaataaaattaatgacatacagagaaaaaaattcagtgaaatcaggaaaacaataaatgaccaaaaacagaattttacagagacactgaaattacacaaaagaaaataaataaacaaaaatcaagagctgaaaagtgtaatgaaagaaatgcaaaatacaatagagaacatcaacaacataactgatcaagcacaagaatgaatctgtgaacctgacaacaagttatttgaaaatatatagtctgcggtgaataaaataaaaagaatgaaaaataatggggaaagcttacaggatttatgggacagcatccaaagagaaaatagtcaagttataagagtttatgaaggagaagagaaagacaaaagagtagaaaacttacataaagaagaacagaaaacaatccaaatttgggcaaatatataaatatccaggtacaggaaggccaaatgcctcyaatcagatgaattcaaacaagactacaccaagacatattataatcaaactgttaaatatcaagaacaagagggagattctgaaaatagcaaaagtaaataacatatacgttccaataaggacagcaaatttctcagcagacaccttatgggtccatagagaatggactatatattcagagtactgaaggaaataaactgccaaccaataatactgtacctagaaaaactgtccttcagaaatgaagataaagactttcccagacaaaagttgaaagagttcatcccctatatttgtcttacatgaaatttcaaaaagtgttcttcaagccaaaagaaaaggatgctgtttagtaacacaaaaaataaatgtgtaaaactcactggtaaaagtaagtacacagtcaaagtcagaatacactaatactataatggtggtgtgcacttcacttacatagtatgaaggttaaaaataataaaagctacaatgatttgttaagggaaacaatataaaaatctgtaaattgtgacatcaaaaattataaatgcagaaggagagatgaggtaaaagcatagtttgtttatgcaagcaaagctaacttgctatcagcttaaaattgcctgtcataactacaagatattttgtaagcttcagagtagccacaaatcaaaaacctacagtaaatacacaaaagataaaaaagtaaaaaaaaatcaacagagaaaaatcagtcacaaaagaagagaaaaataaggaaacaaaggatctatgaaacaagcagaaaacaattaacaaaatggcagtagtaaaatccttccatatcaataactaccttgaatgtaaatgaattaaaatctccaaagaaaagacataaagtgccatgtggaactgtgaatcaattaaatgtctttcctttataaattacccagtctcgggtatgtctttattagcagcatgagaaaagactaatacagcaaccaaaacagtatgtataaaaatagacacagaggccgggcacaggggctcacacctgtaatcccagcactttgggaggctgaggcaggtggatcacctgaggtgagaagttcaagaccagcctgaccaatatgttgaaaccccatccctactaaaaatacaaatattagccgggcatggtcatgcatgcctgtaatcccagctactcaagaggctgaggcaggagaatcgcttgaacccaggacgcagaggttgcagtgagctgagatcacgccactgcactccagcctgggtgacagagcgtgactctgtctcaaaaaaaatggacacagagagcaatggaacagaataaagaacccagaaataaagtcacatatttacacccaactgatcaactgttggtttacacccaacaaagcaacaaagccaacaaagcagtcaagaatatacactgaggaaaggataccctcttcaataaatggtgctgggaaaagtggataaccatatgcagaagaatgaaactaaacccctatctctcatcatatacaaaaaacaactcaagctggattaaagacttaaacataagacctgaaactaaaaaactgtttgatgataacatagggagaagtctacaggacattggtctaggcaaagattttatgactaagatctcaaaagcaccagcaacaaaaacaaacatagacaaatgagactatattaaactaaaaagcttctgcacagccaaagaaataacagattgaagagacaacatcttgaatgggagaaaatatttgcaaactattcatctgagaagggattaatatccagaatttataaggaattcaaggaattcaaacaacagtaaaaaaaaaaaaaaaaaaaaacaaccattaaaaactgggcaaagagccagacgcggtggctcacgcttgtaatctcagcactctgggaggctgaggcaggtggatcacctgaggtcaggagttcaagaccagcctgaccaacatggtgaaccctctctctactaaaaatacaaaactagctgggcatggtggcatatgcctgtaatcccagctacttgggaggctgaggcaggagaatcacttgagcccaggaggcagaggttgcagtgagccaagatcgcaccactgcactccagcctgggcaacaagagcaaaactccgcctcaaaaaaaaaaaaaaaaaaaacaaacaacaacaacaacaaaaaactgggcaaagaatatgcataaacatttctaaaaagaggacatgtaaatagcattttgagtattatattttatctccttgatttaagagggtaaattattcagagaaggttttcaaaaccctttataaaataaaacttataaattaagatttaatgtaaagactttaattataaacaaaacttgtcatagcaacaagagctcacttacaaacatcctcatactgttcctgtagctcattcaaagtaaatataatatccccaatatccaccatgtggttacctgtaatagaataagttcaaatactgtatttacttttgaacatagatatatctgccatcctattctaatatgaaaacaacacagaatgtgtggcaagtaggaacaaagagccaactattacaaagtcttgaataaaatctgaaatcatgaattaataactcagtacacgcccaacataagagtaagaccatggtcttttctccttaataaaagagtttttcatcaaaagaaatagtcatgttttaagctcttatgctaatcaggatattttttcattttacatgttttttagagtttattacaggtatttatttactcttttgacttcatttctagattgtgaactcctcaagaacagaggatgtgtttttcctttgtttccccaatgcctcgcaaagtacctacttcttatcactgaaaattatttttggctgaacaaaatatacagaaggtgatttaaaaaacaatgtaatgtctacatagtgaatagcaaacaacgatttactttgtaccttctctgtgtccagcactcttataacttcccattattcctgcccctgcccgcctaagaccattttacttcttggataatgcatgattgaggatgtgttcagatgcagtcaccttgaataatgtcatttcaattgtgcacagaggtagaaaatgctttgcccaatagttcttgcctccatatatttgattttgcttgccatccaagatgaaaaagactgaaaatttacttatctataatagtgatggttttttcttcagtctattcataagaaatcaactgttcaataatatgcataagtgaaaactgagaggaagaagcaaatttttattgttttccagaaacaggaagatatgtttattttactgtccaattatttcctttaaaaagttgaatgtttgataaaataaacttttggtaccatagaaacctttcaacatctacaatgacatattattactatgcacaacttcaaaaacaaatgcctccagctccaagtaaagtgatgttgaacatcctgactatagttcggctgtaggaaatttcttgtattgccaatggtttcctcgccttggaaaaaaatacacaattgaaaaatataaataagaccttcaatgagttgggaataataaaaatgatatctgaagttcagtcatctagatcttgggaagtttgcagtagctctaagggttcaacaagcaaaataaaaccctgtgaatatttaaacttcagtcatccaggaggtcctgtaggttcacagtcggtctatcaaaaacaaaagctattcctgttgtggtagaacttggtatcaggttcatataccatttttcaccagctcatgaactccattctcatcgatgattaaaggtgcatggaattctatatctgccacataactttctattccttcctcagcattagagataagaggagagatttcacactggattggtacatcattggcatcctttaagtgggaaattgctggaagatgatagccattttcatctataaagtgacccctgcattgagaacccagcaataatgaaagtgtgccttgcggtagtagagttgtctttcccattctgactgtcagcattctttagtgtggaaaagtcatcttcccataatatttcataaaccacagacttctttgtgaactagaagatttttctatacttattatggaaaagacaaatttttccatacttattccactgggtttatctggcttaattaagtgctgttgggtatccacataaggaatcttcttttgagccacatggtgctacaactgaggttcataaacattgacaacatctctcagaaatggtacagtgaataaatggttggcaatattccccacattgaacagcagtcatccatctgagcttcatttctgagctgttgccagggaaatatcactatattctaccacctggtaaaatccatccactcggcaaaccactccaaccagttctgtagggtttgttttctctaccacctttgctccacagtctgctcctttctgaatgcaaaatccaatgaaccgtgggtctgccacttttactaatacactgtcaacacaatagacacgaatgttccaaatgcctctttgctccatatcctccacaatatgccaggctgcaagagcctgacaaagaccaccattctcatctggagccatagaaactttgttcttctcttccaaaataatttgcccatcaaaactcatggcagggagcattccttactgaaaaaaagattatattttctattttttttaaaccaaagtacttgtgcttggtgaagaactcctttgtagattctgctgttctgccactgatcattatatggaataatgcatttgttgccataatatttttcagctaactgttgtagcttcaggatatgctctgcttgaatctgaaaaagtgtcttatgggatggcaaaccaacatcatacatcccctttggatatgcaacgagtctagtcccctgcccaccagctagaacaactgtgactttgttctcagaaatctggaaaactttgctttcccaggcctggagctgatctagcttccctgcagcactgcccagtacttctcgagggacaggttccattcacgcatccaccttttcttgatgagaggactggttaaatccttcaatggccttttggaaaaagaagttcagttcctgaaagtcgatggcctggagctctgcataaagttctacctgtcaggcttcttcaagctcattccagaaacgtagtgggtgttcttgctcagctttggacaacctgagtttaaggtcattagtgttcataatgctctgatagccaagctttgtgaaaataggggtgcaatgcatgtatctacaaagcttcctcagcgggaccacagctccacccggctccttctctgccggcgtcctacgtcccctccaaatatataccctcatcctgggccatggcggcggggtggggcaagccaggaccagggccaaggggagtggcccagccatcctgcccctcttgccgccacgagaagcaaatatgtaaattaaagaatagtatcattttggtgttgggtccacctgattcactctgattctctgaaaattggtaaactatgtatttcaggtgcaggcctttaaatcactgcaaagcaagtactatgtgtttgaaccaatcaaagaaatgctagacaaaattggtgctaaattgccttctgattagagattgcttcctacattttggtttcttatttccttggtatttatcctcattctggttttgattatagttctaacacttcccataacctccccagtaactggcacttgtggtagattgattccatgtcccatgttcttagatcatggcttaagtcctaagacaactcaaagcttcaaccctcaagctcttgaatctgatcactgaaaagtattctgttagaccatacatgtattaatccagtggaaaaggccatcttgcttttacctgctcttcatttagaaaactcctttctctgaacagaagtccaatgtcaactaataagagtatggtagtcaaccatgttcacagattcattagctcttgctcaaatttattccttgcatctatgcaataataaacacctattatgaaactcccaaacaaatattacctacttaaatagtccctagtggccaaagacgcgttcgagaatctgaaatgactatcttggtccctatctaacttagcaaaaccttaaagaatgattcctggttgaaactaaggcaatcaatatggtcataggtatcacttatttcctaaagggagctcaaaacagcctcctactctaaggtatataattctggaggaaattcatcctggaaaatgcagctacctactgtgagaggaaaaaaatgatcctaattattaaggtcatatatgcaaggcaacgttactctgaaggtgctaagtgaccattaacactacatttctgtaatcttcaggtagctccacaatattgaaagcctcctctagcaaaaactgcactagtcacaacttcccacccagttcaatttccagatctctaacctccatgagagaaaaaaaaaaaaaactgctataccaatacagtatttcagaaaccaaaatacctgaccctctaagaactgccatcagctgattttccatatggcacttcttgccatatcttaataaagcaaatcctccttggactttcctgaaaatttcagggggctaattccttctccctcattgcaaacatctataaagatgaacatattatctacctatcatctccaacaatataccaaatgcaaaaataagatgctggaacagtacctgcagtgctatgtcttcttttagcaggactgtgttatattattccttactgcaaaattctgctacagaaaaattaacatctcctacctgggtgacccaaaatttttggcatcctggggttaatgtttcctttaatattaaaatagctcagaccccagagcatatactaacataaatcaataccttgaccaaaatttgaggattcctgagtcacttgtgctctttttatttttgctttgtttctctattcccatggactcttgatctcactcacattattaccttctacaggtacaatcctctttctgccccaagcagatcgaacatagaacctataggtctttatccttgaactctccccaccaacaatactaatacaagtctattgtatataaccaacttttactggtaatttgcaattgatgggagtaagggagttcttaagaagcacagcaagcaactacatactatagtcctaaagttctatggttactctatcctcactcactcttaggttctatccatcttcttcctccactactgagccactactatatttcaaattcctgttgctttcttatgtacagtactttatcttatctttttgctcaatctaggtgtttctcagtatgttttaactctcataatctaacatatctattaagattattttcctggtcaaaagataaggaccttccttatgaggaattttgcctcaaactacagccagcttattcatatgataaaatgaagaacattttgttctttctgattggaagatgtggcatgaggaatcagaattattcattcattcaacaaatatttgttgagcggttaatatgtgctataagcaccacgctaggtactgaagatacaatattaagctaaagcagacatgatatctgctcacctgatgctcagtcttatttgaaatatcaatgtcaatcaaacaaaaatacaaatttcaattgcgaatagtgctataagagtgtataacatgagaatctgacctactcagagaggtctgggaaaacatccctgaggaaaagacagttgagtttggatctaaagtgtaagtaggaattacctaaggggagaaaaaggttcaaggaagagaaatgaacacatgcaacagctatttggcaagaaggggcatggtatatagttgaaactctaagaaggcacagagagcaaggaagaatatggtctcagataaagctgaagatctgggcaaaagccagaacccacaaggccctgtaaaccacactaaaagagttatttatcccaagaggtattattagattttatatgaggagaataacatgatcagacccgtatttgaatgaagatcattatggctgcagtataaaggaacataagagtggacaggggtatacttgttaggatgaactgcaatggtcctgaggaaaggttatgtgaacttggactaagatagggagataaagagaaatagatcacgtctgtaatcccagcactttgggaggccaaggcaggtggatcagaaggtcaggagatcgagaccatcctggccaacatggtgaaaccctgtctctactaaaaatacaaaaattagctgggcttggtggcacgtgcctgtaatcccagctactcggaggctgaggcaggagaaccacttgaaccagggagtcggaggttgcagtgagccgagatcacaccactgcactacagtctggcgacagagtggagttaaaaaaagagagagaaatagaaagacttaagagatatctatcttatatatagaaaaaaggagaaaagtttttaaaaagatgtatctaagactttaaataagggaactattgcatgaggaatagagaagtagagttgccaaggatgactctcaggtttctgcctcacccttctgtctgttctaggtgccaagcactgtgataaatgtttatatttaattcctataacaattctataaaattagtatcatttgtccaatatacctccccaaataaagcaggagacctggagacccaggccagaactccataagccaaaaagcaaggtactgcagctgtttcatatatgatttctgttgttcctggtagggcatgccctaaaggcttaagaatagtctttaaaatccccattttacattttcataccccatcatatccttccactcatgcctcaccccagagcacaccatacctgacttcctaagagaactccatgtggcctgattctatctccagaccacatatcagcaaccaaaagcccactacaaaaccaccattaataaatgacaaaaactagtggaagcccactcaaaaagatgtcatgtctgattatttttctgccatatttacacaaactgttcctttggcttaagatgtttttctcactctttgctaccaccttcaactacttaattcatactgatccttcaagatttagctcagacatc

SEQ ID NO: 96508 - DNA, 82384 bp, Homo sapiens
ttttgagacggagtctcgctctgtcgcccaggctggagtgcagtggcgggatctcggctcactgcaagctccgcctcccgggttcacgccattcccctgcctcagcctcccaagtagctgggactacaggcgcccgccactacgcccggctaattttttgtatttttagtagagacggggtttcaccgttttagccgggatggtctcgatctcctgacctcgtgatccgcccgcctccgcctcccaaagtgctgggattacaggcgtgagccaccgcgcccggcctcctgccctaaagtctttagtggtttcccacaaaccattaagctttgaactgaccattatattggcctgctactgacaattaactcagcacggctggcggctggtaggttgagagagacagcgaaccccgacaccagataatccctccgtcccttctggtcctaacattgtggcattccagtgatgacctgcttccttataaattattttcacagaactcttgtaactatggtaagtcagatggagtccttccctggagacagagaaaaatgggagacaaccagaaaaagccacttggagccctgagagtgtggttttccagaaggaagacaccctggcttacctgggcagcctggccagcctcctggacccaaggacgtggtcacaataaaactgctcatgtcagacttgcccttgtatatttatagttccactcacccttagccctttccagaagttcaaagtcaggactggcaatatctctcttcctgcatattaagaggactgtttcagacccaaactaaaaaaaagtctaagggtttctaataaatgagtgcaagagaatgcaaaagcacacttcttccctccccccagcagacaggtcatatagggtcacaacgggttacccttccggacagaggcagcagtgtttaattattcaatctgcaggtgttatgggtgcccacaatgtgtcaggccctgggctgactgctgagacacacagatggcggcccccgccactttcctgagaaaaattacatcattccaccaagcctgaaaccactgagtttttctaagttaccacacacacccacttccaaagtaaaaatgcaccctggaggattttatgtgcattggaactttcatttcaaggctataaccagttcagtcaccctatataggatggccagccgaagtccctcaccggatctctcaaggcttccttgtcccaaggtcttataagcaaatacgatggaaaaggattacttctctctccttcgagaaagggaaagcatagctcgattggcaggttttttttgtttttgtttttgtttttgttttgatatggagtctcactctgtcacccagtctggagggcaatggtgtggtctcggctcactgcaacctccgcctcccgggttcaagcgattctcccggctcagcctctcaagtagctgggaccacaggcatgtgccatcatacccggctaatttctgtatttttagtagagagggggtttcactatgttggccaggttggtctcaaactcctgaccttgtgatctgcctgccttggcctcccaaagtgctgggattacaggcgtgagccactgtgcccagctgttcaattggcatttttagagaaaagatgtaaaaatattcagcctcactcaaaaccaaagaaatggccaggcacagtggctcatgcctgtaatcccaacaatttgggaggccgaggtaggtagatcacttgagctcaggagttcgagaccagcctgggcaacatggtgaaacccccccatctctacaaaaaatacaaaaattaggctgggggcggtggctcacgcctgtaatcccagcactttgggaggccaaggtgggcagatcacttgaggtcgggagtttgagaccagcctggccaacatagtgaaaccctgtctctaataaaaatacaaaaaattagccaggtgtagtagtttgtgtctgtaatcccagctacaggaggctgaggcaggagaagtgcttgaacctggtaggcagaggttgcactccagcctgggtgacagagtgagactctgtctcaaacaaacaaacaaacaaaacaaaaattagctaggcgtggtggtatgcatctgtagtcccagctactcaggagactgaggtgggaggatgggaggatggcttgagcctgggaggcagaggttgcagtgagccaagattgtgccactacactccaccttgggcaaaagagccagaccctgtctcaaagtaatattaataataataataaataaaagaaaaagaaatgctaattaaatgaaccattaatttttgtcagtcaacctggtaaatattaaaacagggtttaaatacataacattggcaagagagcattgccatcttagcagggagtgtgatatggtttggctctttgtccccacccaaatctcatttcaaattgtaattcccacttgtcaagggagggatctggtgggaggtgattggatcataagggctgttccctcatgctgttctcataatagtgagtgagttcccacgagatctgattttgttttttttttttaacagagtctcgctctgttgcccaggctggagtgcagtggcgcgatctcagctcactgcaagccccgcctcccgggttcacgccattctcctgcccaagcctcccaagtagctgggactacaggtgcccgctaccattctcggctaattttttgtatttttagtagaaacaggatttcactgtgttagccaggatggtctggatctcctgacctcgtggagatctgattgtttataacagacagtttcccctgtgctcttgcttgcctgccgccatttaaaacgtgtcttgcttcccctttgtcttctgccatgattgtaagtttcctgaggcctccccagccatgcggaaatgtgagtcaattaaacctctttcctttataaattatgcagtctcaggtattcttcatagcagtgtgaaaactgactaatacagagcatacatggaggctactcaatgggcatacctttgatccactaattctacttatttcaatttatcctaaagagacaaaggtgaacattacaaattttttacagtaaatatacattactccatctagcataacttgtataatgagggggggaaaagcaaaactatttttattttattttttatttatttattctttttttgagacagagtcttgctctgctgcctaggctggagtgcagtggcacaatcttggctcactgcaacctctgcctcctgggttcaagcaattctcctgcctcagcctcccaagtatctgggactacaggcacacgctgccacgcctggctaatttttttgtttgtttgtttgtatttttagtagagacggggtttcaccacattgcccaggctggtctcgaactcctgagctcaggcaatcggcccgtctcagcctcccaaagtgctgggattacaggtatgagccactgcacccagctgcaacactatttttaaaacagccagatgcaagagaatctcttgaacacaggaggcagaggttgcagtgagctgagatcactccagcccggatgacaaagcaagactctgtctcaaaaacaaaacaaaacaaaaacaaaaccacccaggtgagtgacaggggtaaagaaatggacctcttggatgattcctgcaaagtcccctgattcctcacctatgcagacaagactttttttttttttttttttttttttttgagacagggtcttgctctgtcgcccaggctggagtgcagtggcgcaggaacagctcactgcagcttcaacctcccaggctcaagcgatcctgggactacaggcgaacaccaccacacatggctaatttttgaattttttgtagagagactcccactatgttgcccaggtgatcttgaactcctgagctcaagtgatcgcccaccttggcctcccaaagtgctgggcttataggcataagccactgtgcctggctacagacaagacatctatggaatgttaggaaagctggatttgaggatgatcttgtgtcaggaagacctgagacagtggcagccagtttctatctcactgttaaagttgtagcatccggccacgcatagtggcttatgcctgtaatctcagcactttgggaggctgaggtgggcggatcacttgaggccaggagtttgacaccagcctcgccagcatggtgaaaccccgtctctacaaaaatacaaaaattagccaagtgagtgtggtggtacatgcctatagtcccagctactcaggaggctgaagcacaagaaccgactgaacccgggaggtggaggctgcggtgagccgaggtcatgccactgcattccagcctgggcaacagagcaaaattatgttgcggaaaaaaaaaaaaaaaaaaaagctgtaacgtccacgctgatatctaggacaatttgtaaaaatctcaagtgtctttgttctttgtcagttagcagaaaagtttgtcattgcagtagttctgtggcattctcactccccagagcatctgaataaagccagaagagctacccctccctgtggggcagctagctcagggatggtttagcaaggcttgaggctgtgccagtgaaaaatgcttgagaatttttgaaaaatacaagtccttcttcagccctttattcaaatctcctctgaagtaacaccaccaacaagtttaccaggttgtcgggaggcctaaaaattgttgttttaagtgcctcaagctaaagccaatgctaaggcttgctctcctgtagaggaggatgggcagactctctgggggaaatatgacctgtgtttttcagcctcttttccaaagaggggcaattcctttcactcaccagaaagagcagctgcacacaagactgcagtgatctgtgccctaggggcaaagcaactgctctctttgccaccatcaagtcccactcatccccaatcaggccttattcaggagtgggctcattattttccatcaccttggtcaggggtggtggctcatgcctgtagtcccagtgctttgggaggccaaggcaggtggatcccttgaggccaagagtttgagaccagcctgggcaacagagacaggccaacagaagaaaacaagaagaagaaggaggtagaggaggagggaggaggagggaggaggaggggggaggagggaggaggaggaaggaggagaggggaggagggaggagaggagaagaaggggggaggaggagggagtggaggagggggtaggaggagaagtaggaggaggagaaggaggagaagggaggaggaggggtcaggaggaagggaggaggaggaaggaggaggagggaggaggagggaggagggggaggagggaggagaggagaggaagggggaggaggagggaaagggggaggaggagggagaggaggagggggtaggaggagggagaggaggagggggtaggaggaggaggagaaggaggagaagggaggaggggggaggagggggaggaggaggggggaggaggaggaggaagaaggacaggaggaggagtaggagaagaagaggaggagaagggggaggagagagaagaattttccatcaccctgtgggtctcaggactgaggcccggctctgccacctacttgctgtgtgaccctgcgggccagtcacttcctctgagcctcagtaaaactacatggaagggcatttgtgtgggctttgtggttgtcgtttgcactccaattggcaaatgactcacatcctttcaagaagggtagtttggagagtagaacggcctaaaagtctggtgggcgtggacggagaagaggaagctgggagaggagactccgaacctccgaggctcaagcggcgcgcatttgcggccgaggcttcaggggacacggccagcagggggcgcggcccggcgagctcgctcccaggaggcgcatgctgtaggagaccgcagagtcggctgcgtcagcaggcaatggccttggagcaccggcctgagctacccagggagacggtggatctccaggaaaccgcgagtgcctaggagcccctccccaccttttccggggaagccctggtcggagcgagccggtgagcaactctatgcaaaaagcatgcgagcactgggggctgcgcacaagggtggtgtgcaagggtgtcagcaccccaggttggggctgcagggatctcacctcggcctgagcaggcgcgcggttggaattggccaggacagaacaycaagtggaaaaacacgtttacgacaaagagaaggcgttttgataacaacaacgatttatttctgtatttcttctctatccccttttcctccccgtgtgcacacctgtttatatgcagagaaaagtttagtaggacacacaagccagcagttaccaatgcttatctctgggtcataaaactgtaggtctatttctttatttctttatttttgagacagtctcccatcaggctgcagtgcagtggcgcaatcatagctcactgcatttgaactcctgggctcaatagatcctcctacctcagcttcctaagtagctgggactacaggtgtgcaccaccacagcccagctggaactcttacattctttatttttccatttatttcattatttactattcttatatctttttaattaaaaaaaawttttttttactaatttatttaatagagacatggtcttgctatgttgccagggctggttttgaactcctgggctcaagcaatcctctccagtcacccaaagtgctgggatcacaggtgtgagccaccactccagccctactcatttttttttttttttaaatagagacagagtctcgctctgttacccggggttggtgtcaaactcctggactcaaacaatcctcccgcctcagcctcygaaagtgctgtgatcacaggcgtgagccaccgcctctggcctacttttcttatttttaaacatggaacatatatttaataatcaggaacaattcattaaagtctgccttacacacttacacataggagtgggagggaagaagacacagcacacccactctctggggcaagaaggcaacagagaagaggccaggttgcagctgcacctgccctgtgggtgaggactggaggcaccgcccttgtagataggaaatccaggaaggctttcgggagagatctgaaggaagttatggagagaaaacagcaggggcaaaggtcctggccttgtgggccaaaggaagggcttggattttatggccagggctgcctgccccatctccaacccttgggccagggctggaaaggacttgagagggcatctccctcctgctttcctaaagcatgctccctggaacacgatcccacaaaatgttctgagagaaaagatccatagcccactaccccaccttggaagagattcagaatgcacagtgtgtatagtcaaggctttaaaattctgcagtaaaaggaatccatccagttttattgcagcaatgccaaatgtttccccatgaacctcctctttgctgtagaaactagtcacatctggctggacccatgtactttgtgagacacccttctatccattttttttaagacagagtcttgctctgttgcccaggctggagtacagtggcgtgattatagctcactgcagccttgacctcctgggctcaggcaatcctcctgcctcagcctcctgagtaactgggactacaggcatgtgccaccactcccagctaagttttattttttgtagagacgagactcactatgttgcccaggctggtctcaaactcctgagtacaagcaatcctcctgccttgaccttccaaaatgctgggattggagatgtgagccacctcgcccagcccatccattctttaaggtgtaaaataaagtacagagacctaaactgacttctgcaggttctctttttttttttttgagaccgagtctcgctctgtcgcccaagctggagggcagtggtgccatctcggctcactgcaacctccacctccagggttcaagcgattctcctgtctcgccctcccgagtagctgggactacaggcgcgtgccaccacacccggctgatttttttttatttttagtagagacggggtttcaccatgttagccaggatggtgtggatctcctgacctcgtgatccatccacctcggcctcccaaagtgctgggattacaggtgtgagccaccgcacccggccttcttctgcaggttctctagaatcccactttaagctcctggctgaggtgggtctggaccccattctctggactcccatcaagccactttcctggaagcttcccacatttagtagttgaaggagccagtttggacatctccaaagtcagagagagagctcctgtatgctcctccagggaagacagttagcatctccagctccatgctgtggttttttatttatttatctttagataatgactataacttaattttaattttttattttatgctttttttttttttttttgagatggagtctcactgtgtcacccaggcttgagtgcagtggtgagatcttggctcactgcaacctccacctcccgggctcagatgattctcctgccttagccttccgtgtagctgtgattacaggcatgcaccaccacgcccagctaattttgtatttttagtagagacagggtttcaccatgttggccaggctggtcttgaactcctgacctcaggtgatccacccgccttggcctcccaaagtgctgggattacaggcatgagccaccatgcccggcctatgcttctttttcttttctttttttttgagacagagtctcactctgtcgcccaggctggastgcaatggtgcaatctcagctcactgcaacctctgcctcccaggttcaagcgattttcctcctcagcctcccaagtagctgggattacaagcacccaccatcatgcctggctaatttttgtatttttgtagagatggggtttcaccatgttggccaggctagtcttgaactcctgacctcaggtgacctgccagccttggcctcccaaaatgctgggattacaggcgtgaggcactgcacctagcctctttttcctttgcaaaatcattggtaaagaaagactataatttaaatatacccatgcattgccttcatttccagggtgctaacaatgtatgggtatttctgagcctgctccctgacccccactgcctccatgggaaatacagtttcaaacacactcatagaaagtcaagcactctttaatcagccattagcaacaatcaaaccctataaaccttcacctgaacaacccagttctccatagaagtctgagaatccaaactgggtatattttcttccctgttgaggaccaggaggacactttggcctggaggcttgtgtaggaagtgcacagcccatgacctctactttccccaaagacaagagcctcccctggcacagggtaccccatgtgatgtggcagtttaagaggctgggcagacacaagaatcccagcactgccattggtcaaatgagtgacttgtgcaaggaacctcaactgcatttggagcctcagtttctctatctgctgaatgggggcagccgttcccatgtatattgtgggggcagaccctcccccagctgtgtgttcactgcagaatggggggcagggagaagtatgcagagtgctggagcacagytgccctcctttccttggctcaagagctatttctgtctgaagaactaggacctgtcactgtaatcagggcacccccatctccaggctatgctgaagactgggtcaactttattttatttttaaaaaaaaatttttttgagacagagtctggctctgtcacccagactagagtgcagtggtgcaatttcggttcagtgcaacccccgcctcttaggttcaagcttctcatgcctcagcctcccaagtagctgagactacaggcagacgccaccacaccgagctaatttttgtayttttagtagagatggggtttagtaragatgttggtcgggctggtcttggtctcctgacctcaagtgatccacccaagtagatcaagtgatgggtctcccaaagtgctgggattacaggcgtgagccactgcgccccgccttggtcaacttttttttttttttttgagatggagtgtagctcttgttgcccaggctggagtgcaatggcacagtctcggctcactgcaacctccgccctccgggttcaagcgattctcctgcctcagcctcgcaagtagctgggattacaggcacccaccaccatacccggctaattttgtatttttttttattagagatggggtttcaccatgttggccaggctggtctcgaactcctgacctcaagtgatccacccaccttggcctcccaaagtgctggaattataggcatgagctaccatgcctggcctgggtcaactttaatttggctttttctcacaccttcagttccatgtaactgcctccaggcccttgcccttgctgttccctgyttggaatgccctcttctttttcttctttttttttttttggagatgaagtctcgctctgtcacccaggctggagtgcagtggctcgatctcagctcactgcaacttccacctcctgggttcaagcaattctcctgcctcagcttcccgagtagctgggattacaggcatgtgccaccacgcctggctagtttttttttttctttcttttagcagagatggggtttcactgtgttgcccagggtggtctcgaactcctaaccttgagacctgccctcctcggccttccaaagtgctgagattacaggcrtgagcccctgcgtgctgggattacaggcgtaagccaccgcgcccggccctctgccctcttctatccttcatagtttcggggagaagtgcacgtcctttccccaggagtccagtggttgtggcgctggccagctgtctgctccgtccagtgccggagcttctagccagcagaagaagcaagagctgagggcatcagtgaaacaggagataaacaacagcaaaaatattttatatagtttgacaagtagcaacctgccaggcaaactsttttccagcacagccaggctcaggccccgggtggtggatccccggctaggatgcactgaagacacagccgcagctttaaacgtggccaccagggggcgagaacagattgcgggaagcacctgagcttctcatttcccagagtggagggaggaagagtgtggaagagtgtggagtgtgtgtgtgtgtgtgtgtgtgtgtgtgtgtgtgtgtgtgtgtgtcttcactccttttcagggacctagtgtggggcggggggctttactccttttcaggggcctagagcttgctcagacttcgttctgggatagaccaatcgtggcccgagcaactcctggctgtgtgacccagagcaaatgtcttaatcaatttgatcctcagtatctcagttgcaaaatgggaataaggccgggcacagtggcttatgcctgtaatcccaacattttgggaggccgaggcaggaggctcacctgaggtcaggagttcgagaccggcctagccaaccatggccaaggtggtgaaactcgtctctactaaaaatacaaaaattagcygtgcgtagtggcaggtgcatttaatcccagctactcgggaggctgaggcaggagaatcacgaacctgggagatggaggttgctgtgagccgagatcctgccactgcactccagcctgggcgacagagcaagactctgtctcaaacaaacaaacaaaaatgagagaaagaatagtacctatctcagaaggtttggggtcttggctgggcataatggctcatgcatgtaatcccagcactttgagaggccaagctgggaggattgcttgaggtcaggagctcaagaccagcctgggcaatatggggagactccatctctactaaaaatttaaaaaattagctaggagtggtggatactctgggggctgagttgggaggatcgcttgagcccaagaggttaaggctgcagtgagccatgatagcgccactgcactccatcctggatgacacagtgagaccttctctcaaaacattaattaattacttattttttaaaaaggtcttgggtctgattaaatgagtcagttcatggactgttcactgatgggccattccacaggcacatggagcatgttctcaaagacaccaaaggaaggtgctctaaaacaatttgttacttaacattttattaaaacaaaagcarcatgagggaaatcacaattatgtttaccttccctgtagttacttgtcagttcggtatcattttggactatttttctgtttagtgacatacttgaggaccccgtcatcctcttggtgtgtgacttaagtgggttttcagcccacagaggtctccacaggagctatagatgacagggcccccactgtctgttcaggggtgcagttcgtggagggcccagagcagttgagcagaagaggtccatgcaggacccagagaagtataggttctgttgcatcctctgcagaaagcctggggtcttgggcagcaaggcccttatagggtccccccaccttccacccccagagaccagcctgctcccccaggatttggctatggggatgctgcacctcagagtcccttgtcaatgttcccacctgggcctccgcctccttcagaccaaccccaacactttattcactgccctcctggggtgcacttcccccaagcgtagcttctcctctcgtcccctaggcttgttgtaccattctgaagagcatctcggggaagggattgtcacatggwtggggagacccctggcatttggggtggtcacaggtgccaggattcctccccagttccacacaacaagggattgtttgaattcttcctgaccttcgagtgtcccaccagcatgttcagacaggtgaacgatctgttttgttttgttttttgagacagactcgctctgttgcccaggctggagttcagtggcacaatcttggctcactgcaacctctgcctcctgggttcaagcaattcttctgccttggcctccctagtagctgggattacagatgtccaccaccacacccagctaatttttgtatttttagtagagacagcgtttcaccatgttgaccaggctggtctcgaactcctgacctcgggtgatcctcctgcctcggcctcccaaagtgctaggattacaggcgtgaaccaccatgcccagtcttgttttgttttgttttgttttgttttgtttaaccaggtctctacaggtatctgatgaacaatctgtttatcatcatttgaacctacaaccttgctctgttttatttggaaacacaaagggatttttgcacagtcttaaaatgtagaatattttccaagaatacaattatcatgtgaaatgagggaagatggtactttgtgttgagaattttaccaggagttatcatcatctaggaaactcacaccgtgggggcaaagagactcactttcctctgcctggtatgcatctgaagccgctatttatggagcttcaaaataaggtacaggctgggtgtggtggctcatgtctgtaatctcagcactttgggaggccagtgtgggagaattacttgagaccaggagttcaagaccagcctgagcaacatggtgaaaccctatctctaccaaaaaatacaaaaattagccaggcatggtagtgcacacctgtagccccagctactggggaggctgaggcaggaggatcgcttgagcccaggaggtcaaggttgcagtaaactatgatcgcatcaccagactccagcctgggtgacagagggagaccctatctctaaaaaaaaaaagaagaaaaacaatatgggtacaaacatcagaagacttcatcacatctttagtggcgttgtcccccaccatttacatactgacataaatattatttttatttaaaattacatgatttgtgtatatacatacaattttattttttattttattttactttttttttgagacagagtctcacgctgtcgcacaggctggagtgtagtggcacgatctcrgctcaccgcaagctccgcctcctgagttcacgccattctcctgcctcagcctcccaagtagctgggactacaggcgcccaccaccacgcccagctaattttttgtatttttattagagacggggtttcactgtgttagccaggatggtcttgatctcctgacctcatgatccgcccgcctcggcctcccaaaatgctgggattacaggcgtgagccaccgtgcccagcctataaatacaattttatttatattcatttaaatacatatattgtattatatattataaattactgccctttatattacaattaaggcatcaaagtgattttttgaaattgcgtgcatagattagtttgaatttcatttcaggctcataatgggaggcattggatttattaatataaaagtaggctctgagaatctcacaaacataagcaaaaaatccggaaataaaagaggtttctgaaaagaatgacttcatttattggaagttcaaagtcaggcaaatatcatttatactcttagaagtcaggatgatgtttactttgagaaggtaataactcggtggggacatgtggggcttggggtgcaggaaatacacttttgttgatctggatcctacttacacagatgtgttcaggttgtgaaagtgcatcaagggtatatactggccaggcctagtggctcatgcctgaaataccagcactttgggaggctgaggcaggtggatcacctgaggtcaggagttcgagaccagtctggccaacatggtgaaacccggtccctactaaagatacaattagctgggcacagtggcgggcgcttgtaatcccagctactcaggaagctaaggcaggagaattgcttgaacccaggaggtggaggtgcagtgagccgagatcacgccattgcactccagcctgggcaacaagagcaaaactccgtctcaaaaaaaaccaaccaaccaaacaaccaaacaaaaaaaaccttaaagaaggagggtatgtagttttctgtacctatattacatttcaataaaaaaattaaaatcaaaattaacatcaccaaaaaaggtacaaatcaatatcaagtgcctattgatattgatatgacactgaaaattgatcatttttaattatattccaacaaaataacctcaatattttcatgcaaaaacatcaaacaaacccaatttgaggatatcttactacctaactagttgtcttccttccccctccctcccttcccctcccytcccctccccttccctaccctctcctccccttctttttttttgagacagggtatccctctgttgcccaggctggagtgcaatggtacagtattggctcagtgcagcctcaacctcctgagctcaagagatccgctacctcagcctcctgaatagctgggatcacagggtgctgcaccaccatgccctgctaatttttaaattttttttgtagagacagagtctcactgtgttgcccggaggtggtcttgaactcctgggctcaagcgatcctcccaccttggcctcccaaagtgctgggattacaggcatgagccaccgcgcctggccctaaccagtatttctcaaccttatcaatgtggtcaaagacaaagcgattgggaagttgttctagataaagggagactaaagagactcagcagctaattgcagtgcatgstctgggtttttttttgttgttgttgttataaaggccttattaggacaattagcaaaatctgaacaaagtatgtggattagataatagtattgcagcaatgctagtttcctgatttcgattcttgtactgtggttatgtaagagaatgtccttgtttttttgtttttagacagggtctcattctgtcacccaggctggagtgcggtagcacgatctctgctcactgcaacctctgcctcccgggttcaagctattctcccacctcagcctctccrgtatctgggactacaggtgtgtgccgccatgcccagctaatttttgtattttttggtagagacggggtttcaccacgttggccaggctggtctcgaacttctgacctcaggtgatctgcccacctcagcctcccaaagtgctgggattacaggcatgagccaccatgcctgttctcattgtattattcttttgacttttctgtacgtttgaaattatgttaaaatagcctggcgtggtggcatgcgcccataatctcagctacttgggaggctgatgcaggaggatcctttgaaccaggaggttgaggctgcagtgagctgtgattgagccaccagatgccagctggggtgacagactgagaccttgtctatacaatgaaaaaaataaaacataaaatatcaaaatacaaagttaaaagaaaaaaacttaaaaaacatatttagaggtgaggagctctgggtctgatagcagaaccttaaatgctggctattcatttccgtttccacagttgcaagcccagttttcagaaaaggggcagaaaaagaaggaagaaaaagaaatgcaaagcccagcacctccggccatagcaggttctgagtgcttcagatactgagggttcatctctaggggtcttagtttacagcaaagacttggcaaggttggcttaggtggttaagctctcgcctgctaacagacacctgatatttttctccaggccccctctcatttatttttgctcactggtacttctccaaacccctgcatcatgacctaygacctctgacctcacggggtgccaggctcaaggcaggcgcctcaaagactgtaaaactggatgctgatgccctgacctgagcccctaggagttgccatagccacccctgctgccggctaaagcagccaggttggcgctgagcactccatccccagcctggggtcaaagggtgcctgtgagcctctttgcactcagtggaccagagctgcaaagtggggaggggttcccctccagggtctttccactacccccagaaaccacaggtttctggatttagtgctcgggccagaccttcgaaggcttggyggcctccaaaatatcttttcagctcacctggccctgcctggaattgtaccattagagccacgctctccaggaaagaaatcatttccaagcattgacttctctgaaagtcagacctcgttgttgtatgggtcatggttcacgaacttggatatgtgaaaaacatagaatgcctttattttctgtaaatcaattaaatctcgctctgcgctcctattattgggctgctgggaaattcagcctacagatggtcctgtcacattgatggactaaggtctggggggcttggggtctcctccagttattagcccttgctggttttgccccagccccgtggcccctttcagtttaggaggcacatggggtgacccatagcctgagatcttgtgtgttttgccccccagctcagccacaagtctgactctacttctggggagggaatccactttctctcctccttcaagttctacctgaggccttccaggactcccatggacacattttacaaatggggaaactgaggcctggcgaagcgctcacacagcagactgaaaaggaggcgataacatcctccttttcatcccaacaaggtgttactgactgtggccttcgcagcggcacttgcattcatcaggcaaccatgtcttacctgtgcacagtgcacatccaatggcaggatttcaggcactatgacaagctgccagggagttatttggagcggggagttcttctttctttctctttctttctttctttctttctttctttctttctttctttctttctttcctttctttctttctttcyttccttccttccttcyttctttctttttttctttctccttccttctgtccgtccttccttccgtccgtccttccttccttccttccttccttgcttccttccttccttctctttctctctctttctgtctttctttctttcatgagatcttgttctgtcatccaagctggaatgaaatggtgtgatcagagctcagagctcctgagctcaagctatcctcccacctcagcctcttgagtagctaagactagaggtgtggactgccaccatcagctaattttaattttatttatttatttatttttggtagggacagagtcttgctatgttgccaggctggtcttgaattcctgggcttaagtgatcctcccaccctggcctcccaaagcactgggattaccagtgtgagccactgagcctggccaagtggcaggggtctttctgttacataatgctgtgtggrtagagtgaaaagtcataaatcctagctctcctgccaactcactttgacagactgtttcctctttgggcctcagttattgtatctatataataggattagcttagatgccctaggattccctagatggcttgtgtgatgttgttcttgttgtttttgttgttgtttgagacagagttttgctctgttgcccagtctggagtacagtgacaggatcatagctcactgtagcctcgacctcccagactcaagcaatcctcccacctcagcctcctgaggagctgggactacagggacatgtcaccatgcccagctaagtttttggtattttttttttttttttttgtagaatcattgctattgccttgctcttcattccccaagctggtcttgaactcctgggctcaaggaatctgcctgtcttggcctcccaaagtgctgggattacaggtgtgagccatgacacccagctcctagatggcatactgaccccatcatggctcgctctggctgaagaagttatacctccaaaccctgctcctgaacactcaagatcagcagtagcaagggcctatgctccaggtccctggggggtctaggtaactggagagacagggctgtgtgccctctggtatctcctgtgtctggacattcatgctgagagcaggagctgagaaaggaggaggagaaagagattcaagttcttcccaaaaacctgagggacccccagggctcacgtgcccctatgcctttctcgcaatgccagtctaagagggcctcttggtaggaataaaggaaccatctgctcaccctcctatgtcccagaagacaaaagcacttgagttgcagctggaggaatgtaggttacactcatagactgccaaactggaaactgccagggtccaggcatgattccatcctgcagggccgaggagaggcagcagmagaagttgatgaattgcacttgccagaatttgcactcaagccctgggttagaaggtggattcaaactaagtgatgcctggtgctctctaagcctcaggaagagtcctcttcctccagcccaggaggtcctcagcccctgctttagacctcaatgacccccatggcctgtggatgtaagggtaaagctctacctggcatttgaaatctctgcagcctgggagcccctgtctcctcagccccacttcttctttttgttgatacaggctgggcaagagccaggccttctttttctgtctggtaaatgctctctgcagctgaggcttctgcccctctcctggaatgccagcttctttattctgggcccctcctccaggaaaccctcccagactaatcaaatctcaaccaagccaggactaccacctcccctgactcccaacactcctctgcagtcagttccttgctgagggtcttggcctttctctcagtggaacaggaaaggcccttcagggtggcctggggcagagccagccacactggagtgaagtggggttagagaggtttcctgggggaggaaggccctagcagagggagccaatttggcatcaaatgttctgaggctgctctcgtggaggacagaggccgggagcagatctgactcattcctgccactttgcctggctgcacgcccagccagagggctttctcagacacctgtccagcagagtgacatccatttaggactgtactgtctaatatggtakccaatggccacatatggctttttttcctttttcttattttttaaaattagcaatggggtctcactgtgttgcccaggctggagtgcagtgattatgcacagatgtgatcatcatgcaayacacccttgaagtcctggcctcaagcaatcctcttgcctcagcctcctgaatagctgggactagaggcacatgccaccatactgggccacatatgacttttttctttttttcttttttttttttaagatgtgcagtctgggtgcaatggctcgtgcstgcagtcccagcactttgggaggctgaggcaggtggctcacctgaggtcaggagttcaagaccagcctggccaatatggtgaaaccacgtgtctactaaaaatataaaaaattaaccgggtgtggtggcrggcatctgtaatcccagctactcgggaggctgaggcaggagaattgcttaaacccgggaggctgaggttgcagtgagccaagatagcaccattgcactccagcctgggcaacaagagcgaaactctgtcccaaaaaaaaaaaaaaaaagatgtccaactatatactgacaaataaggctttgagcatatgaaatggggctgccctacgctgagatgtactgtragcgtaaagcacacactagatttcaaagacttagcacaaaaaatgtaaaatatttcattagtttttttctattaatattagtgacagattaaaatgcatatattttggatataattgggttaaattaagtacattatttaaatgacttgtttctttttacatttttcttttcttttttttttttttgagactgagtcttgctctgttgcccaggctggagtgcagtggcgcgatcttggctcactgcaacctctgcctcctgggttcaagcgattctcctgtctcagcctcccaagtacctgggattacaggtgcacacyaccacgcccagctaatttttgtatttttagtagagatggggtttcaccatgttggccagagtggtctcgaacttctgacctcaggtgatccgcccgcctcggcttcccaaagtgctgggattacaggtatgagccacggtgctcagctacatttttgtttttgagacagggtcttgctatgttgcccaggatggtcttgaactccgaggctcaagtgattctcctgcctcagcctcccaaagtgctaggattacagacatgagccactgcacccggccttatgtctctttctatatattttatatcagtattagaaaattttaaattacaaaaatggctcacacgtcatttccattttacagaagaggaaataagcttcagagggtttgagtgacagatggtgcaaaacccaggtatgacccgggtaagtgggcccttggatttgtgagcagataagacttcaaaagagatacattccccaggccttgcttctggctagaggataaatgccagaacatttcgtgatcaaagagtcacatctcctcctccccccgagtcttgaccaaccagcagtacatttggcctttgagggtggcctcagagttgatgttgtgacccatggatgcgagaggatccccaagatgctcaggctgttgtctgacctctctccccaaccccaggccagctccaactgcatccgaaagccttctgccctgctccaacccctcttagctttgacatcagctgtggctccctcccaggcatcaactatcaggttatcttgcaacctccacctcagacctatttctgttcctgtctccagctgttgctcagtccacagatcactctccccacagatgagcacgccagtgggtatgtgtccagcgctagccatgaggggacactcccaagcctttgcarcagcagcagctatagggtgaccatgggattggaagacagccctctgcagaaggagcttcagggggatcagatcttcacaaccatcccacctcctgaggcccgccccatagaagggacttgctctggggcccacagcctgcactggagggaagactgtgacccttgcctgggcacagactccgcaggctgtggctgctggcaggcccacagccctgcctggatcaatccaagggccaccactggctgcccagggagggcccctctggggtcctgggagcaagtagagctcatcttgtcttgggtgtcccaaatgtccccagcatcacttccaggggaaaatcttgtcctgaatgaggacttaggacccagtcctgggtcccttgaggccaggtgtgctgggatccagctgggacatcccatttggatataatagggtcaaatctggggctgtaattataacataaggaggccactttcagctttaaaatagttttaaatttaaaaagtgaataagggaaaggacttagggagtgaggattcttggcagtctcggggtaattattataaaaccagctcccattttccaagtcctctgcagcgccgggcctgtgatgccaccatccctgggaggggctggacagggtccctggcacagttagcagcattggggctattatgccacctccagatggccaccaccatacccatcccaccctcctttgagcccagttgctctagtatagagtagaagagttactggacagatcctggttcaaatcctgctctgtgacctgcctacctaacctccctgagcctcatcatcctcatctgtaaaatggggtaacagcagttcttggatcgcagggagagctggacgtctgcctcaggccctttacctgctttaacaggaacattactggcgttgcttccctgttaccacagctgcctgcctccaagctgagcaaatgttgtcctccagacacctctctccctctcctcaccatctcctcaaaagtggagggagaaaatggcccctacctagatcaggccaggggcgcctgcagggtaactctctatttggcctgctcctcctgtataccccattcctccccactccggagacaggtttgccctaagcatgggagtgggaggggggtccatagagcaagcctctcccttccccagatcactgaggtcaaagttaatctaagacccaaaagtgccctgtggcctgggagttcccttctggtatagtaacattgacaggagctgtggtcaaagtgagctgatgacatgcaccaccagcccctcctggccctgcagtggggcctccttcccaagggtgttcggacattccatctccccgcagccccctccactgtccctttctcccccttcacaactaaacttatrcatgtgaggtcccagtttctcacctcccctcactcctcagcacccccagtgtctgtctccggctcctgccgctgtctcatctgggtcacaatcatcacttggtctctaagcccaactgtgaacttgcccttgggcacttttttggacttggactagggactagggtgaggatgcacatttaaaaaaaagcactctagggccaggcacggtggctcacacctgtaatcccagcactttaggaggcccaggtgggtggattacttggggtcaggaattcgagaccagcttgaccaacatggtgaaaccccatctctactaaaaatacaaaaattggccgggcatggtggtgcgcacctgtaatcccagctactcgggaggctgaggcaggagaattgcttgaacctgggaggcggaggttgcagtgagctgagatcatgccactcacttcagcctgggctacagagcaagactccgtctcaaaaataaataaataaataaataaataaataaataaataaataaatawgtaaaattaaataaaaataaaaataaaaccccctcttggggttgtgcgtgtgcagggcctgggcctgaaggcacatgcccccttagattttccttccaggaccccacaatgctgcgtgtccaatgtggccagctccctgtagggttcccagagcaagtgaaggctccactttctgctcagggatatgccctggtctcctctctatcctgaacagccaaacactgtcttttgggcaccacctcctaaatctctctcatccagccctctgtctcccacctccctccaccctgtcccctcccgcctggacacaggccaccccttgctccctgccaccattcctgcctgcccatccgcattcctcagggatgttccccatttgcaggcctggccctgcccctcctctactataagcccttggtagctccccgtcagcctggggagggggtcccaggtttcccccagggctctagcccctttgagccttttgagccccacaaccacactgggctctctctcacctctgagcctgcacacttgcccttcccttggcctcaaacatgctgttcccttctatctgatttggaatactggttggaatttcatttcttcctttctttctgtttgagagggcctcgctctgtcgcccagcctggggtacagtggtgygacctcagctcactgcaacctctgcctcctgggttcaagcgattctcctgcctcaggctcctgagcagctgggattacaggtgcacaccactatcacccagctaatttttgtaattttagtagagacggggtttcagcagttggccaggctgctctcgaactcctgagctcaagtgatccacctgctttggcctcccaaagtgctgggactgtaagcgtgagccaccacgcctgaccagaattgcatttctttgctgagtgacatggtcttcccctctcatctgctcccatagccccttccctgccctttgtgtaaccctcacctgctcaccactcatatccctcccaacacatagtgcttaactcaccaccattgctccccaaagcctaggacggtactagagacagcacaagcactcaattggtatttgttgcatggatacattaatttattaattcaacagggatggactgtcatgtaggtggctttggtgactgggtggggacaaggggagatactgtataagctatagccagggcctgcccgtggcagcaggtggctggagggagaaggccacgtcacctccagcatgctgggtgctgattttaatggcctggcagtgaggtgcgtgcatggcagagcctgcagaagaggtaatgccgagagggcagctctgcccacctctaattattgcttgagtctctctggtagtgtcagctgccygccccagggagctcagtctcctccatcacagtgtgcgctcggggtggggctgctgccactgccagtggggaagaccagaggaggttcccagggtctttgggtcttggagagcagaggcagccccaggcttggaccctgcttagctcctgtccttcctgtccccagggcagctgaagggtgccccagactcaagggtcccatccagaagcctccagggtgaccaaggagcaaactggctgaaggagggtccccagcaccccccagggaggaagcctcagatggtttggtgtctgctgacatggaagcccttgagaagatggtgccctagtggccggctaggcagatgggcagctcaggcccggaaggaggcctttaccacgcggcccttcagtggctgtggtggccggaagttgttcaccatgtggatcctctcatcgtcctccgaggtaaaaagcaggctccggaacttccccatcttgaggaagcagaaggaatgctcagggcagattgggggtgctgtggtcctctatgaccccagatgcatcatctggcatacctgcccagccagctctacccctccctcctccttcccttagggtctgtccctactcttccccactcatttttctctgcaggaccctcatttatttactcactaaagggtctgggctctgctttacctagttctagttccaagcccatctagctaagacttatcagcaaatgtagcattcagattccaacacagtagcgggggtgggggtcccaggatccaggtatccccgctcccagccagtgtctaggttctggtgattaacaatcaagctaactcccaaccaagaatctatacatttattagtaaaaaatggggaggaaccttgaaggtgggatcacgggctgtggggtgctagttggagagtcacactgcctggggtgagccctgagtgccmtgtccctccatctggtcctctgagagractcacctgcctttcagagatgcagatgggctcccggagcacaatccaggtgacactctcactgagtgggggagtcgtcagagagcccgggtaggtccagtagtgccggctggcaggcaggaggcacttggggttgaagcagctgaactgggctttggtgccctggaacaaggtggaggaacccaggaatcagcayagacctcccactgggaccaaaycagcaacttctccaccmatctctttctttcttttttcttttcttttttcttttcttttcttttttttttcttttcttttctttctttttctttctttctttctttcttccttccttccttcctttcccttccttccttccttccttcccctctctctctctttctttctttctttttctttttctttttttttgaggtggagtctcactctgtcacccaggctggagtgcagtggcacgatctcggctcactgcaacctctgcctcttgggttcaagcaattctcctctctcagcctcccaagtagctgagattgtaggcatgcaccaccatacctggctaatttttgtatgtttagtagagacagggtttcaccatgttagccaggctggtcttgaactcctgacctcaagtgatccgcctgcctcggcctcccaaagtgctgggattacaggcatgagccaccatgcccggcattctccacccatttctatcagcaggatttaggcctctctgtgtccactgatgcaaattgtgagcaaatgtctgtgatcccagatgccatcttccagcctgagccgggccctctcatccgtttgcttgtatgtaaaagctgtggctcctggaggtatttggccacgatcttccctcccttgccttcagctgccctcaatgacattgcctattagaccaccattaatgtgacaagcatcttatcaattttatacctagccgggcttcatgctggacacccaagggggctgctgaccccgatgaggaatcaggtgcagggccctgctgatgctgaccctcctccttggtctcagcaagggtttactcccagaatgaaggactggaagggcccaacttgtgagccagcctcttcctctctccccatcgggctgctygggtcaggggcagggactttaccttgaaccggaccatgtagagcgcatctgtcagacgattcatgctggggtgctcgtctcctgtctgtcagggagagggcagtgtgagcccagagcccacygtgttctagaactaggggcagtgccaggcctcccatgcccctccaggccccagcaaaccaccactcacctccaaaaaaacaccaaccacagccaggccatcaggtgctgaggccgcctccccaaaagtgctgtacttcttggcattccagtgaaccagatgcagctatggggcaacaacaggccaatgcttcgtgcctcccagaggcaatgggaactctgagccaggctcccctcactcccaccagacccctggcctctttgcaggaaggggaagctgtcaagcctccaaggattaggatgctggggggtccaggggagccccagagggtcacaggtagcatccacccaactctgggcccaattcttttctgggctccgggggacccaaagaggaatctggcccaagccctgccttgcagggaacgagctgtgaaatcgatcatgaacatccagcgtgacacctccttgaggaggtggtgcctacagctgagtccagagaataagcagagggttatcagagggaagccttggggaaaggcattccaggcagagagaacagcacagacaaagcttggtggtatgaaggagccaggtgtggacaggggattcgtcacatgcagctcagtgtatgaagaggtgaggggaaggatgaggccaggcaagatcagttcatgcacagtcttgaatactgggctcaacccttaaagggctgtcagcaaggctgcagtgggactgggtagcccttcagaaaactccacgacgcacagaccaggaaggatagcagtggacagggtcagatggaagaccctgtgctgggggtgggtagaaaatatctctcccaaaggccccgggtgctcctcttccccctctccaaggcccgaccccaggcatcctcaagcccctgactacccaggcctgcgttccttcccatgtagcagagggattcaagtggaggagggcccgtacctcgctggggaaggacttgccgtccaccgtgtgctcagaacccacatcgtgcttcttgccccagtggaagtgaaactgcttgaggcggtagggcccttccagggggcccccagtcaccactgtgggtagaagtggggcgagtggcaatgagtaggagaggaccgacagcccagtgccaggaccagggcagcagcccaggaaagggacatttttttttttgagtcagggtctcgctctgttgcccaggctggagtgccatggtgcaaacatggcttatgatagcctcaacctcctggcctcaagccatcctcctgtcttggcccccccgagtagctgggactataggcatgtggcaccacacctagctaatttgtttattttttgtagagatggggtctctctatgttggccaggctggtcttgaactcatgggctcaagcaatcctcctgccttggcctcccaaaatgctgggattacaggcacgagccactgtgccagctgagatacatttttcctttttttttttttttttttgagatggagtctcgctctgtcaccgaggctggagtacagtggtggcacaatctcagctcactgcaacctctacctcccaggttcaagcatttctcctgcctcagcctcccaagtagctgggattacaggcacctgccaccacatcyggctaattttttgtatttttagtagaaagggagtttcaccatgttggccaggctggcctcgaactcccaaccttaggtgatctgcccacctcagccttccaaagtgtgggatacatttttcatttggaaaattcactgggctgactgggcttgggttggtccccactgccccctagacccctgtcccttgagctgggccagggcagaaatcctgacagccggcaggtggcagaagggtctgggactgacagaggacagctctctatctagctgtcctccccgctcctgcccgatttcccatggagggtgggaccctgcctcccaggacccccattaycactgacagttaggcctaccatgtctgaaaccctgatccagggctaggttgaagagactattttgtttagtctgcatagtagcccatgagggacagaacttattattatccatattctacaaagagagaagctgaggcacagtgatgacgaggcatttgctcaaggtcacacagcaaggcactgaactagggtatgaactagtatctcttatgtccaaagcccaagccactaatcaccaggcaacactgcctccctagaaccttgaaacttctttaaactttgtgcttttccagaagaggagggtagctcctgagggtctctaccttcctggacaggcccaggtgcctccagtgccgcctcccccagaaatggcctcttctgagggccccacttgtgctggctttgtaactttcttgccttgayacccagtgagctggggccatgcacgaggcctcctgggactgatagaatttccagctgaaagggatctggaggtggagggagccccagctaggcttgaatgtgagctcctggatcagataacaccccaggctcagagttccactggtcccttccatgatgggtgaccagggtagggctttggccctgtggcytcctyaagcaggaggacaggacagtccagaagtccctctttcttgcccggtcttatcaaagaggcaagacctgggcactggctaggagtctgggagtagtagctgtgggtggggccctaatcaggctgccccatccctggaagcaggagcggctgagcctgcaggctaagcaattggataggtctgcagatgccaccctccaaagcatgcctcacctgggaccctatagtgtgggytcctagagagggagctccctccgtaacaccccttgaccttggaccccttagcctcctcccccagttcacacacagaatgtgctgccattcacggggcactcaatgtgtgtttggcactctgctggcatcaacccgtctgacctctggagtgacccacagtgrgtgagtggcagagccccaccatctcattcctcttttcactggcttcctgcgccctccggcctgggcattctgggtgggggagggagccccagccaggcctgaaggcaacaccccagatcagtaatccaaaggcatgtccccctgtgtcttctcccaccccagtggccttcattgagctactgatttcttagttgagcccccagtgccctctgaaggctgttagaagggacagtcatatgaaaactgttccttgccaaactatcatctagggtcagctagagccccacgccccctccccaaagctctgagtaagaggcttttcttagaattcagtaccaggaaataaatgctttgtctctctcctgaggatctgctagactccctttcttttgcagcaaaaactataatcaatcctctttctgttttttcctagcctaccagggaactcagaactaagtaagatcactcttctcatgaaaggtctggcttccttcatcctctttgccttttaattttccatttgaaacttaagttcctttgagggcttttattgtatttgtggggaggggagaaggaggaggaaggaaccagttattaatacttccttacacaagaaactctagtaggtttcttcctcgccccattccaccactctacccagtcrtaaggcccagtcataaggacgaaaatcccttcaatgaacagcactcctgtctaggaatttatcatgaaagaatytggactctaatcccagggcaaagaggccttggaaggagctgccacgaattcccactggcctcttactggcccaagatggttggaccttgaagtcataggtgaactggagagagagagagagaccttcaggctggaccaggctgcttctggccctccccagctcatcaagcctctatttgcccatctgagagatgggttattgagaagaataaatgagcggcttgtgactttagcaaggggtttggcacttgtaaattttagctcccttctctctccctgctaggcttggccagatcacacagcgaggagggcttggcaggtcagtgatggggcagagagtgaaaacaaacctgatctgtagcaccacaaggaagggaaggaagggaaggaaagaaattagcatttcctgagcatctgctgtgtgccagatctatcgaccttacttggttttttcatttttcccctctatgacctaagagggtaggtcttattgctctcactttatacataaggagactgaagatcagcccaaggcttcacagctggtgagaggaggaacctttcttacccaccatagcatgcttcctgagactgcccaacacaaggttaggaccctaaggggccaggggccaggtgccaggctttggcaggggccacttaccggttcggtcatcgctgtcattgaagtctacctggacagagtggccattgttggtgatgctgagggacatgcaggcctcataggaaagctccagtggttgcaggctgggagagtacacagcctggctggagatgatattgatgggtgattggcgatctccctgggcaatgggatacagcttgtgccaatgcgaggggcctgcaggtggggaggagggcaaggactcaggccagccaggatctctgggcttcaggccgaggacacccataggggaatggtctcttcagcatcctttcagaggtgagcccctgcattggagctgcacagcttggagttccaatcccagctttgccatttcccctttcagcctccatttctttgtctgtgaaatggtctcactaaaactcaccttccagtgctgataggaggcccagagaggtactgtatggaagggaacataacagctacaggctcggggtggctcagagtaataagtctccccaacagggagacctccagacatctgaagtctctgacctgaccccatcagtatctcacctctttctgtgccttgggcaatttggtgttggtgtttgtgataaataacaacaaaaactcacatcaacctagctttgactctgtgacatgtatttgcctctcacaaccaccttgtgaaatagaaaccagcaagatccccatttcacagatgagggaactgagggccactcacacatgtgtgcatgcatatgtactaatataaatacagcatgtgcatgcactgcccccagctgccctcccaatgtgtgtgcctgcaagtccatagagatcttcctatgaacacattaatctttctatgatcttccattgtgcacacagagcagccaggcccagaacattcatgtgtacaaacacacacacagccctgcagactacatmtgacacacgcatatgctctctcacacacaaacccctctgttggagacccaagtttgcataaaggaccacagcaaaacacatgcccatgcacacacacacacacacacacacacamacctgcatacacacccacaggcgcccaccacctgcctcccagaggatccatctgcagccgagaggctcagcatctccctggggaacatcctgagatgcagcctatttttagagctactgccggctggtgcttctccccctttttggcttcttaagttttcctgagaaaacagcagcaggtgccgacagagccgtgtccccaatggatgactcagaatcgtggcccggcccctctgggttatttttgaagccctgtgaacactgctgcatgccggcacctctgtcctctgtccttcccttcctcgactggacaatccagctctgcctgggtgatggggtggctgctttgggggagcaggcccatggagcaggctacacaggacactgggtgctcagagctggtgggcatgactagcaagaagagctggaggcaggggactctggctctgggggaagcacccaaaaggtggctcagagcaggtgctgggagaagatgatccctatgggtcctgtccatctgccccatgtctgcctgtctctccctctctgcttgtctatatcatctttttctgaatgtctctttccagctcttgcatacccagatctgggggttctcttccaaaatatgctcctttgttcttggggccccagagggagccaaagactccacagcaccctccctctggtctactgcaactttctggcttcccagactgtggtcccccacccaacctcacaaagtgactgcctctccgcagaggagtggggctgggggatgttcctcccatcattactttttcttctccgcaccccacctgtcttgcactggctccccagggaaatagggaaccccttaccccacacccccacccctgcttggtaagaaatggccccaaagggaattgactgccccagacccacactccagccgtctggctctcaccttctgcctcttctccctttctctgagtcctaaggaaactgaggcaggatgaaggagctctcttccgcgtcagcccaggaggctggtgtgggccacgggctcccacgactcacacccggacgtgcgcaaacaccctgctcggtgtagacacccagacacatgcttgcgcccccaagtgcccccttccctcacgtaccggccgagaaggcagctcggccacttctgcggggaaattctctccgggggacactgcgcccttgccacgcggagccccgctcccccgaggtccccgctcacttgccgtgcgcgctccccgcagacacccgcgcacagcgctccgcggcgcccgccccccgctgccctgggccacccccacgcgctgcgcacgcccggggcgagtgagtgagagtctgggcctgggtctgagcgggctgggcaatcaggggcttcgcggaggaggcggcaggacacagccgccaggtcgcttgctggcggcggggccacccggggcgcagcgcggactttgcgtctggcgcgggggaccaaggcttgggccaagttcgggggccgggatgggaagaggggtcccgcccagcctggagtgtgggagctttccggtctgggaaaccagctgggcaagagggttggggcgagtgcagttgggtcgggggtccgagccagaggcggtgggggaggtctgtgcctaccgtcgtcctggccgtagccccagccgtggtggccggtcatgccgctgccgtccccgcagccgtgcasctgcccggtcggctcggtccgctcgttcgggctgcggctccggccccgctcgctaccgcggagcagcctcttaaagcagcggctggcgggaggagcagttcccgggggacccgccccccaccccccagcagggccagagaggccggcctgccccgccctcgcccgccggcgagccagttgaaccccgagcggagattcagggcaggaggaagtaaccctctccccccaactcccacccctgccctggctgggcgactatccctctttttcccccagcaacccgtgcggactctgggacactagatgcccrtgccgcacatggcgtcccttccctaggcttgccccagacctgcaaatgccaccaccagagacctgagctctgggtcctgaatcttttggggttggaaagtcccctttaaactgcaaactacactgaccatcaagtgtccaaaactggagcttccactgtttgccagaggctgttgcaggcgctggaccaagctttgggtccttcctatggtataaccctctctgttaccctacaaggttgggtgcttccatcagccctatctgacagaggaggggagtgaggcccagagaagtgaagtgacttgcccaaggtcatctagccagggggtaaagggttcattagctggggttcttactccagacactgggggttttgtgggatttgtttgtttgtttgtttgtttgcttgtttgtttttagacagagtcttgctctgtcacccaggctggtgctatatcagctcactgcaacctccacctccttgattcaagtgattcttctgcttcagccttccaagtagctgggattacaggtgtgtgccaccacatccagctaatttttgtgttttttgtagagatgggggtttcaccatgttgcctgggctggtcttgaacttctggcctcaagtaatccacccgccttggcctcccaaagtgttgggattagaggagtgagccaccactcctggcctgacactggggtctttaccatttctccttggtgctgggtacaagggtgtgctgtgagtgtgggggtccgggaaccctggggtagatgcagggacaggaatggcaatgtgaacccttggcccaggtggaaccagatcccccaagggggagtgagaaggagtggcatcaaccaatgggcctgaagacaggcagacaccaggtggcttccccatggagctaagtctgaggctctgacttccaccctccctgttattttgtctactgcttcctcctttcttcagggactctgctttgtccctccatagcctgctgtttgtccctcctctcctgacctccccataaccttcagtacaccccctgggagctcagaccctccaccctgcactcaaccccagtgcctgccttggcccagtattttcccaccyacgagccctggtcgttgttgtgccctccacctggtgcgtcctctgtcttccacccactggctccagccggcccaatctgattcatcttagcacgtggccttgtgccagggagagggcttgtctctggctagtcctcagcaggcagttttggaaagacaaacagaggggtggatggaaggacagataaatgatcccacccggggtcctgtactcagcaggagtcgaacagccactagtacaatgtctgctgtccagatcttgaatagagacactctttcaggccctgctcttggctgaccttgtacaggaatctgccatcttgtctgcctggctccccttcatctctgtgtctgtctcagtttccctctcccaggccctgaaccccagatcctcagatagagctatggagattaattgataactggttgggtgggccaatgtcagtgactgcccaggcctgcgaagatggccctctctgatccaggagcaggaagggatccttaatataaatatgaccctagggtggggcaggggacttatgacagagataagtagcccccaagaccagatgtgacagagaatccaacactgtcaaggccccaggtctccaagctggaaatggcatctacagatcaagaagrcaaaggcatgcttctgggtgaggcctggaccttctgtctcccagagaagccagccaccctttacctgggagagctgccaacatcctttacctgggagagagctctggggatagcccaaactccattgacccatttcctcttcagagggactcaggtctttttcatatttatttgtagttcttaaaagatacaactgggcctggcacagtagctcatgcctgtaatcccagcactttgggaggctgaggcgggcggattacctgagctcagaagttgaagaccatcctgggcaacatggtgacatcccgtctccactaaaatacaaaaaattagccaggcatggtggcaggtgcctgtagtcccagctactcgggaggctgaggcatgagaattgcttgagtccaggaggcggaggttgcagcgagccaagattgcaccactgcactccagcttgggctacagagtgagattctgtgtcaaaaaaaaaaaagatacaattggaattcttcatatagttttgcatccaacttcatctacatagtaaccctggggggatttttaccccattttacagatgagaaaagcaaagctcaagagaggatgagtgatgggctcgaagatgcacagtgagtgactgaacaaagatgaaaacccagggctgctgggtccctcgttcaatattgtccaaaatcactggaaagggaggaagcggattttaaatttgactctcatttgtgtgtgtatgcaagtcctctctaaaaggacttaggagaagctagggagagtgtttacctacagggaggagactggacaccggaaggttgtggaaggttgtggaagggtgtggtatggcgtgggaaggacactctttactggtactcctttgtatctcttgaatgaattaaggcatgtattacctctttaacaaccaaataaaagttgatccagttctttccttcctgcagcctgtcttcagcattttctctgggtactgggaactcaggaaagtgagaggagacaatggagactgcccttctaaggtgaagcgccagctgccccagcaacccactcaggtcaacttgggggagcctgtgcctccattcaggtgcctccagtctcaattacatgctgtttttaaagccgagttgatttctctgcttgagagttttctctttggtctcactggtgtcagtggctcctggtttttgctatttatatgggaggggaaaatgggggatgtgagggctgtgatggaggcctgggggaggaaggcatgagcagcctgtacagccaagtctcattcatcaaacgaccttggcctccaactttcacttccttttttcttttttttttaaagattatatagagacaggggtctcactatattgcccaggctggtctcaaactcctggccttaagggatcctcccacctcagtctcccaaagtgctaggattacaggtgtgagccactatgcccggccttgttgggtacatttaaaatcccaaatatttcttctctaattatagtagtgacatctattgtagaaaatttggaagtcagaaaagcatacagcagaaaattaaaatcactggtcatgtcactactcaaggatcaccactgttaacattttagtgaccatcctgccaaggtttccttttttaattatatttttattttttccataagttattggggtacaggtggtatttggttacatgagtgagtttttttttttttttgagacggagtcttgctctgttgccaggctggagtgcagtggtgcgatctcggctcactgcaacctccgataccctggttcaagcgattctcctgcctcagcctcccaagtagctggtatgacaggcatgtgccaccatgcccagctaatttttgtatttttagtagagacgggttttcgccatgttggccaggatggtctcgatctcctgacctcgtgatccgcccgcctcagcctcccaaagtgctgggattacaggcgtgagacaccrtgctgggccatgagtgagttctttactggtgatttgtgagattttggtgcgcccatcaccagagcagtatacactgcaccatatttgcagtcttttatccctcaccctccttctattctttcccccaggtccctacagtccattgtatcattcctatgcctttgcatcctcataacttagctctcacatatcagtgagaacatacgatgtttggttttccattcctgagttacttcacttagaatattagtctccaatctcatctaggttgctgcagatgctgttaattcatttctttttatggctgagttgtattccatcatatatacatataccacagtttctttatcaactcgttgattgatgggcatttgggttggttccacgattttgcaattgtgaattgtgctgccataaacatgtgtgtggaaatatctttttcatataatgacttattttcctttgggtggatacccagtagtgggattgctggatcaaatggtagttctacttttagttctttaaggaatctccacactgttttccgtagtggctgtactagtttacattgctaccagcagtgtagaagtgttccctgatcaccggatccatgccaacatctactgttttttgattttttaattatggccattcttgcaggagtaaggtggtatcacactgtggttttgatttgtatttccctgatcattaatgatgttgagcattttttcatatgtttgttggccatttgtatatcttctttagagaattgtctagtcatgtccttagcccactttttgatgggattgtttgtttttttcttactgatttgtttgagttccttgtagattctggatattagtccttcgtcaaatgtatagattgtgaagattttctcccactctgtgggttgtctgtttactttgctgactgttccttttgctgtacaaaagctctctagtttaattaagtcccaactatttatcttcgtttctattgcattcacttttgggttcttggtcatgaaatmcttgcctaagccaacatctagaagggtttttccaatgttatcttctagaatttttatagtttcaggtcttagatttaagtccttaatccatctcgagttgatttttgtcaaagctgagaggtgaggatccagttttaatctcctatgtgtggctaaccaattatcccagcaccatgagttgaaaagggtgtccttttcccactttatgtttttgtttgctttgtcaaagattagttggttgtaagtatgtggttttatttctgggctctctattctgttccattggtctatgtgcctatttttataccagtaccacgctgttttggtgagtatggccttacagtagagtttgaaatcaggtagtgtgatgcctccagatttgttctttttgcttagtcttgttttggctatgtgggctcttttttggttccatatgaattttagaattgttttttccaattctgtgaagaatgatggtgatattttgatggggattgcattgaacttgtagattgcttttggcagtatagtcattttctcaatattgattctacccatccatgaacatgggatgtgtttccatttgtttgtgtcatctatgatttctttcagcagtgttttgtagtcttccttgtagaggtctttcgactccttggttaggtatattcctaagttttttgttttgttttgttttgttttttgcagctgttgtaaaaggggttgagttcttgatttgattctctgcttggtcgctgttggtgtataggagagctactgatttatgtacattaatcttgtatctggaaactttgctgaattcttgtatcagttctaggagctttctggaggagtatttagggttttcaaggtaaacaatcatattttcagcaaacagtgacagtttgacttcctctttaccaatttgaatgccttttatttctttctcttgtctgattgctgtggctaggacttccagtactatgttgaagaggagtggtgagagtggacatccttgtcttgttccagttctcagagcgaatgctttcaacttttccccattcagtattatgttgactgtgggtttttcatagatggcttttattacattgaggtatgtcccttgtatgctgattttgctgagagtttgaatcataaagggatgctggattttgtcatgctttttctgcatctattgagatgatcatatgatttttttttaattctttttttcttttttttttttttttgagatggagttttgctctgtcaccagggctggagtgcaatggtgtgatctcaaatcactgcaacctccacctcctgggttcaagcgatcctcccacctcagcctcccgagtagctgggattacaggtgcacaccaccatacctggctaatttttggtatttttaatagggacagggtttcaccatgttagccaggcttgtctcgatctcctaacctcaggtgatccacccgcctgggcctcccaaagtgctgggattacaggcatgagccactgtgtcctacctgatttttgtttttaattctgtttatgtggtgcatcacatttagtgacttgcgtattttaaaccatccctgcaaccctggtatgaaacccacttgaccatggtggattatctttttgatatgttgttggattcagttatctagtattttgttaaggattttagcatctatgttcatcaaggttatcggtctgtagttttctattttggttatgtcctttcctggttttggtattagggtgatgctctgtcaagcttttctgatacaggttgagtatcacttacctaaaattcttgggaccagaaatgttttggatttcgattttttttcggactttggaatatttgcatatacataatatcttgggratgggacccaagtctaaacacaaaattcatttacgtttcatacttaccttagagacatagcttgaaggtaatttgacacactacgttaaataattttgtgcatgaaacaaagtttgtgtacattgaaccatcagaaagcaaaagtgtcattatctcaggtcccccatagcatcatgtaggtgctcaaaaagtttcagattttggagcattttggatttcggatttttggattggagatgctcaacctgcatgtattagtagtatgtaaacagtcaaggccaggtgtggtggtgtgcctataatcccagctactcaggaggctgaggtgagaggatcccttaagtccaggagtttgagactgtagtatgctataatcacacctgtgaatagccactgctctccagcctgggtaacatagagcgaccccatcataaaaaaaaaaaaaaaaaaaaggaaaaaacaattgagcaatccggatcataggatggctttttgaccagttttttcccacccagtgccctatggtaaatgtttccttgcttgatcggccttggagaacttgcctcataatattcattcacacactgctgtgattttgttatttctagttttcagtgtggcaaatatcactgcagtgaacatccttacttgcacatctttagtatttttttttgagacccagtatgattttttttttaagagatggggtcggccgggcgcggtggctcacgcctgtaatcccagcactttgggaggctgtggcgggtggatctcaaggtcaggagattgagaccatcctggctaacacggtgaaaccccgtctctactaaaaatacaaaaaaaattagccaggcgtggtggcgggtacctgtagtcccagctactcaggaggctgaggcaggagaatggcatgaaccgggaggtggaggtcgcagtgagccaagatcgtgcaactgcactccaacctgggcaacagagcgaaaytccgtctcaaaaaaaaaaaaaaaaacacacagtggggtctcactgtgttgctcaggctggtctgtctcaaattcctggcctcgagcaatacttccacctcagtctcccaaaggactgggattacaggcatgaaccaatgtacctggcctccttacttatacatcttatatgtgtctgatgatttccttggaataaattgatagaggtagaattaccaaatcaaatgatatatacattgctaggaacatattttaaaatgtacaaagtatgatggcaatagtttcagaaatttattctttaattcaataaacatttattgaagatttattagatgtcaactgctgggccaggcacaggtgatacaactgtgaacattatagacttatagctgcctcaaggagcttatggggttggggagagaggcaagagatcagccaatgaggaccagggtgagaagggataggatgtgcaaggacaggcagagagggctagtggcctgggaggatgtcctgggttatgacttcttcctggctggtctcccacagactataatctctgtaagcacagagctagccccaaacttcctgacagcccaaaggtccagtctgccctcgttgagatcaactggactggataaaataacagatctgcactggggtctggtcagatctgttgggggtatttatttctttttgtttgagacaaggtctcactctgtcacccagactagagtacagtggtgcagtcatagctcactgcagcctccaactcctgggctcaagtgatcctcccaccaagtagctgggactacaggtatgccactatgcctggctaattttgtttgtttgtttgtttgagatggagtttcgctctttcacccatgctggagtgcagtggygcaatctcggctcactgcaacctctgccttccggtttcaagcgtttctcctgcctcagcctcctgagtagctgggattataggcgcccacsaccacgccaggcaaatttttatatttttaatagagacaaggtttcaccatattggccaggctggtcttgaactcctgacctcatgatctgctcacctcggcctcccaaagtgcttggattataggtgtgagccacagcacccggccacattctttagtttttgtagagacggggtcttgttatgttgcccaggctggtctctaactcctggcctcaagtgatcctcctgccttggcctcccaaaatactgcaggtgtgggactacaggtgtgattacaggtgtgagccaccgcaccagactggggtatttgtttctaacccctgcaccacctcttaatctttgttacttcactcttctccccaaacatctgccctctgtctgtaaaacggggttagcagcaatatctgttgcattgggtggttgtgagctcacgaggtgatgcatgtcaggggcctgcctggcatcatagtaagtgctcagaaagccagggtaggatcaagcatgtatcagaatcacctggatgatttgttaaaacagtttcctgggcctcactctacagtttctgattcagcaagtatggataaggtccaagaatttgtgtttctttttttttcagagacaaggtttcgccatgtcacccagcctggtttcgagctcctgggctcaagcaatcctcctgccttagcctcctaagtgttgggattaccggagtgaaccaccttacctggctttctttttttttttttaatacttaattttttttaagagaggaatgtctcactctgttgcccaggttggagtgcagtggcgagatcatagctcactgcaaccacaaactcctgggctcaagtgatcctcccaccttagccttccaggtagctagkactacaggcatacaccaccatgcctggctaatttttaawttttttttttctttttgtagagacagggtcttgctatgttgctcaggctagtctcaaactcctggcctcaaggaatcctcctgccttggcctcccaaagtgctggaattacagtcatgaaccactgtacccagccaagaatttgcctttctttttttttttttttttttttttgagacggagtctcactctgtcgcccaggctggagtgcagtggcgggatctcggctcactgcaagctccaccttcctggttcacgccattctcctgcctcagcctcccgagtagctgggactagaggcgaccaccactgcgcccagctaattttttgtatttttagtagagacggggtttcaccgtggtctcgatctcctgacctcatgatccacccgcctctgcctcccaaagtgctgggattacaggcgtaagccaccgcgcctggccgaatttgcctttctaacaagtttccaaagkgatgttgatgccgctggtccaggaccacactttgaaaaccaatagcttaaatgaattacaccatggcttcctggtctgatatatctggtttccaccctccacaacagggagaactcaccagtgggccctgaattctttcatgtcagggccgtcaaaagaactgtgtctgatcagcctcctctgctccagcataggcacctttacatggttttacgggttgaattattattattattttcactttcatctctacagaaaataatctaaaaattagccaggtgtggtggtgggtgcctgtagtctcagctgctcaggaggctgaagtgggaggattgcttgaacctaggaggttgtggctacagtgagccatgattataccactgcactccagctcaggtgaaagaatgagatcctgtcccccactgctgccaaaaaatagtaaccagactccaaaagcataggcaacaaaagcaaaaatagacaaatgggtttataccaaattaaaaagcttctgcacagcaaaggaaatgacagaataaagagacaacccacagattgagaaaaaaatatttacaaaatatacattagatcagggactaatatccaaaatgtacaaactcagaccgctcaataacaataaaacaaataaccctattaaaaatgggcagggccaggtgcagtggctcatgcctgtagtcccagtactttgaggggctgaggcaggaggactgcttcaacccaggagtttgagacaagtctgggcaatatagtgtgaccccacctctaaaaaaataatgataatattaatacaaagcttctgggctgaattatgtcctcctcagaagttactgaagtcctaacctgccagtacccgtgaaggtgatcttatttggaaacagggtctctgcaagtgtaaaccagttaagatgaagtcatcagtgtgagccctgatccaatgtgacttgtgtccttaagagaggaaacacagagacatgaggggagaatgccatgtgatgatggaggcagagactgaagtgctgtggctgctagccaaagattgccagcaaacccccagaagccaagaagaagcggacggattctcccctacaggtttcagaaggagcatagtcccacccgtgctttgattgtagacttccagcctccagaactgtgagacaataaatttctcttgttttaagtcacccagtttgtggttctttgttacgacattcctaggaaactgataccctgaggtatcattttacagacaacaccaacacaaaccttttcaaaatcatttacttcttcacgggcaatatgactagccttctaccaaatttgtgggtgtttcctttcatgamgtccataggtatgagaaactaagcagtgaactctcatctgctgccttttgaccttcctactttcccggagtgtattttattatcccttatattttacctgtccacttggagaaggaaatgtgacagcacaaacacatgatgagctgggaaagcctcacacctctgtttcccatcagtgtgttccatgggagctgggtaagggcaagggaaggtatgggaaggtgtactctcaccctagtccaggagaccatgcccagggcaaagtgcaattcatcatcactgcatcattaccatcaaactgtgccatctctctggtccccatcctaggggattgggggtggggatctgtgttcatkttcaccttatttcaggcagttattaacctgaaggtgcctgtagggtctgcgagatagcagggaaggagtcttcgtctccctcacagatggtcaccttgtcttcagcaccaccacccccctcccaattgttctcatggggtaacctccttccttggcctcccatccccacaggacagccgttctcttcctgaaaggagggtcttttcaggaagtggaggactttaaattcctccttggatctatgttcacagtcttcagaacccagcctgtcccaactgtctctcaaaccttctcaaccactccctatccttcacctgaccaaacttactctagcacctacagcttgctatgccttctttgcttcctagagatggcacctgctgttccttatgcttaaaacacccttccagctgggcacagtggatcatgcctataatctcagcacattgggaggccaaggcgggcagatcgcttgagcccaggagtttgagaccagcctgggccatgacgaaaccccatctctacaaaaaatgtacaaaaattagccaggtgtggtggtgcatgcctgtagtcccagctacttgggaggctgaggtgagaggattgctgcctgggaggttgaagctgcagtgaattgagatcacaccaccgaactccagtctgagcaatagagagagaccctgtctcaaacaaaacaaaacaaaacaaaacaaaacactcctccatctccaaaccacatgaaacattcttggagagggggactggggaggttcttctgtgcacccctgagcaccctgcttccctctatctagaggaaggccacattgtctggtaagtgcttgtttgctgtccctcttccttcatgagassaaactctccaagaacagagccctggacttgtctgcatctgcagcagggagcccctagctttgtgattcaaaataggcttgtgggcttttcatgagaggaagaaatgggtgaaaaataatgatcatcaaaatgaaagttattattcatgcaagatttggggggagtctggcctcctgtattcaaaatctcatttaagktcaaaagacacttgggacccatttatccccactgcacaggtgagcacactgaggatttgagaggtaaagagtagatctcacagccagttaagtggtcgaaatacaagtatgcctgattccaatgccccagtcgcccccaattactgcatggacagagggcaaattggcaggctagcgggtctgcctttctggccgatggggaccaagagccccagacccgctcgggtaccagggccgcttaggccccggcgtaccggcgacscgtgcgcagtgcagtgcggcgccccctgcaggcagcgcgcaggagacggtagcggcgaaggggcgctcagtgcgcctgcgcgcttgtggagctggtggcggcgctccgcaggggctcggctgttttccgcgcggcaggcgcggccatggcgcagctgggaaagctgctcaaggagcagaagtacgaccggcagctgaggtgagccgaggctcaccgagccgagggcgggccggcgggctttccagcattcgggccgggcctaagggcgcgggcggcgcggtcgggccttcctcaggccttcttccaggctgggccgggccgtgcggggcgcgggaagccggcgctcggagctcccgccctgggccaaaggtgctccgcgagggctgggaccccttcccccgccacgcggtgtgcagttcgggggacggggtccccagcgccagccgggtagctaaggcggctgccggccccgttgcgcccaggctcctcgttttccgaatggggaggcccggggcgcaccgcatcccggccgcgagggcggcacagagggttaggttttgttctcagccagcgctgtccaatggaaataaaatgctagtctcatgtgagccgcaaatgtaattataaattttctagtaaccacactaaaggtaaaatgaaacagatgaaattgatttttaaatacaatttaacccaatatgtccaaaacattactatttcaacacaatataaaaagttcttgagatattttacttaaatttttatttttatttttatttttgtttttgtagaaacgaggtttttgccacctttccccaagctggtcatgagtattttcctttttaaaactgtcttggaggaccggcacggtggctcacgcctgtaatcccagcactttgggaggccgaagcgggcggatcacctgaggtcaggagttcgagaccagcctgggcaacatggtgaaaccctgtttctatttaaaaattcagaaattagctgggcgtggtggtgcgcgcctgtaatcccagttactctggaggctgaggctggagaatcggttgaatccaggaggtgtaggtttcagggagccgagatcgtgccactgcactccagcctgggtgacagagcgagactccgtcaaaaaagcccccccaaaactatcgtataaatattgtattttacacttaccagcacatctcagttaacactagcctcattgcttgtgctcagtagtacatgtggctagcagctaccttaatggacagtgcaggcctaagccatcaggagggtccttgggtacttccccacccttgccttttctccttgcactacccattccttatttattgagcgtcttctgtgtcttgaggctgtggagataacaaagctgctcagctttcctccttcctggagcctctgagacaacagaagttatatgtccccaaggactggagcttctgtttgcgccaccagcctagtgctgtagtagaggctttaggcacttagttctgagagtacccttgaaagcaaccatttcctgtgctttacagttggagaaacagagtcttggagaagttaggtaatttgcccagagttccccatatctttgagccaggatgtaaactaaggctcttctggctttttcggaggtactcagttacrtcctgcttccaagcttttcggagaagaaacagggtaacagtccttataaccaacttaggttttcttgtaaattcttggagttcttgtgtttctaatgcaggtataactgtacatgacagagctgagaagatagttgaggttactaagcaactctaacaaaagagggtttttgctgagggcattccatttaagtcccaaactttactttcatagtgagaactggttttgaagtgtcaaagggaagcagttagaagcaaaatgcagcagtcaataagcccctccttacttcacgttagttgggccagcaagatagtagagaggactgattcatttggcctrttcttgaaacatgttacttrgagacacaccaggattcttttttttttttttttcagggacaaggtctcactttgtgacccaggctagagtgcagtggctagagtgcagtggcaagaacactgctcactgcagcctcaacttcctgggctctaacgatcctcctgcctcagcctcttgagtagctgggactacaggcatgtgccaccatgcttagctaactgttttagagatgggggtttgcccaggctggtctcgtacctctgcactcaagtgatcctcctgcctcagcctcccaaagtgctaggattacaggcatgagccacagtgcctggcctcagtattctttttgttttatttttgaggtgggtctcagtatgttacccaggctggagtgcagtggctgttcgcaggtatgattattggcacaccacagccttgatctcctgggctggagtgatcctcctgcctcagtctcccaagcagctgggactacaggcacacacactatctcaccctgcttgagatgcaccagtatttttttttttttttttttgagacggagtctcactgtgttgcgcaggctggagtgcagtggcgcggtcttggctcactgcaatctccgcctcctgcgttcatgcgattctcatgcctcagcctccctagtagctgggattataggtgcgtgccactgtgcctggttaatttttgtatttttagtagagacggggtttcactatgttggccagcctggtctcaaactcctgacctcaggtgatctgcctgcctccgcctcccaaagtgctgggattacaggcgtgagccactgcgcccagccaagatgcaccagtattcttaaatttactctccaactatctaagcatccatcaaccatatatgtcaggtgtcttctacgtgccatactttgatggagaaaacaggcgtttacggtccatctggttcttctaggcgattcctccatayatttgacagctgtctgggcccttatggagcatacagtggagtggaaagatggatgctcagcaaacaaaaacaaatgaagccaggtacagtggcttgtgcctgtagtcccagcaactctagaggctgaggcgagagaaatgcttgaacccaggagttcaagaccagtctggataacatagtaagaccctgtatcaaaaacaaaaacaaaaaacaaggcagttgcttgacatgctctggaggacatactgactacataataaggggtaatctgctttaaatcaggtaacagggaaggcacattaatcactctattagaatgttcattgggtaatatactttaaagcactcctgtagaagttgatgtgaggcttttyagatgataattcagttttcttggtraagcttttgcagaagtcacagtaataagccctatgtcgagatcttaaatgcatctaacttaacttaaatgcatctaatataattttttttttttttgagacggagtctcgctctgtcgcccaggctggagtgcagtggcgcaatctcggctcacttcaagctccgcctcctgggttcacgccattcttctgcctcagcctccgagtaggtgggactacaggcgcctgccaccacgcccagctaattttttgtattttttagtagagacagggtttcaccatgttagtcacgatggtctcgatctcctgacctcgtgatccgccygcctyggcctcccaaagtgttgggattacaggtgtgagccactgcacctggcacatctaacataatttaagaataaatgaaatagggctgggcacggtggctcacacctgtaatcccagcattttgggaggccaagtgagctgagatcatgccactacactccagcctgggtgacagagcaagactctgtctcaaaacaaaacaaagaataaatgaaatagaaaacagatgagggtttaaatccaaagacgctttttaaatgtttgtttgtttgttttgagacagagtgtcgctcttgtgcccaggctgataaggggctggaagaccaagtttctgtttctaatttgaccctctccctcttttcccctaaccattcaaggcatcaacctgagttctagattactgtataatcactatactaatatctgttcccgtcttacctgtattctgtggttatcatatcagtctatgcaaggaaagtttaaagatcaccattcaaataagaaagctgtattttcatgaaagttttaaaaacatcaaatttgtgtctgttttgtaggttgtggggtgatcatgggcaagaggctttagaatctgctcatgtttgcctaataaatgcaacagccacaggaactgaaattcttaaaaacttggtactaccaggtaacgtaggtttgtggttgtgttctaaatatacttctttaagtttatgacctagaactatgtattcctgactgactctgttttggctctcaggtattggttcgtttacaattattgatggaaatcaggtcagcggagaagatgctggaaacaagtatgttctattctcttcaaatatattcacgttaaggaaggcaaggcctgagtcttagcttcacctcctcagtcagggtgactcgactctcagtggaaatcatccttatgtttgggattatggtgaggaagtgagataatataggtaaagtgctagtacagcatctggcaaatagggcattaataaatgttacccatcattactgtctttattgttattaatacaawggagtagtcgttattcctttattcayggaatatgggcacttcctaagctcttgtattgatccgtaggtgttagcatataattaacaataatgcctgttgtttgtgatgtcttttaggcttagtctaggggtatctctctttacagtgtcaacaaaaatgctgttttaaagatggcctgtatattattctttaaagattatatttagactttcagaacatgcccaaatttggatttaaagctcaccttttcagggacttgaagtctggtatctctcattgtgtttgtcagtaacaacaacagtgagtaaatataagggaaaccagcaattagttcatatttagttttgatgccttttctttggatcgtagtgccagyttctgccaggcacagcacagcttttttattgatatataccaagaagtcttgttatctttgcttacttggtgggttagagtagaaagtgataaaaataaggtttcttcttatggagccagtgagcttataccgaaaagtggcatcctgactctgatcagcagcctcatatctgggccttgagacatgtcaagggtatgtgtgggaggaagcctgaataaatctgttacagttacgtgcaaaaacaaatggttcaatacaccgagagtggtctgtggaacaccggttctagggaacgataagagctgttaaatgggccaatgggttccatagtgaaattagtttgggaaatggatcaaatgaagtaaaaatttctttaccataagattttagtatcacatgtattatgtgtattatgaatttccaagagggaaatatagtatatggtgtttcccaaactttttttttttttttttgagacggagtctttctctgtcgcccaggctggagtgccgtggtgcaatctcggctcactgcaagctctgcctcccaggttcacgccattctcctacctcagccttccgagtagctgggactacaggcgcccgccaccacgcccggctaattttttgtatttttaatagagacggggtttcactgtattagccaggatggtctcgatctcctgacttcgtgatccgcccacctcggcctcccaaagtgctgggattacaggcatgagccaccacacccgccggtgtttcccaaacgtttttagccaaggaacccttttctctcagaggatcttgtgaaattcacatgctgtggtacacaatttgggaaagaaacattgatttattagcctatctttctttataagttccatctgattttcttcctccaggaaggccattacagtctgtaatcacaatatagtttgttttatactgtgaatgaaatatgcatgctattacaaacaacttttcctttatagtcagtaagctttactttyttttcctttattctgttcactttagtttcttccttcaaagaagcagtatcggcaaggtaaacaattagagaatatagttggatgtgagcatctaatgatgcccctgtgttttgattgcttgaaaagctttgactttaaaaacgtgtattatttctctgagaaaaaagttaactaatttttgtaatcttgtaaatcttcatatgtttggtagtttaagaacttagaggtgtactgtctgtgtttatacattgcatcctgtattaaagctaratcttgagtaatgttaatattcattctggttaacaaattttttttttttgagacggagtctcgctctgtcccccaggctggagtgcagtggcgcgatctcgactcactgcaagctccacctcccaggttcacgccgttctcctccctcagtcttccgagtagctgagactacaggcgcccaccaccacgcctggctaattttttgtatttttagtagagatgggatttcaccgtgttagccaggatggtctcgatctcctgaccttgtgatccacccgcttcagcctcccaaagtgctgagattacaggcatgagccaccacgcccagcctaaaaaatcttacaaaaccatgttagtcaacttagtgaaatgacttttagcttagtgattaaccactcttgtacaggattatagatgtgggtggttagagtgagtctgaacttgatccaggatatccctgcctgctacccagagttttttggtcatttgcctaatcaaaaaagtagagtacaagtaatgtcatttgagaactctggatgatgatggttttgctctgttttaagtaatattctgttgagtcttaaacactaggagaagcagaattggctgggagcagtggctcacgcctgtaatctcagcactttgggaggtcaaggcaggaggattgcttgagaccaggagttcaagaccagcctgggcaacatgtcaagaccctgtctctacaaaatatttttttaaaaaattagctgggcatggtagcacatgcctgtagtcccacctacttgggaggctgaggcaggaagattgcttaagcctaggagttcaaggctgcagtgagctatgatcaggccactatgctacaaactgggcaacagagcaaaagcctgtctctaaaaagaaaaaagaagggaaacagagttgtcatacttatgcatgaaatttggatagttttacagtatgtttgcctgttscataaattgggggattatattgtgaccaagttttttctaattcaagttaaatgctttgtttttaaaaagaaccgagctgaagctgccatggaattcttacaagaattaaatagcgatgtctytggaagttttgtggaagaggtatatatgtacacacattattatgtctktgctgaaatacaattttttaaataattcaaagccccagaaatttagaattttgaatctttgtgtcatttatgattagttgaattggaattgttgcctcatttgttgtaaaatagcttaactgtctctgccatgtttaatatgattgtgaaattggttttttttgtttgttttttyctttgctgtcctgtttagagtccagaaaaccttctagacaatgatccctcatttttctgtaggtttactgttgtagttgcaactcagcttcctgaaaggtaaatttttatgttaatatgtttttattttaatcttattagatttgcattgttttattttctttgcacagtctatgatgatatggttttaaaaattgttaaattctatagaaactttaaatatgaaactttttttttttttttttttttgagcttgagctcaaattcctgagctcaagcaatgcaccctcctcggcctcccaaagtgttgggattacaggtgtgagccaacrtgcctggtcaagagtttcagatttatggctgggcacggtggctcatgcctgtaatcccagcactttgggaggccgaggcaggtggatcacgaggtcaggagattgagaccatcctggccaacatggtgaaatcccatctctactaaaaatacaaaaattagctgggcgtggtggctcacgcctatagtcccagctactcgggaagctgagacaagagaatcgcttgaatcagggaggtggaggttgcagtgagccaaagatcgtgccactacactccagcccttgtgacagagttagactctgtctcaaaaaaaaaaaataaataaataaataaataaataaaagaaattcttagaaatcttccagcattgaaaagatgaggaagagaaaaatactgaaacttttttttttattattattctttagacagagtcttgctctgttgctcaggctggagtgcagtggcacaatcttagctcactgcaacctctgcctcctgggttcaggtaactctcgtgcctcagtctcccaaatagctgggattataggcatgtgccaccgtgcccggctaatttttgtatttgtagtagagacggggtttcaccatgttggccaggctgatctcaaactcctggccccaagtcatctgcctgcctcagccacccaaagtcctgggattacagttgtggagccaccaagcctaaccttagatgtgaaacttttggaatatatttagagcagttaaaccgaacattgtttttttgttgttgttgtttttgttctttgtttgttttagtgattaaaaactagttagaattgattattgaaggctgggtgcagtgactcatgcctgtaattccagcagaaccaggctgagacaggttcagatcacttgagcacaggagtttaagaccacctgggcaacatggcaaaaccttgtgtctacaaaaactacaaaatttagccagatggtgtgcctgcttgtggtcccagctactcaggaggctgggatgggagaatcacttgagcctgggaggtcgaggctgcagtgagccatgatcatgccactgcactccagcctgggcaacagagaattggttattggaattgttaggggtgtayttgtgggttttatattttttctctatcatggaaatgtttagaattatctttctttaacgtttctccttaatatgacagactaaagtttcacatccctcttgtccaaagatgtactttctttgagactrcagcctgtggaaatgcttgcttttcagtgtgttcttgacctgcttatgtaaatgcagttatgtacctttgcatctattatttagtaagaaagttgctgtaagacattttcatgttttgcatgttttcatgtttggcatatttccatttgcttatgttcatattttgcttttwttttttaarcagcacttcactacgcttagcagatgtcctctggaattcccagattcctcttttgatctgtaggacatatggactagttggttatatgaggatcattataaaagaacatccaggtaaaattgttgagcatatgggcttactattggttgctttagctataattttagaaacttgacaatttagaaagtcagttttaaattacaaagtaaatttgtagcagcacatctctagttgcagattcaaagtggcaatcagattcaataggctgcaatctactctttatgtagcattatagaaggatacaaagcatgatataccacaggcacagcttcttcatcttattaggagatccagcaactatgcaagtacccagcttcttttgccccctaacccacattgggcatgtatggctgtggagagctaaggaatgtggatcactctgacccatgaagttacaccacctttccccactccagtcttttttttgttttttaagacagagtttcgctcttgttgcccaggctggagtacaatggcacaatcttggctcactgcaacctccacctcccgggttcaactgattctcctgcctcagcctcccaagtatctgggattacaggcacccgccaccatgcccagctaatttttttttttttttttttgagacggagtctctctcttttgctcaggctggactgcagtggcgcgatcttggctcactgctacctccacctcccgggttcacgccattctcctgcctcagcctcccgagtagctgggactacaggcgcccgccaccgtgcctggctaattttttgtatttttagtagagatggggtttcaccatgttagccaggatggtctcaatctcctgacctcgtgatctgcccgccttggcctcccaaagtgctgggattacaggcgtgagccaccgcacccggccgcccagctaattttttgcatttttagtagagacaggatttcaccatgttggccaggctggtctcgaactcctgacctcaggtgatccacccgccttggcctcccaaggtgctgggattacaggtgtgagccactgcaccaggtccgtccaatcttttatttcattctcatgcaggctttaggttctctcaattcaggtgcaatttcacacaacaaagacatttacataactactgttcccaaggaaactgttgtaagagaccaaagtcgtttataggcagacctccatcagctgagggtttatataagccctttacttataaaattytaatcttagatgatcataaaattttcatccagtattcaaaacagtgctctttattgactcaagaaarcatttttactatgagccaagcactctgctaatgtggtgatagccattggcattggtagcatcactgaggagtaatatctgtgtgggcagttagggagtgcttgtcaggataagctctggctgctggtggtgagccatttaagagttgaaagtggtgtcaactgatgggagggaacaaaagagttgraagtgggagagtgaccatgtaaacattttattttaaatgggtcactttgaagttgagtggaaagtaaatggatttaaaggggcaaagattggaggcagtgattgctgttagaaatttccagtggcctaagtaagagagagtgtgttctttttcctaatttagggaagagaagaagagagggtagataataatgaaggttcagcattactagttgtgtgcctgcctttataagaattatttcatttactctttccaaaacctttataaggtacagattgagtatccttaatccaaaaatccaaaatcagaaatgctccaaaatgcaaaactttttgagaactgacataatattcaaaggaaacactcattggaacatttcttacttcagatttttgggttagagagctcatctaatatgtatttgcaaatataccaaaaactcaacaaaatccaaaacacttatggtcccaagcattttggataagagagatatacaatctgtagatactttaatatctgctttttatagatgatgctgaggcaatgagagattaaattatttgcctaaggtcacatagttagcaagtgacagaactgggcctacctctaagcactcactgaaattatacactctcctgtcctctctcatgtggagagcagtgtacagagtgagattaggaagtggggagttactgatgttggggccaaggaagcaagaagtgaaggatgcccatcaggtttctggagaagaagtctaggtagatggtgatgctgtctattgaagaccacaagaggaggaaggataggttgttagttgctatctgtacctagggtttgtcaatgttgagcttttccagttagaacaaattgtgttstaaaggaatcttggttttacttttactaaaactytatagttgacttaagatttctgcattttactatatgtaaatcgtaccttaataaaacagtgaaaaaacctgtgggccctgtgtccatttaaaaattaaagatttcctaagtttctataattcaatgtattgtcatcagtattgccaaagaattaagtttatcttttgagctgggcacggtggctcacacctgtaatgcaaggactttgggaggccgaggcaggaggagcccttgaatccaggagtttgagactagcctgggtgacatagtgagaccctatccctacaaaaaaattagctgggcacagtgacacgagactgtagtcccaccttctcaggaggctgaggtgggaggatcccttcagcccaggagtttcagcagtgagctgtgattgtgccactgtacttcagcctgggtaatacagcaagaccccatctctctcttttttttttttaagtgttaaatttatccttttgaattctttgtttcacagtaatagaatctcatccagataatgcattagaggatctacgactagataagccatttcctgaactgagagaacattttcagtcctatgatttggatcatatggaaaaaaaggttggtagtgtgtgtgaccttacatttacagatagacttaaaacatttttttaacctaaggtttttgaattacactaaagtgagaaaatcctataaacttccatattcctgtcatcccgattacccaataacagtattttaccttgttttcaacatattaatttttctccaaaattaaaaaacttttttactgaagaaaagtacatatactgaacatctgtgtaatcactacccaggtcaagaaattggacattaacctattccaggtggggagatggggatggttaatgggtaccaaaaaaaaattagaaagaataaataagatttactccttgaaagcacaacaaggtgactatagttagtaataacaactcagttatacattttaaaataattaaaagagtttaattggattatttgtaacataaaggataaacgcttgaggggataaatgctatacagataccccattctccatgatgtgcttatttcacattgcatgcctgtatcaaagcatgtaccccataaatatatacacctaagtacccacaaaaattgaaagtaaaaaattttaaaacaaaaaacagaaataaaaaaaktccaagaagttctctttatggactttttctaaacaaatagaaataatgacataacactataaggcgtatatgtattttttcccacttccatattaattaacatgcagttgcttatttggttcatcagaaaacagaaaagatcctcctttcttacttaggattggtgtctgaaattgagatttgagctgtgtttttgggtggcagtctctgagactgttttgctggtataatggggacaatcatagtatatatgtgacatactaggtatctgcctctagaaaaatttgtaaagcagtttttattaactcagttcattttcgtctattcactactctgcatatattaggagatcataaatattgttgaatttgttgaaaacgagatggtacagtgaagaattcataatactgatattttcttttatttgtctctcatttttaggaccacagtcatactccatggattgtgatcatagctaaatatttagcacagtggtatagtgaagtatgtccttttttaaaaaaaatttcatatgcaactgtattttcagtttcttacaaaggatttccttgatggggaatgggagattaattttttttccttatggrgttgtatggtagggcaaatggatgcttttaaatttaaatctagcagttcctcttttgatcctgataattttaattaaaatgaaattcaataaatgtcattatgaaactggcagggggaatgaatgtagataaatggtcacagtgtctgttttctatcaagtgagcctctgatttcacagagaaatatatttgttgatgaaatcttatgtagagaatgggggacactttagactttcaatttctgtattttgaattttaataactagatttttaaaatttttaaccaatttagacaaatggacgaatacctaaaacgtataaagaaaaagaggacttcagagatttgattagacaaggtaatatgggatatgattaaatactgtataaagcttgaaaagcaaattgctagaggcaggtacttattggatttctgttaacacctttgtcagatgatagcatsatgagcttttattttccttctggagaagttaagaagccacgccttgtatagttttaaggactaatgataagccgtatttcttcttaagatttaatattctgcaggatctgacaaggttatttttataatgggggaacagaagagtgaaaagaaaagggctgtttgctaacaatttcccattacaataggaattctaaaaaatgaaaatggggctccagaagatgaagagaattttgaagaagctattaaaaatgtgaacacagcactaaatacaactcaggtaatgaaagagttgctgagggattcacatgaacaagatgttttctagagtccttggctattaaatggttgactataatgatttaagttaatattttctaaatgtatagttagaaataaatacagggccgggcatgctggctcatcccagcactttgggaggctgaggcgggtggatcacctgaggtcaggagttcgagaccagcctggccaacatagtgaaaccgcgtctctactaaaaatacaaaaattagctgggcatggtgaacatacctgtaatcccagctattcgggaggctgaggcaggagaatcacttgaacccaggaggcagaggttatagtgagccaagattacaccactgcactccagcctgggcaacagagtaagactccgcctcagatgcctttggttttgttatggcttagttgttgaggtctgaccattgaagtttttggggagctttggaataacacctggtagtttaagttagaattttcttgtaacttaaaacagcaaatatgctgcctttcaagttaggaaggcacgtaagatattattaccaactttttagagacaacaaggcagtgttgctgagtgattaaaagtgtgctggctggggccaggcgcggtggctcacacctgtaatcccaacacttttgggaggccgaggagggcagatcacatgaagtcaggagtccaagacgagcctggccaacatggtgaaaccccatctctattaaaaatacaaaaaattagctgggcatggtggtgggcacctgtaatcccagctgcttgggaggctgaggcaggagaaccgcttgaacctgggaggtggagattgcagtgagctgagatctcatcagtgtactccagcctgggcaacaagagcgagactctgtctcaaaaaaaaaaaaaaaagtgtttgctggccaggtgtggtggctcacacctgtaatcccaacactttgggaggccagggcagaaagattgcttgagcccagttcaagaccagcctggacaacgtagggagatcttgtctctacaaaaaatttaaaaattagatgggtgtggtggcatgcacctgtagtctcagctactctggagcctaaggtagtgggaggatcgcttgagcctgggaggttgaggctgcagtgagccatgattgtgccactgcactgcagcctgggcaatgatatgagaccctgtgtccaaaaaataaatgtgctttgtgaatcacttttctggggtgatgaacattttctgttttaattggggttatggttaaaaatatgtatatatagttatcaaaatgcattgaattggacatttgaaatctctgtatttcactgaatataaaaccacagttgaaaagaaaagattctaatagttggggggcagtaagctaaataaacagataaaaatgcaccaggtgctgtgaacaaaattacagcagaacaaagggtcagagagcatgctggggacaagggaatccggggttgagagacaattgtacatagggagccagggagactttccaaaagacatttaagcagaagcctgagtgaagtgacacgcagaggtctggtggaagagcttttcagttggagggagcacatgtgcaaaggcccagaagtgggatgaagcttgacttttgttcaagcatcagtaagcaagtcagtgtgattggagtgaagtgtaaaagggggaaaagtggtaggaaggatttgagtttggagaggcagaaagggccagatcataaaggccttgcaggctatttaagcatttcagtcagggaagtggattgagctgctttgtattctaaaagaccattctggctttcatgaggagaacacaattgaggggactgggagtggaagcagagagagcagttaggaggtcccactgagacatttcttttttccacccatcagtagaatccaagcctatgatttgtgtgtgtgtgtgtgtgtatttttttttttttttttgagacagggtctcacattggtgcccagggtagaatgcagtgacacaatcactgctcactgcagccttgacctcctgggctcaagtgatccccccacctcagcctcccaagtagctgggaccacaggcacgtgccaccacgcgcagctaatttacttttatgttttctatagacggggtcttcctgttttgttcaggttggtctcaaactcctgggctcaaatgaccctctcaccttggcctcctgaatgctgggattatagatatgagccattgtgctcagctttatactcttgattaacgtatgaagatcttgctagcaataaaattactttatggttttagtttttttcagagtggttgtctcaacggtcactaattagggtgcaagggtttcagatttttgacaagatggaaaatcatgatatactgcgagtctataatctgttttgtcttcagatgtaactatataaaataatttactggggccccttctttaccccatttatggtataagagaataggtattaaatggtagcaacagtgggccggagaggtctttcttccattctttccccatcaaatcttcatatggtactgattctaaataaaattataaaccaatcagaagtttgtatttgattacaatttgagaattcaaagaacatatctgaagaaatagcactgaaaataaagatgggcgaattcttaatactgtgtaagtaaatgtttcatgttcctttgttagatcccaagcagtattgaagatatatttaatgatgatcgctgcataaatatcaccaaacaggtaacaacaacaaaagtaaaaacattgctgcwaaaactttgggtcaaagtaaaacgccacttaatgttaattttttcttattcttttagactccatcattttggattttagctcrtgccttaaaggaatttgtggccaaagagggtcaaggaaatttacctgttcgaggcacaattcctgatatgattgcagattcaggcaaatatataaaactgcaaaacgtgtatgtcactgttttcaaactatgtaatagaaaaagtctgattatattagagataaacattttatcatcctgtcagaaatcaaatgaaagtttattacaacctcattgcttataaataaactaggccagctgcagtggctcatgcctgtaatcccaacactttgggaggccaaggtgggagaattgcttgagtccaggagtttgagaccatcgtgggcaacatagtgagacttccatctctacaaattgaaaaattaggtgggcatggtagtgttcgcctttaatctcaactactcaggaggctgaggcagaaggatctcttgagctcaggagtttgaggctgcagtgagccatgatcatgccacttcacttcagcctgggtgacagagcaagaccctgtttcaaataaataagtaaaaataagctgaagaacttagaccaggctgggcgcagtggctcacacctgtaatcccagcgctttgggaggccgaggcaggcggatcacgaggtcaggagattgagaccatcctgactaacacggtgaaaccctgtctctactaaaaatacaaaaaaattagccgggcgtggtggcaggcgcctgtagtcccagctacccgggaggctgaggcaggagaatagcgtgaacccgggaggcggagcttgcagtgagcggagatcgcaccactgcactccagcctgggcgacagagtgagactctgtctcaaaaaaaaaaaaaaagaacttaggccgggcgtggtggctcacgcctgtaatcccaccacttcgggaggccgagacgggtggatcacaaggtcagaagatcaagaccatcctggccaacatggtgaaaccctgtctctactaaaaaaatacaaaaaattagccaggtgtggtggtgcgcacctgtagtcccagctattcgggaggctgaggcaggggaatcgcttgaacccaggagacggaggttgcagtgagccaagatcgtgccactgcactccagcctggagacagagcaagagtccgtctcaaaaaaaaaaaaaaaaaaaaaaagaacttagggggcaattcttgttaagctcaaagcaaaattgaatgggaaatacagaattaccacatacgcctaggaggcagagttttttttcatacttcatgataaacttaatatttgatcmcttaactctgtgctatgaactatatgtattaagtaatttaacacacacacaaggttcacaacgaccttatgagagagagagagactgttaccggccccattttacacatgaagaaactaaggtattgaaaaggttacttatacaaggtcagatagctggtaaatggcagaaccaagatttgaaccccaggaaacccagtaccagagcctgtatgcttagctatggccctatactaccttgtatttgtaacttaaaaccatgaaggtttgatgaattttttatcttaatgtttcataagttatagtctatgactatagctagacatcttgctatccaggtatcactagcctgaacccagatagactatcacagggatgggtctcaatgaatatgaccctcgtatagttagggcatggtgcaaagaatccaggtctgctggctcggtttctttggggtccaagtaatgtcacacagagatgatctctcttccccagacagatttcactctttatcatgtcaccattgaacgaatcttggtttgttgtcctagcctaagagttcaactacttaaaacttggggaaggtcaattgaggatagaaagaagtatgaccttacatgggaggtagtcagcctgaacactgatgatttttagagggtgaaaggtaaatagacgtaaagaaaacttttatggccggatgcagtggctcacacctgtattcccagcactttgggaggccaaagcgggtggtgaaatgtgccacaagggatgttcacagttgttttaaatggttgaaattttacgttttccatggtctgtctcagtggtatagatacagataataattgggtaagggtttttttttcctctcataataaatacagagtattttaaaacaatcagaggtagagcatgtttatctatggcaatgctaaaaaggtatgaaggtcagttaattgaaaattgtcattaatacagtattttcagtttctaaatcacttgaacccaggagttcaagaccagcctgggcaacatggtgaaactccgtctctacaaaaaagacaaaaattagtcgggcatggtagcgtgtgcctgaattcccagctacttgggaagctgaggtgggaggatcagttgagcgtgggaagttgaggctgcagtgagccaggactgcgccactgtactccagcctgggtggcagagcgagatcctgtctcaaaaaacaaagaagttttacattggagatgaacagttttaatgtatttaactttycttggacttgacttccaggagataagtcatgttcttcagtaatgtattttttcaggtcctctgtcacagaagccgaaatcatagatccctctaggggagcagtttttaagttgggtgctgttagagggaccctgggttttagtgggcactgagagtccgtcactaacactggaaagattcccagctactcatggtgctgttgatagcatttccctggcattttcacatttcatacattgtcagacctgtgttttttcatgaaaaggaaagaaaatttttgttcatggtaacaatttaaattttgctaatttaaaaatttgttagtaattgctttttattcttttttagttaccgtgaaaaagcaaagaaagatgctgccgctgtgggtaatcatgttgccaaattgctgcagtccattggccaggtaagctactgggcacactgtgcccatacaggcctcagcacgtaactccagccagaaagggtttagagacagagggtgtggcactgcctctgtgcttctttagagggagctgtcatttccctgcctaatgggatagcttgtgataaggaaacaagatatttttaaagtgctctcccagctcttggagaaagccttcccatctcacagtgattggctttgtgccgcaccctttgttaatcttctcttttaaactggaacagaatctgtatttatctctttacaggcaccagagtccatttcagagaaagaattaaaattactctgtaagtccccttgaattaatttccttattttgcttgatagaaatgtgccacagggaatgttcccaggtattttgaatggttgaaattttaagttttccatggcctcagtgatatagatatagataattattgggtaaggttttttttttcctctcataatacaatacatggcgagtattttaagactgaatcagaggtagaacatgtttatctgtggcaatgctaaaaaggcttgacggtcagttaattgaaaattgccattaatacaggattttcagtttttaaattttaagtaatttaggaagtttttttgtctgaagactttgkgtgtgaagtcttgagtcacatgtacattgacaatattggtttaaatactcattttgatctgtgttaaatgactgtaatggagttaagaattttgccatctagtttcggagtggttaggttcgtaggagtcttctcagtaactcctcagtaggccaaaagcattttcttttatttaagagtcagtttcaaaatacccaatctgttgtgcatgccatctgaagatttctccctgtagctactgctcctacgtcctgtggaagtttatattttgcatgctccccatccttaaaatagatttatccaagctttccattttatgacttctccacaatgtctgtttaggctcggttttaatgttttctgccactactaatcttgcaccttgtttgttctattagactaatcttgaattagcgtttgttgtattagattatataatactagatcacaagtttgatgctgggtatttgaacatttattattctgttctactttggggcgtttttgaaaatttcartaatacaaagcttaaagtcattacatatatcaagagtacaattcataaacctctctcctttaggactacytatccataataatgatgaaaactattatttttagagccatatcaggcattgtgctagagatgcactttatacagatgtcacatttaatctgtagaacaattctcaaaggtaaacagtatcatccccattttacacttgaaaactgaggttcagagaggccatcaccttacttgcttctgaactggttgtagtgccagggatataaatttaaggtgattcatgttctagtgctttctctgctattagaaccaaggagaaaacatttcttcacattctcatgtctgagaagggtatacacataattctctgttcttaaagtcacctgtgattcataatattcaccagtcacagtcattacttccagaatatctttcctctgttcaggcagcaattctgcatttcttcgagtggtaagatgtcgatccttagctgaagaatatggtttggatacaattaacaaggatgaaattagtaagtataatagccttctgattctgggttaattttaattaatttaaaagatataaatattttgtgtataatagtgttgagtatatggtgatgatatwaaagataaygtaaacatattctaattttattctaagcttatctaggtaattataatttatatattatatgaaacttaatgtatgcataaagtcatatttaggtcactgagtccaytktgtgatatgtatgagttaaagtcagtatgttactacttcagtagagattgtgtgactccagttaatagtcctgaaactcaagtatatagtaaattcagcccttcattgtttgttacattgcaaattaaccaaattaaactgaaattttttttcctttcagtttctagcatggacaatccagataatgaaatagtgttgtacttaatgttacgggctgttgatagatttcataaacaacagggtagatatccaggtaagaatagcaattgaattaccagatataataagatcttcaataaaacatttaaattgaaagtgttctcagggtatttataatagtgttgcttgaatttcacattgtaaacagattacaccccaaacgttccccagtgaagaaccaccttttgttttttaagtttaactatttgcaaaatagtgttcgattctaaactattacagggggatgttggttgaatatgtayagaagaaaacttttttctgtcattttccatagtttgttactaagactcacactgagtttaatttagtggaataggaaagccacaagaaatatgctggccaggcatagtacggtggctcacgtctgtaatgccagcactttgggagactgattcaggcagattgcttgagcccaggagttggagaccagcgtgggcaacatggtggaaccccatctctactgaagatacaaaaaattagccagacatggtggtgtgcacttgtagactcagctactcgggaggatcacctgagcctgggaagttggggctacagtgagttgtgattgtgccactaaactccagcctgggtgactgtggtgagactgtctcaaaaaaaaaaaaaagtatgctactaatttctgaactcaataactctgaagatgtaggaatttctttgtttagttatctactttttatcttcagcaaatgtagtcattggagaattggcataatctcaaagatctgaggttgctcagaatatttttctttgggatgataattttaattgtgcaggattattgcatagcaacacattctaggggtatcataaaacctgctgctccatctgatacagtgtgtctccagagtttatagtcttttttttttttcttttgagacggagtctcgctctgtcgcccaggctggagtgcagtggcgtgatctcagctcactgcaacctccgcctcctgggtttaagcagttttcctgcctcagcctcccgagtagctgggactataggcgcccgccacctcgcccagctaatttttgtatttttagtagaaacagggtttctccgtgttggccaggctggtctcgaactcctgacctcaagtgatcctcctgtgttggcctcccaaagtgcagggattacacgcatgagccactgcgctgcccagagtttatagtcctaacaagcaagcttactagaagaaaaaaaaagaataaacaccaaatatgtattgctttatttgtattatttgattagtatttatttcagttatctgttgcataacaaaccacttcaaaacttagtggtttaaaacaataaatagtgtcgtgattttgtgggttgcctggtctcaggcagttctccttggggaggcatgcagttgcttgagcctgggggtggagtcattctgaaggcttgactgactgagttagacatgcaagaagacatttttactcatgtaactagcaccttagtcagaacagtgggaatagctggcggctggtcaggtatctcttcacgtggctagcttggacttccttttggcatgtcagttggcttctgcagttaacattccaaaaaacccaagtggaaggtacagggctttttatgacctagctttggaagtcatacagcatcacttatgagctaagtaacttaatctctctgtgctttagttttctcttctataaatggagataactatacatacttcataggactgttttgaggattcaatcaattaatatagatataaggtccttagaacagtgtccagcatctattaatgctcaataaatgtgacctattattggccaggcatggtggctcacacctgtaatcccagcactttgggaggccaaggcgggtggatcacttgaggccaggagttcgagaccagcctagccaacactgaaactaaaaatagaaaaaattagctgtgtgtggtggcgcactcctgtagtctcagtttcttgggaggctgaggcatgagaatcatttgaacccggcaggcagaggttgcggtgagccgagactgcaccactgcactccagcctaggtaacagcaagactctctctcaaaagaaaaaaaaaaagttacctattattaatagctttatgtcctcagtgtcatttatcatttagtcttttagaattggagaataacttttataaagggtataagtaggacattactttctcattcattaagttcttctatcaaataattattaagcactatgtgccagatgcttttctagacagtgaatatgatgcaattaataaagatttaattaaattcaaatttttactaggttttagttggtctctgattataggtttgtgatatgtgcaaatattggtctcatactttgttatttttgttcttcagtttcatacatattttgacwagaacatctgaaactagattaaataaaggagttggccattaattttgaatcacatttattttaatgaaaactaacttttatttttaggagtatctaactatcaagttgaagaagatataggaaagttgaagtcttgtctcactggcttccttcaggaatatggtttatctgtaatggtgaaagatgattatgtccacgaattgtgagtattttttagggtatctaggagatgattccacacctgtcataaggctaatcaaaattcatgtctctgtggtctcctttagttgccgatatggagctgctgagccacataccattgctgcattcttggggggtgagttccatatatgagaagactcacctkttgttacatagtacagttactattttaatacaaagttttgtcgtctagctattttaattagggaggtcagtgaagcaggatgttatatttctttcttttttttttttttgagacgcagtctcactgttttgcccaggttggagtgtattgatgccatcatagctcgctgcaacctcaaactcctgggctcaagtgatctctcgcctccgcctcctgaatagctgggactacaggcatgtgccagtaagcctggctaatttttcaattttttgtagagacagggtcccactatgttgctcaggttaggatatttattcagttgcccctatactggtctccctgccttccatctctcccactgccatccaacttaaactccttaagagtcattaatccttctaaagcatagctctgattgtgtccttttactaaccctctgccccaccaatatacataacactctacaacagtcctccaagcaagtccaaggactttggcttgacgttaaaaaaccctgtgttttggttccactcggcctttccagccttggttttatcatattacttgctttccccccaggatgccctttgatttcctgctcctagatctttgctcctctgtgcctatttgccttaaaaatatgtttttctgcatgtccaaaacctatatgttcttcaagacccaactcaaaaatgacatgtctttcataaaagctccctttacttccctccctcactctacttcccccttgtcttagtcagtttgggctgctgtaacagaatatcatagacttataaacaataaaaatttgtcacagagttctggaggctagaagtctgggatcagggtgccagcatggtcaggtctggtgagcgcccatttcctggttcataggcagctctctcttctgtgttctcacatggtgaaaaaaaaaatggcaagagaagtctctggggtctcttcttagggcactaatcctattcatgaaggttctacgctcttgacctaatcacctaccaaaggccctatcctcatacaattacactgggggttaggatttcaacatatgaatttgagggggaaacgaaccattcagtccataacacccctcaaaaaaaattactgtcctgtgatctcctgtagactgagctattagcttgtggcattttccttctagatgttgaatgttttaaaggcagatttaggtctaattaatatttgaagtgttcaaartgtaaatgcatcatacagacctaagaaaactattttctaagcaaatccaaattaaagcctgattcagaataatttattttaaactaaaaccaagtagtctcttgtgccaaagtagcaaaattttctgccaattcacagaaaagggcaaattattatttattcagatgcagtccagaatctaagaagaggtacagccagatggatggactggatgacttaactatagcagaaaaaagtataaattgaaggttttctttgtttttttttttttgttttttacttctgtgcattctgtaatcattttgcacagtgccattatatcccttcacttccttcaggttttattcaaatgctgtcttctctgcgatgccatccctgactctcctatttaaaatacaaaccccttctcttgtatttatatctcccttatttgctttttctccttagcacctatggtcagttgacatactacacattctatttatttgtaaataaattctctctctcttgctgctaaaaagtagcatgagggtaagtggatcttcttgtcttttttccttactgtatccctactgcctagaacagtatttggtgcacagtagtctcaaattctatccagtcggctgagcgcggtggctaatgcttgtaaggcctccgctttgggaggctgaggtgggcggatcacttgaggtcaggagttcaaaaccatcctggccaacatggtgaaactccatctctactaaaaatacaaaaaaattatccaggtgtggtggcaggcatctgtaatcccagctacttgggaggctgaggcaagagaatcacttgaacttgggaggaggaggttgcagtgagccgagatcacgccactgcactccagcctgggtgacagagtgagactctagtctaaaaaaaaaaaaaaattctatccagtccatgaatatttgggaaagaggaatcttcaggttatagaagatgcacaagtttttttcttagtagtttttttgttttgagtaaatatagcggtctggcgatatttaatatagatccttcctaaattacaaatgcattcagaacaaatatacctttctccttttttattataaaacagatasaaggtaaaattcaaatgcagcagtagggtgtcctttgagaatcttttatgcctgtgtgtatcctttaaagtttggtcaaccacactactgtttagatttcctttaataacaaaaagaattataggcttttatgttgataygactcagtaagctaactgcatctgttttgggtcactttaaaacacctttgcttttgaaaaggaaaagtttctttacagaattgagtatgtaactcttgaagtttactctttcaaagatttgcttttctcctttttcctttcaggagctgctgctcaagaggtcatcaaaataatcaccaaacaatttgtaatttttaataatacttacatttacagtggcatgtcacaaacttcagcaactttccagttgtagagtaagcaagcaccttaagtagtgtgttaatgattgaaactgtaattgccttcgggttgtgctttagtctgtaaaattctaaaggagagctgctaaattgttttcttaataaacatttttctcatttgtaataatgtagtcttgttctttgtggggaggggaaaggagacagtcattttcctagaaaatgaatcctatccatttctcactgagcatcaatattggcttgctatttcaaagttacttgtcatagattatccttgtgttttattagagataattaaaaattttttttcttaccatcttcaataatgaatttaagccatgtgcagatgttagctatggacattttaggaccatcatcatttgttaaaatgaatagaatttaaaaagatatttctggatatgtagttttcccagaaaacaagaccatccccttgtatgtagtattatcttaattaacttgagttttggctgcctaacctacttcttgaaattttatggggtcattctactcatattatatatactcttaaatttaatcacatgggactaatagcattcaccagcatattagagggcaaaaaaaaaaaggaagtagtagatgcaaacagagtggaaatccagaatccagaagtgggggcagttcccggttttgggcttgatgtattaatacttagggctgaggaacgtggtccgtggtgcatgactcttagtagctaaggcccctaatctgctgcaactgtctctgaggccagcgtctcttaagtgagaacctgttagatttgctagggtacctcacagggacttggttttccagacgctaatgtgtcagccattctttggctgttcttcactgtatcggggaccttcccctcgccttcatcgcctagcagtcccatgggctgcattttacggcagaggcggcaagggacaggccttggccccactctgatcctttggtccaggcgcggagaagtcctcctggactgaactccggaagccccctggtgaggtggaggcctggctgcccctgtggggctgtggtgacgattagcgaggtgcccaacaaaagggagaacacacagcacagatgccaggtggaggggaggttggggcttcgccgtcctgtgcttcgcggccaccgtcccatagccaggcctcgtcaaccgcgtgcacagtcccctaattttggggctaatgctcgtctgaggtaaaaaccctaaaaaccgggggcggtgagatttctctttcaaattgtagctttttaaaaaatcttgcggccgggacaccgaccaccccattgcccttggcaacctagggcacccgcggaagcgtaagacaccttgcaggggcggcggggctgccggccggaagtcccgcccacggacgtgagcctggtcggctgggcgggaaaccctgtcgtgcgtcgtggcaggtgagcggtgatgaagaaagggcggaagctcccgcttgagggtagacgccacggcctccgctcccgcgcgttgttgtcctgccttaccgcgcttggaaactctgtatgttggcgcctgtgtaaggcgggttgggccggccaggatgtcttaccgccccgtcaggcccttagcccacgtgagaagggtcgagttggggggacggggcctttatgagcaggtgccaggccccggctgtagtccccacagcccttggcgggaagagacagtcatcacgtgatgcaccatttagagacgtgtaaagcctggcagtattcccccctatttcacttctgactccccaggcgcctccccaggtgactttgatgtgtggagagggtgggacccaccggtgaggtcgtttcccagggccagggccgggccgcatgtcacacagcacctgagcggggagggcctgctgagggtgctgatggctcacgagtggcccgcgcggctaaccagtgtcctgctcccacgcaggacttgcgagccctggtcagagaggagcctggaggggccacctaagctctgcacaaggaattcatccaactctgtaggtgagcgggccgcaggctgaatgggcaggaagccgggcggggtgagcgcccccgccttggaaaggttacgtgtctgttacctgtggaacctgggaggaggccctgaggatttatgctctgggctggagtgggggggtgttcatattgcagagccagctgacttctggtacccacagtgcgttttctgggacctgaatgactgttatttcttgaccgtttaaacgatcgaaaacaaatttgccccttctctcttcttgcgtcttctttagagggtattttcgctatatataattacaagctggatatccgctgacaaaaaacaatttagtggtgggattatcagccctgccagccttacacaaaaagatgccatttatctttctgatatactgggataatatttcgatttcaaaaagctttcttggccttggtgtggtgggcgcctgtaatcccagctactggggaggctgaggcaggagagtcgcttgaacccgggaggcggaggttgcagtgagccaagatggcgccactgcactccagcctgggcgacagagccagactgtctcaaaaaaaaaaaaaaaaaactttctttatttttatttatttattttgagacagggtctccctccatcatccaggttggcgtgcagtggcgcggtcttggctcactgcaacctccatctcctgggctcaagggatcttcccacctcagcctcccaagtaactgggattacaggtgcgtgaccacgcccagctaatttttgtacttttctttggtagagacggggtttcaccatgttggccaggctggtctccaactcctggcctgaagtcttccgcccacctcggcctcccaaagtgctgggattacaggcgcgagctaccacgcccggccccccaaaagcttttgtatacattttctaaatcaggtaaacaagtaatattcagctacttttcttgctgaaatttgaatttgagttaacactactgttttggggagtgggttgagtgaaacgtgtaagtgggagaggttctctctgtcatccagaaaaaaatccttttttcctgtgagaatacagtaaagaattttgaaatctccttgtttgtggcagtacatatattcactaaattactaaaagcacttcataatctgctttatatggcagatgcttttgttcttgagaatatacttgttttataattttaaatataattttctgattatcaatcccttgaaagttataacttatcctttgctatgggtgtttgtaagcacttctcaagtaaatagatgacttgtgttaatgctaccaagtacttggcaaactctttttgtgcaaagtaaccatttataagaaaaaagtataaaaacaaagggagaaaagagtgtgggtgaccagttttaattttaaagcatttaggtttaaaagttatacattacccctcttaggccaggcacggtggctcacacctgtaaccccagcaatttcggaggccgaggcgggtggatcacctgagatcaggagttcgagaccagcgtggccaacatcgtgaaagcctgtctctactaaaaatacaaaaattagccaggcatggtggtgcgtgcctgtaattccagccactcaggaggcggagacaggagaattgcttgaacccgggaggtggaggttacagtgagctgagatcacaccactgcactccagcctgggcaacagagtgagactccatccaaagaaaaaagaaaaagttatacattacacctcttaaaaattacattaaaagcagaatagattggataattaaaattaaggaaatagtccttaaggttgtccatgaaacaaaaacatccatatatgataacaattttccattttctaaagagttcatctttttaaatctagtaatattttccaaatcttaacccatttgttcaaaagcaatatgtatttatatatgggagacagtataagagaggataagagtgtaggccctagcctgaaattttcttggctcccattttaactctagcacttactagcactttgaagttagtcaaattatttgccctctcctcatgtatcttcgtccttataattccctcataaggttattgtgaagactaaaaagaatattcataaggtgtaaagaacaaagtctagcctcaataggtatttactgaatgttagaagctgttattataaaaattgtgaaaaatagaaaatagtgggataaaacccatagaaccaccaactaaagacaagtgttaatatgtcgtctttctagccagtcttattttatgtttacctctatctactttggatcatactatagattaaattgagtcttatactctttttggttaactttgtaacatagcatttttctttgctattgaacatttctagtaaatgtgaatattcttgtaataatatccaatcctgtggacttataacatacctacttctattgtaatgtaatatttaggttaaaaaatgggccaggcatggtgactcatgcctctaatctcagccctttgggaggccaagacgggaggatcacttgaagccaggaattcaagaccagtctgggcaacatagcaaaatccctgtctctacaaaaatattaaaaaattagcccagtgtggtgatgtgtgcctgtagactcagctactcggaatgctgaggcaggaggatcacttgagcccaggagtttgaagctgcagtgagccaagatcatgccactgcactacagcctgggtgacagattgagaccctatctcttaaaaaaaaaaaaaggcaaaaataatatacttgtacatttgtatactactttataaaagatttttacatttgttatttctttaaacatttctttgtgcttaggtattttctttttttttttttctttttgagacaaggccttgctctataaatggataattggatatctctctttaacaacatagtgttggaataaataagaattttagagttttgtgaatcctgatttgttgctctaagaagttaactggactctgaggcattttttctaactaatcagtttagcattttaaagtagggtatgtgagaggccatatcagagttgccagttattttaaaaatggttctaggctgggcatggtggctcaagtgtgtaatcccagcactttgagaggctgaggtgggtggattgcttgagctcaggagaccagtctggacatcatagtgagatcccatctcactataccatgttgaaaataaccatgggttgttaatttagtatttagcttgtgaagagaaaggccaatctaaagagtgtgtgtgtgtgtgtgtgtgtgtgtgtgtgtgtgtgtgtggtgtgtttttaaacctctcttaggtagaggggtccctaatctgaaactatgagatgaagatttccatgaagaaaataagaaaatgggggctgggtgtgggagctcacacctgtaatctcagcactttgggaggctgaggtgtgtggattgcttgagaccgggagtttgtgaccagcctgggcaatatggcgaaaccccgtctctacaaaaaatacaaaaaattagccaagtatggtggcatgtgcctgtagtttcagctactctggaagctgaggtgggaggatcaccttatcctgggaggtcaaggctgcagggagtcgtgatcaagccactgcgctccagcctgggtgtcagagtgagaccctgctgtccaaaaaaaaaaaaaaaaaggaaggaaatgggaccagctaagaggtccagttagatccagtcacccaatcattcatttgcttaataaaatttgttgaatgcatatagtgcttagaaatgccagatatgtttatgtttttcaatgtaattatggtaacatctctgtgaaataggaatatcatttctattttacagatgaggatacagagcctcaaagaatttaatcaacctgcttgatatcacgcatctaataagttgcagattcaacttattaactaagttaattaagtttaattattattttaaaagttgtagttcctcggtcttttggcttcaggaaaacaatttttcccgcccatttgtacttatatctttgccattc

SEQ ID NO: 96509 - DNA, 22121 bp, Homo sapiens
  misc_feature (1)...(22121): n = A,T,C or G
tgtgaaatgcttcatgttaccacttagaagcttgcaatgcagaattcctctcccccagcacactgtcactctgaaagatccactcaaaatcaggaaagggtatggagccagccaagtgaataaaggttttttactccaattaggagttgctcaaaagcctgtggccattcagtactggcaagactcaaagggcaagacacccaggtctgtaaactgggataccccgtacccacagagtctggatactaatactgctgaacagtgatagcagcaatcattacaggcaaaacatcattatcaaatttccagatcaagtttatgccaaggtctgaaaataggaacattcgtcatactgttgatcaacatcatctaatgagcacttcttgagagcggaactggaatcaggagggaagggaagaaaaaaaacagtggcctaaaagtcttatgggagacacagcacactaaaacacaaaattcatggaatcacttgtaatcaaaacatcaagaacagaaataaccaactaaaatatgcagagatggaatctgaatagtgaatgcaagatacatgggctgtgatcaaaatacaagtttattttttgtctttttccactttaaaaatattttttttcttgccgggcatggtggctcatgcctgtaaccttagcgctttgggaggccaaggcatggatcacttgaggtcaagagttcaagaccagcctggccaacatggtgaaaccctgtctctattaaaaatacaaaaaattagctgggcatggtggcaggcacctgtaatcccagcttctcaggaggcagaggctcgagaattgcttgaacctgagaggcagaggttgcagtgagccaagatggtaccactgcactccagcctagacgacagagccagactccatctcaaaaaaacaaacaaacattttttattggaggataataatctcctgctcctgaatagaaaattgggaagatcccctgactttttggtcactctttgataattggcaatcctttaagtaacagtcactttaaaccaaaaagtctcggccggccatggtggctcacgcctgtaatcccagcactttaggaggccaaggtgggcggatcatgaggtcaagagattgagaccatcctggccaacatggtgaaacctcttctctactaaaagtacaaaaattaggcagtcatggtggtgcctgcctgtaatcccagctactcgggaggcttaggcaggggaatcacttgaacctgggaagcgaagtttgcagtgagctgagatcgtgccactgcactctagcctggcaacagagccagactttgtctcaaaaaacaaaaaacaaaaacaaaaaaaccaaatagtctctatttagtaattagaatatttccagttcaaaactgtaatccaatactttagtcttcattctaaggtactaatctaagactgcttttcctcctcctccatgtaaggcatatggctggtggctgcctgcagctttctcctcaactttcttcctcccccactagataactgctattgaacctgcttgtgtaaaagtgggaggaggtaggaaagctaaggagatagggcaggtttttctttcttggtagggtaggtctgtactacctgggtcttgcacatggttaaagctgactctttttcttaaagcttgctttaaaaggttctttgcagattcccatcatcagagatctcttacttgagttcctttggccaaaaccaatgcaagtggttgactgtgacaaactgtggattgtagcatccctgtgttcatttctggcttctagccaccgggtccccctatacctctagacagcccatttggatagaccgaaggcaaccccacgttggctgtcttccatgtggcccacatctggtccaggaaaacatttatacattcgtcatccctcctgaatctgggtgtccagacagataccaatgtagccacctctactttgtggctacagccctctttaatttataagtaagcactggtgcagtttttgttttacaactatggggaacaatcttcaagttctctggtcccacagaagcccctctttaggcaacatcagtacttcctttccctctgggtaggaggagagtagggactcagcacatacaaatttctccccaagaagtctcttcacagacccttccttccttcactctcttgatctcaccatgaggtagaactgtttgtcaacactgactttggacataacaatgttgttgaaataatcatcattaattgcagttgaggatgttcatatctgtctcccaacccttgataataagagactgtctgtcttcatttctgtcttccctggagagttgagcacaaagcctggaataaagtaggtgctcagtaaatgtttgatgaaaggatgattgaatgtatccgaaaccaacttttgttgcgcactgaattctctgaggcacttcaaagtaatcagtatgggccaactttggtgtctcttgcctggctgacatgagctttggggcccagccaagtagactgtgagagtgttgccaaggcaattctgcatgcaagaggaagtgtggcaggactgggggtttgctgatagctgcctgggaagctggcccctcaggcagtgataccaccaaccacccttgaggtggtcagggcctgagcagaaggactgcagagactgcacatgccccttgaagcccaggcctatttcttggaagtctttagcattcacatttgctatctgaggaggtttactgcctggagtgaagtattcaaaatagaaaagacagagaagctagagaaggaacagcagtgaagcatcaacaagcctttactgggggaccattttccctcacaacacatttggagagcctgaaactgacaaagactacctgggtcagtggctgttgatttattctggtttcagtcattactgatatctgtccagaagaactagaaaaaaataattcaagttgtgggtgagatagtgttccaactctgccaaatttaacttttcatcaccattgacccagagagggacataaaaaaggccattgcaaattatgtgaaagaattttctcccaaactggttggcctgattggcacgaaagaagagatcaatcacgtggccagagcatacagagtatattacagctctagccccaaggatgaagatgaagaccatgttagtgaatcatacaataacaatgtctttgattgggccagatggtgagtttccagattattttggccagaccaggaagaatgcagaaattgttagccagttcaattgctgcacacatgagggcacacaggaaaaaagagctagccaaagcagtgatgctgggtgcaatattctcttgttaaagaggaaggaagcagccaggcgcggtggctcacgcctgtaatcccaacacttttggagaccgaagtgggtggaacacctgaggtcaggagttcgacaccagcctggccatcatggtgataccctgtctctactaaaaatacaaaaattagccaggtgtgatggtgcccgcctgtaaccccagctactcaggaggccaaggcaggagaattgcttgaacccgggaggtgggtggaggttgcagtgagctgagatcgtgccactgcactccagcctgggtgacagagtgagacttcatctcaaaaaaaaaaaaaaaggaagctttgtcttccatagaaatatatatattgtgtatatatatgtaatatatatagtatatctgtaatatatagtacatatgtaatatatatattgtgtgtatatatatatgttatatatatgcaacctacagaatgacctttgcaccattgtaccatgagaatgtttctattttggattggcatgttactcctgggttcagtcaaaatagactcttgaaactgtaagattacaactcaaagtctcccaggtagctgtggtgagaccagaggaccaagtctaaatgaagtcagtgaagagtggaggacgctcatggaaggacacagcaagggaggcacagccagtgcatctcccattatgaatgggccctcccagcagctttattggctctccagtgttttggacccttgctcatacaggctgtggaactgaatttcacagaaaagaataatttttatagcactttggcttctctcttcttgagttatttgctcttctgtgttcttggtggctgatgatagtcagattaggctctctgccattcaaagtttatctttgtacttgaaagcataagttttgtcttctttgttaatgaatatcactgtcaggcttgctccactgccctatcagcaggtactgatttgactaataaagatgagatctattgtttggggggaaaaaaagttagtttgatttctctaggggtctcttatgtgatttttagctaagtgatgggctaggttttcaatgacatgccaaatggaaataagaagatattgatcatgagtgtgacatagagtagttttctgcatatactgagttgcaggccaagtaaaataaaagtgtactcagtttttcaataaataagtaaaataacctgtattgagagcctattttatcactccctgggagactccgctcattcttacatttgtaagatgctgatggtttcccagaatttatatacttcagcatttcccaaccaagaaatttgagagatgtggtccagtgtggtgactcatgcctgtaatcccagcactttgggaggccgaggagggtggatcacctgaggtcaggagtttgagaccagcctggccaacatggtgaaaccccatctctaataaaaatacaaaaaaaaaaattagccaggtgtggtggcaggtgactgtagtctcagttactcaggaggctgaggcaggagaatcacttgaacccggaaggctgaggttgcagccagccgagatcgcgccattgcactccagcctgggtgagaagagcgaaactacatctcaaaaataaataatgatgatgataataataataataataataataataataataataaaaacattgccaacatttgcaacttggaaaaattcactttttaaaaaaaatctgtatttcagcttcttttgaaaaatggacgatctcaccatggtgcagtggcaggaagtggagggcatattcctacctggcaaaattcctttgagtctggagctcaaaggaggcccactcctcagaccaggtcatgaactttcagtttaccatcctcttactgatgtacatgatctgtctgggcctgctttaaatctctaattggttagatttggttgcttagaacaagctctggggagtaggtgtggggcactctggttaaacaggctaccgggcagaccacaactcttgcagtctgcctaaatgggctgctgcttcactccttccatgcaccaccaccatgtgctgctgacttcaaaatgtttatgctttgcacagaaagtctgtcactcagaggtgtcatcatgtttttgtgcgggaagtttcattaaccctaataagagttataaaggtcatttattcctctacatttagaatactacacctcttgggtggttgagtttgtctttgatatggtttacttgaaggagggtggacatgtacaggagggttctaaggagcatagattcgttccaccattatgaataatgctgtaagtatttttgtcaaagacacttcctactaagagtttagtctcctaagcaactgaaccattgtggatggacccctgctggcctggtccacgcaggtgcaaccatatagaatcggcccaacactcagggttcctgagcttttttatccccgctgcaggaccaagacccgaaccctgcggctgtggccgagaacgctgcactgagcctgcgcgcaaagcctctgagtaaaaggagaaagtaaccccctaactaggcctctggagggcgaaagctgctgcacaagtctgcgcaggcgcgccccgctgacgaacactcatcagtgcgcaggcgcccatcttagttggtcttctagtccggtaaacagagggcctgcccccgacagcttctgcttccgggtcacgccttgacagcggctttcaacccccacctcagcccagcaattcggtgagtgcggtccttggagtgggtctacagccaggtttcctaacccagggtaccacgcccaataacgcttcctctactccctggtcgaagtgctctagttctcgaggctgagacttatttccgggccttagaaggcagatcgaagagggggttggtccgcgtctgaggccccccagcgcaaattgcgtgattctctttcagtaccggacctaccgggattgctgcgatctgtttagagcccgtgcagaaagtgacaccgcacgtccttgcgtttcgtgcccttgccccccgccccctagcctcagcgagacagctgccgcgggccctcccgcagcaggtgcggtggggattacgggcgctgcaggctcggccaaggttctcccggggcgggagggggcggggccgaggcctccctcgcatcagagctgttgtgtcttctcttttccagtttgctttttttttttttttttttcagcttctcagtaaatgccctttggtgttttctctggatcccgtagcaaaagaaaacgagggagacagggctttcagctctagcagaggaaagggccttccaaggggatcaaaccttacacgggctgctgtctagtgagatcgaatttagctttccttgaccattcctgaagtgaatgctgtctgccctgaagtttcattcctttaccgggagcttccaggcagcagcagaccactgaccatactctcaggagttcttagcccagagcccaagagcgcccgggaaattagttcaggatttagtttcatccgattatcatggcccagaaatggttaacaaaacgactttatttatttattttaatttttgaatttttttgtagagacgattgggttttggggtcgtctcgccatgttgctcaggctggtcttgaacttccaggttcaagagttcctcctgccttggcctcccaaagtgctgggattacaggcaacagaaccactttggtccaagcctcctgctttagatgctctgtcttctgccgccattcttggaattaccaactcaaatgcacttgtctttttttttccttgaaacaaaaaaattataagatacagatacttgtctcagagcagtttagtggctactggagagattaaaacacatgccaaatctaaactatctagaaaatgtcatagagacatataaacaagtgtgtcagcttatccgtgcatgataacgggagaaaaatacctaatttgaattatcgatacatatgaatatttttacttgcattcttttaatggaatttacatctactataaatggctactgattcacaaaatagaaactatcagaatttatagtatataatatataaagggatacacaatcacaaaaagcaaaaataggccgggcatggtggctcatgtctgtaatcccagcactctgggaggccaaagcaggtggatgacctgaggtcaggagtttgagaccagtttggccaacatggtgaaaccctgtctctactaaacatacaaaaattagctgggcgtgatggtgcacacctgtannnnnnnnnnnnnnnnnnnnnnnnnnnnnnnnnnnnnnnnnnnnnnnnnnnnnnnnnnnnnnnnnnnnnnnnnnnnnnnnnnnnnnnnnnnnnnnnnnnnnnnnnnnnnnnnnnnnnnnnnnnnnnnnnnnnnnnnnnnnnnnnnnnnnnnnnnnnnnnnnnnnnnnnnnnnnnnnnnnnnnnnnnnnnnnnnnnnnnnnnnnnnnnnnnnnnnnnnnnnnnnnnnnnnnnnnnnnnnnnnnnnnnnnnnnnnnnnnnnnnnnnnnnnnnnnnnnnnnnnnnnnnnnnnnnnnnnnnnnnnnnnnnnnnnnnnnnnnnnnnnnnnnnnnnnnnnnnnnnnnnnnnnnnnnnnnnnnnnnnnnnnnnnnnnnnnnnnnnnnnnnnnnnnnnnnnnnnnnnnnnnnnnnnnnnnnnnnnnnnnnnnnnnnnnnnnnnnnnnnnnnnnnnnnnnnnnnnnnnnnnnnnnnnnnnnnatctcggcctcccaaagtgctgggattacaggcgtgagccatcgcgccccgccaaaacattatatattattaaatgaccaaaacaatttcatatgggtaatgtgcttatttatttcaagtcttgaatttcttaggatctaaagtaataaactttacattggttcaacagatgttaagaacctaccatgtgttcaggtactattgaaaaaatcagtatcgttattcccaaagagcttataataagaacacagatttctaagcagttgcacctagagagctgatactgtgtattatattttccctattgtttttgatatgtactgtttcatagaagtgttctaccttattggctgtaattttaaatggtccctaactcttgtctcttatacagccaagccttttaagttgaattgaagtatattgcattattttcttcttccatcctagaactctgtcctattgtggtttcaacatatatttcaccaaatctatttctcagttgccatgaatagccaattattaaaaattttcactcattttatttatttttttgagatggagtctcactctgttgccaagattggagtacagtagtgcagcctcagctcactgcaacctctgcctcctgggttcaagctattttcctgcctcagcctcccgagtagctggaattacaggcgtgcgccaccatgcccagctaattttttttgtatttttagtacagatgggctttcaccatgttggtaaggctggtctcgaactcctgacctcaggtgatccacccacctcagccttccaaagtgctgggattacaggtgtgagccaccacgccccacctttaactcattttaaaatctgcaaattttcctaaaactgaaagtacattttattattctgaattttaattttttcctagttttatataaatgactcyagggtagttatacttttgctttccttacctattttagaatactacctcaaatatttcctttttttttttttttttttttgagatagagtctcactctgttgcccaggctggagtgcggtggcccgatctcggctcactgcaagctctgcctcccaggttcacgccattctcctgccccagcctcccaagtagttgggactacaggcgcccaccaccacgtccagctaatttttttgtattttttgtagagacggggtttcactgtgttagccaagatggtctggatctcctgaccttgtgatccacccatctcggcctcccaaagtgctgggattacaggcatgagccaccacgccctgccaaatatttcctttttttcctcttctgaacacatttgaaaatgtttcagataacttttcattattaagatatatttgctccatagccttcttcctctcttttcacacataacaatcacttctatactgtttagtcagtcgaccaaccaatatttgttaaatacctaccttttgtgagattctgtggctggccttacatgggtgaaaaagtagaagacaaagtccttgccttccagttgattacagtttcgatggagaaacaatatgtacataactatattgcaaggcccagtgttataaataacttaatggtggtgctgatcataaaaaccacaaaaattcaaagaaggaaaataatgttttktgacctcttcagccttttaaaaatcctattccttgcctagtcgtttgtaaaccacacagagctccacgggggtcttagtacctcttggggaaatctcgtgctagactaggttagagtagaacatttgtgtccaggtttatccaactccctaggcaactattataatccaattccttatgattatggaaatagtattaatcactccttgaaatctgcttttagcattgggaaggcctcagagaagacctaaccctaaagacaggtgtgctcagtgatattgtatatgccgaaaacttctttgtttcaggcagtttggagcatgtgaacaccttgagccttgatgagttccagtatgtggtatattatgcagagcattcagagcaaatactctctctccgagcgcttaatccgaacaattgctgccatccgttccttcccacatgataatgtagaggacctcatcagaggggtgagtgtgctggtattgacagragagtccttgcgatatgaagtgggcaaaatcctcatggatcacagatttgcagctttgactcaacccaagatcacagggagtttttacattttgctaactgcattaacttgatcattaaaatgtatttcccctatgtttgcttcgcttcccttctccctttcactttgtgtatctgatatttttcttcatggaatatgttctcaataaccctagtctcatgttctttgtaaaatatctgagtacgatgcatatgtaatccattgagctcaaagtcttctatacatgttttattaagggaggaggtgagcaaagcagaggtggtttttatttttatttgttgagacagggcttcacttttgtcacccaggctggagtgcagtggcacaaacatggcttactgcagccttgacctcctgggctcaagcgatcctcccacctcagccccctcaagtagctgggactacaggcacatgccacccatgtccagctaatttttttttttttaattttttgtagagatggtgtttcaccatgtttcccaggctggtcttgaattctcatgctcaagcaacccacctgccttgggttcccaaagtcgtgggattagaggtgtaagccactgtgcctggctacagaggtggtttttaaatccttgtgagcctttcttcatacctgggttacaataattacatggagagattttttacttacattctatgttaaaagcagctaccacttctagctctgtagaggatatcaacctctaaaatgcatggtaattatagtttaagaaaacaccttaaccatcggatgtttaatcatggcccttcaataattgttatgtgactagtatcctagaaggtctttactatcctcttctatttatttttcttgttgaagagaagttacacagtttttgatcaccagaaaatgcatccagatggttacttgtgtatattctaagacttcaggctcgtcatttacagcctagatctctgtagctgcttcagagttattggacacaactgaagaaggaaaagtcatgcagtgttagcttattgtcagcaaaagtagtgtcaggagactccgcggtagaaaccttgtaacattctaattctagctctgctgctgagtcattcagtgactttggtctgactggtatctccatctcccttgattttttttttttttttgagacggagtttcgctcgtcgcccaggctggagtgcaatggcgcgatcttggctcactgcaacctccgcctcccaggttcaagcgattctcctgcctcagcctcccgagtagcggggattacagatgcccgccaccacacccagctagtttttgtattttcagtagagaccgggtttcaccatgtcggccaggatggtctcaaacttctgacctcaggtgatctgcccacctcagcctcccaaagtgctgggattacaggtgtgagccactgtactcggcctctcctttgattttgaatagaagcaccagcaaaggctagatggtaaagaatactgatactaagaggctactttgaagatgtttataaaaaaggaaaaacmgtgttaagatgatgccactattaatgatggtcatttgttgaatggacaaaagagcatgccatttctggcctcagtctgacagactcactttcctacttttccagagcatggtggccatagaaagtggattgctggtccagctttcctgcctgatgataaggtttccagtgctttgatacataagattgtcttcagtgatgtccaggtgaccatctggcagcctcccttgtggagaaacttagtaacttgatctaaggaattaacagttcctttccttcatcttcagtgtactcctttggtttggacattgacataatattaatagaaaaggaaacaggaactagcactgtatctataaaatagtgagagttagaactctctgtcccctggactcagttctgaattctgtcctgctgggcaagccagagctgaacacactgactgaagttgtcttactgcccacagggagcannnnnnnnnnnnnnnnnnnntcatggcacactgaaccccttgcactgtgcctgtatggtgtcagatgctgactgtgtggagttacttctggaaaaggagccgaggtaatgtttttaacacattcacattaatgactcactaaaacttgagcttcatgttttcttagaatttctccccatcactcctccatctcttccctcctccagtctgaacttctaactcaaggtaatgttggcatagccaatattaaggaaaatgtaatggtaaatatataaaatgatctaaggatttcattcttttacctttctgtccccaccctgcttgcccccattgtatggtgctgatactctgcctttctttcttctccttaacttaagctgtcactggccatcacttcaggaagcttaccttgtaggggctgtttatatttccgtttaatcttctcattgcttattgtctatccaggagatataaatgcagagatccctcaactctgattaaatctaaagtacccttaaaagtacttaaagtacttaagaagtggtacttaagataggttttagccaaataaaaggttgaatttacttaaatgtttcagggtttttttttgtttttgtctttcattaatgagggtatatgctatttggaaatttgaagaaaaaaactacaggtgatgctgactgtcagcaagccagctgcttttccagcactgggagatttgtgctcttcctatcacatgctttcatttgggttctcttgtgaacccacagcatatttttgcaaaggtctgacttatattctaacattttgaatttctctgtatggttaaagaacttagcaaaagctatgtttttcagtttggttgctacattagccacagggtacagaaagggtcagggtaagtaaaataatccaaaactctgtatagtcaagcagctttccagtaatgtttcagagcagttacggggacttagacttcctctattcctgccttaccccttactctgtggtagagattctaatgaatagataaaagaacattgcagcaaaaaccaaaataatgcagaccagctagtcagtgcacataatagtgttgactgtttgaggacagttcttttcctttttgctcctaagctcctgtcatatcttcatctttatcaccaggactccctgggagttgcttgctgaccctcctgttcagagcactgcatagcaaaggtagtgggtaaccatgcaagcttctttgctgctgtcctgtcttcctctcagtagtctgtctactgtaatagttcctccctttttacaggtgaatgccctggatgggtataaccgaacagccctccactatgcagcagagaaagatgaggcttgtgtggaggtcctattggagtatggtgcaaaccccaatgctttggatggcaacagagataccccacttcactgggcagcctttaagaacaatgctgagtgtgtgcgggctctcctagagagcggggcctctgtsaatgccctggattacaacaatgatacaccgctcagctgggctgccatgaagggaaatcttgagagtgtcagcatccttctggattatggcgcagaggtcagagtcatcaacctaataggccagacacccatctcccgcctggtggctctgctagtcaggggacttggaacagagaaagaggactcttgctttgagctcctccacagagctgttggacactttgaattgaggaaaaatggcaccatgccacgagaggtggccagagacccgcagctatgtgaaaaactgactgttctgtgctcagctccaggaactctaaaaacactcgctcgctatgccgtgcgccgtagcctgggactccagtatctccccgatgcagtgaagggccttccactgccagcttctttgaaggaatacctgttacttttagaatagccggagaagatgtttgcaccatcgtgcaggcagctctgggtgaggttgtccctgcagtactccttgtcacagaaaacagaaaaacagttgttcctgttgtgtggtttatagatttcgaagcaacatgtcacaacaataacctccatagcacctccccttcccaaaccaaacaacccaacaaaaaaaatccctcacttttgttttctgtttattgcttacctggctttttatattgcattttgcaaaagaagaggtctccctcaatcctcccctttagggaaggagtcaacagtgtaactaaatttctctaggaagatggaaagtacttaaataatgtgtgtgtggttttcctttggggacgtggttaacggtccagaagaatcccttctagaaagcattttaggccagccatggtggctcacgtctgtaatcccaggactttgggaggctgaggcaggtggatcacctgaggtcaggagttcgagcccagcctgaccaatatgatgaaaccccgtctctactaaaaatacaaaaattagctgggcatggtggcatgcgcctgtaatcccagctactcaggaggctgagacagaagaatcgcttgaacctgtgaggcagaggttgcagtgagccaagatcgcgccattgcactccagcctggacaacaagagcaaaactgtctcaaaaaaaaaaaaaaaaaaaaaaaccattttaattgatctgtgaaaaaacttaagaaaatcacaatttcagctaacagcaattgtgtcccaaagatgaagatactataacctcaaatggtgcagatccagaactgggctggatgacatccctactgtgccatgtcctggggcatttggaagggactggacctctttcccctcatcaaaggaaacagcagtctttgcctctttctgttggttgtgcccaagggctacagtagctctgaaataacaagagctctgtaataacagtaataaatagctctgaaataacagtcctaagaactcctaaagtcctgagaacttttcttgtaatgcagctttttctcttcctgagaaacagtgtgttctaatgggattcccaggcagttcctacacctacggtgtgtgttccagcagggaggagttatgggctgggctgccttttcccatgggtcttcattcccaatggaaagttcactctgcttagtttggaattatttttctttcagttgttctggaacctttgctttttattgatttatacaatacaattggtgggagggtggacttgggatgggagtgggaaaagcatgtaagagctccttttgtgatggtccatctacccaaaagagatctgctttagtgaacgatactctttcatttttctaaattagatcaagttgttaytgattttagatgacttgtatgcaaatttgaaaaacttttttttttaaagctgattgggaactacaaacaatgaatggaatctactgacacagctaattggaaaacagatgtcttcttctgtcctattgatgctggtgtttaaaaaacatcacttaaaaaaaaagaataaatagttctaaaagcaagtttggcaatttctacttttcctacttttctccaaccccccttagaaaaagttcttcgtttactgcctggctgttctatgtaactttccatcccaacctttctcccattagcagcagtgattctgggcattgctggagtgaacaggagggcttgggcagagtatctgaagagcttccccttcctttataccttctcccaccccaaatttggaattactgcttttatgttctcaactccagctgcacataaaatcactaaggaagctttttaaaaacactggtgccaagatttcacctcataccaattctttggaattttctggggtaggactgggggcttcagtgcttcaaatatagccaggaatgagattccactgtgttagtcagtggttctcaatcctagttattaattagaaccacctaggaaaatttttaaaaatactaaagcccaggctccacccccagagattgatttaattggtccaaagcagacctagtagggctggccacagtggctcacgcctgtaatcctcacactttaggaggccgaggtgggaggatcatttgagaccaggagttgaagtccccatctctacaaaaaaataaatgaataaagtagacctgggcatgagtacgttcaaaggtcccaggtgattctaatattctggtagatttataaactgcttgagatgctacttcatttctcatcatagatacttaatattctagaaagagaaagttttgtccatgtgggaaaaaatgttacctgtttctcagttacttcataatcacttatgtggttggtggctaataaattctgcttcacctccacttaagagttcaaacacaatttcacttatctttttagctctggggaaatagcatgcaccttcataggttttttttgtttgtttttaagtggtcttcactatgcctttttttcccagatcgtatcatcatcctaaattttttactctttacagagtgacattttccctctgattaactttccctgagccatccttccctcttcattttcttgaggaaacagctctaagattaaagacaggaaagagacagagaacctataaatcaatggcaattagcatttaaaatgttctgaatgaatgcctgaaccttccctttcactttgttttcataggccttatggctctggggatttgatatggcatgataaggaagcaggaatggggaatgaggatgaggtttgaagtcagaactgagtttgagttctacttgaataatattgaaggagacattatgtaatcaatcaccttgagctccagtgtcctcctttctgaagtcaggctgtcaccattgccctccaaaagctactatgaggattcaatgatgaaatgcctaccacagtgcttgatatttattgttaatttctcttcccactaaagaactgtgcaaagagtatttggctgccttattccctgactccagcaacaaaccttctcagtcactatttagaactgtttttagagtttggcagtgacaatttttcagacagccagcaagtagtgtactagagataatcccttcctccaccccctgtgatacccttaacgtctttactgcttcatcagacaagtgtctgatacatggggctgacagtattacattccacttaggaagatgataacaggagaagcaaaagcacagtgaccagttggcatttattagtgtagttacaatttgtcactgtagtaaaagtagtagaggaaccaagactctttgttatcacaaagaaataaataaagcttatttttaggaaaattctaactgagtaagtgatatctagcagtagcactagaggtgcccagccttgtgtgacagataaagctggggcagaagtcatgttaaattctacctaaaaggagctcccacccactgcctgctcctccagctcctggccagaactggtcatggctgcaaggtacagaataaaaggaaacctaatgaaaaaaacagctaaaacactgagaagatgtggacttattagggtgtgagctgaccatgatcaggtaatctattcccctcactccagagaggtttagacggccgcttccccggaccgcttccgggtgatgtgctccaggtgggcatggtctgaagtgtccaagtcaatctcgtacttggctaggattttgaggatgggcctcagtttcagccaccactgttccttggggattcgatgcctacagaggaatgaggtagatgatgatataatcttttagcaccccaatcaacttctaccaaaggtttataggaagaagttagacagaagaggttagatttaggacatgtgcatcacatctgaaatgggtaagaatacaggtgttactccttaaaaaaaaaaaagaattaaagacagtgaacaggttgaggacagtagagcttgaaactaccagggaaaagaaccactccaggaagcagatgtactcactcaaaatctgtctggtccttcagctcagccactggttggaagaccagagccctcttacgcatccccagaacacagcccgaatctggagtattggcaaagatccgccctgcaatgagggatgggcagtcagcttctatactggggaaccagcctctatagagggcactcgctctcaccccacctaccattacggtaactctctttgattttcccagacatccagttcatagccttggcgcccatcttagtggcaaaattcctatcaaatggggttgggctcccaccctggagaaagaaacataaaaattacagagggaaggactctaatgaagtggcagagatatctagacacacagagaaaaaaagaaagatgggccccaggcttacagcccaaaacaggaatccagaagtcaaactatgaaagggtgccctgaggcagtgccaggatccaaggcaagctggcccagcaaatttggccatgtatcagatataataacaactaattaaagatgattggccccacaatcccctcttttagctccacagctgccagatcctgttttagttttattggccaatgggtcagctgcctgcccctcttcagcccagcagcttttgttgatcactgtcaatgatgacataaaagtgttttttttgtggcccaatctggctgcccttggtagcacctcagaattaatataaaacatcatacagatttcctttgaattaagaggaagcaggtgggaaagtgggaatgtttggagacatttttgttacaattgggagtgagagggaggtgctactggcatctagtgggtagagaccagggatgctgtgcaactgtcctacagtgcatagaacagccacccatgacaaattatcatccagccccaaaaggcaaagctgccaaggttgaaaagccctcccatgagggcttttgaaaaggatagaccatataatctctaaagtcatttccaggataaagatgttttgattctatgactgtaagagactgcaggcccatgctctatgatggcactgacaggctcctccagaagactggaaaaggccagtggaagcctcagtggctgttggcaggtatggctgttggcaggtatggctgtctgatgaagggcatgactacggtgtcttccctacctgctgcatgtgaccaagcacattcttcctgctgtcgaagatgcccttcccctcctcagagtacaggttgaaaatgaagtcagtggtatagttctcattgcacttttcattcctgccaggtggagaccaaaagcctgtgactctgtggttggcttcccatcccccatttctgcctttgttctttcctttcaatttttatctcctccaaggattcaagggataggctggccccctccctttatatctacagattcctcagggtgtcccaacaatggccattctatgggtttgagccaaagcttatttttcttcttcacttaggaacaaaccatggatgaggtaccttaacaccaagccccttttcacagttgttttcatcttttgcaccagatgttcaacatttgcctgaaaatgaaagagtaaatcctaagcctaactgggaatggataaggttgggtataaatcatcttccacaccacacctctccaggaaggaagagacacatggaagagagttgtttacaatcctgggcctgaactgtgcctaattcctgtaagaagctcagtgtggactgaaatttaaacaatgactccaaatgagacagaactggaagagggagcactacagacagctgcagtaactgtcagtgttcagcccctcaccctctccaatctccctttccaagcctttctggttccccttgcctcagagggctgacttgtggtcacagtgtcagtgttgacactttatatctctgttttgagagagtatctctctcaaaagcagaatgacagcaagggaaatctgaaggggagacatgatgtagtaaaaagatcactgactttctcaaccacttaaaccatctgctcacttaggagtttagaaaagttttttaacctctctaaactttctatgttatatggagatagtatcttctttgcatgtctattgtgaagataaaatgcaaaaatgcccataaagggcttagcaccaggtcgcctgactcaaaatcagcattccaacaacagtagctgcggtcatgcatatgaggtgacaccagagaatgcctgcatagtgctctttctggtcttcacaggattctacagaccaatcagctcggtcctcaacttgagctctcatagttcagatcactgtggaaacagtctggagacaggggagagctatctagcaggctctgggtggccagctacctgcaggtctcgaatggtgaagggctcctcaaaaatgtaggcagcatcggccccagctgccagtccagccatggtagccaggtagccacagtagccacccatagtctcaatgataaacacccgacgcttggtgccagctgctgactgcttgatgcggtcacaggtctgcaaggacaatgggttatagttagaaagacatgatcaggggcctgattcttatcactctttaatctttgccattaattaaaccctggaactatattctccataggctagcagggcccttagagctcatcaagttcttgcatttagggtaacaggcatatttgccaacctcactgcagaacgtctctcctgggaagaaagctgtacctatcctttctactgctcagaaaattagactgcatgatctcagaaagaaaaaaaaaaacaaacaaaacatttggtattcagggtactggtgcatttctaggtgaggaaactgaacactttgtcacccaggctggagtaaagtggcacgatctctgctcactgcaacctccgcctcccaggttcaagcaattttcctgcctcagcctcccaagtagctgggattacaggcgcctaccaccacacccagctagtttttgtatttttagtagagatggggtttcaccatgttggccaggctgctcttgaactcctgaccccaagtgatctgcctgccttggcctcccaaagtgctgggattagaagtgtgagccaccatgcccagctgaagaatcattttcaaacattcccatttgcttgatataaagagtagctcactgtttgggaccacactcagtttaaggattataatcctggccaaaagggatgggaagtggtgataggctctcactgtgcagatagtattgagtgctgtgtcagccccaacgctgaagtctgagccagggacattgttggagactgtagcaggaatgaccacaaatgggatgcagagctcatcaaactgcttcctgccctccatcagttccaggccccctgtgtaagcctaagaagaagagagcacaagggcaggattggggagagggagaggaggtaggagggagagaggaagaaatggtggcaggcactcacctcaaagcccccaatgatgacaaggccctgaatgttaaacttagttatattggcactgatctgttcaaagctcttcttgggtagagtcctagttgatcagtgatggcggggaggggaaggggaattggaatttggggaagagacaggaaaattgagggggagaaaagctagagttagaggcactttatttttaatttcttgacctgtgccgccctccctagcccaccctctcagtcctatccaaggatacatactggagctctaagttgccagagctgctaaagatgttgagatgg

SEQ ID NO: 96510 - DNA, 26564 bp, Homo sapiens
gtctccaccagagagacccagaaggagtcagggtaagcctgactcatcatgagatcaggtatccccaatccacagcggacttccacagttcaccttcctaggtaaccgctctgccttcccaggtaaagtaggaataatatcagaacttacagcatattttgaggtcaaattgtagaatttggtgatttcatttttattattactcaaccttttatttacaaccaaattaataaggctacttacacataacaatgtgtggacatacacattaagagaatcatttgctgcctagcactcctacctaggtactttaagaacatcattgagtggatactccctctgctgggtaaaatactttgccacaatatcagctgaaatgatacctcttccagactgtaatggcagaagtagttatcccctctttcgtgctgtcatcacacttgatgcatgcctactttataatacttatgccattgtctctgttattgggtttctgtcttctactgtgaaagggtgagcccataaaaaacagggaatgtgtctttcaaaatgttgtatcctgctcattctgatgtgaagccattgtcctccttcaataaaataaaacagcatttctgaggtcttagcatcaggaaaatctccaggtgggtaaggttaaagaaaaaattattcatgacacttgttcagtgtggtgcaatagtctcttctcacactgctataaatacccaagactgggtaatttttttattgatttattttttaattaatttttttttttttttgagacggagtctggctctgttgcccaggctggagtgcagtggcgcaatctcggctcactgcaagctccgcctcccaggttcacgccattctcctgcctcagcctcccaagtagctgggactacaggcgcctgccatcacgctcggctaattcttttttgtattttttagtagagacggggtttcaccatgttagccaggatggtctcgatctcctgacctcgtgatccacccgcctcagcctcccaaagtgctgggattacaggtgtgagccaccgcgcccggcctatttttcatttttttgagatggagtctcactcttgttgcccaggctggagtacactggcgctatctcggctcactgcaacctccgccttccgggttcaagtgattctcctgcctcagcctccctagtaactgggattacaggcgcccgccaccacatctggctaattttgtattttttgtagagacagggtttcactattttgaccaggctggtctcgaactcctgacctcaggtgatccacccgcctcggccccccaaagtgctgggattacaggtgtgagccaccacacccggccaagactgagtaatttataaaggaaagagttttaattgactcacagttccacatggctgcggaggcctgaggaaacttacgaccatggcagaaggggaagcaaacacgtccttcacaaggtgtcaggagagagaagtgccgagtgaagggggaagagccccttgtaaaaccatcagatctcatgagaactcactatcatgggaacagcatggttgttcccatgctccagtcacctcccaccaggtctctccctagacacctcgggattacacttcaagatgagatttgggtgaggacacagccaaaccatatcagatggtaaagcagactttattccagggggccatggtgataggtagaggggcactgcagggctttgcagtggggagaaattgaactcagcaccaactctaccaaggacaggtggggatttataatcaaggagcagggtggaaagcagcgcatggaaaattactaagaggaagccccaaggataagggggtttctgtctaaacagacctgataggattcctgctgaaggcaggccagggagatcagataacaagggtggtcaaccaagagtagaggcttttcactagacccacttagcaggattcttgctcacactgggctctgcaaggacagagagaaaagtccaagattgggcctagtcaagcagaggactcagagaagcctgactggagttttggtcaaaggagagagtctttttcaggcaggagggaagatggttggccaagcatcccgaacaaccaccttccccttgctttcacctgcctttagtacagtgctccttctgaatagctgagatagactgaaattcttcctaaaaattactaagtagtggagaaggccgaaaacaacaaacaatcacaaacttccaaagtatcgagctgtgtacaaacggtatctcctgtccccccagcatagaggtgatatcctgttccactttgtggctgagaaatccatctccgaatctccagagattctcggcagcagccttctgggaaatcagtagataatcactagggttggtggtcaatccttggataaaataggcttcagatgcactttgcactgcttcaaatccactttcaacatataatacatataaactaatactagaaaacagggctgggcacagtggctaacacctgtaatcccacaattttggaggctgaggtaggaggatcccttgaggccaggagtttgagaccagcctgggaaaccataggaaggcctcacctctacagataaaaaatttcaaaaactggccaggcatggttgtgtgcacctgtagtctcagctacttgggtggctgaggcaggaggattgcttgagcccaggaattcaaagctgcagtgagccataatcacaccactgcactccaacctgggcatagagtgagacccccttctctaagaaaaagataaaaaagaaagaaagtgggtctggaatctttgaaaagagtagttaaatcttttcaatgatccagtagttttcactttggatgtttactcagcagggagtagtttggaaattcatagggtatttttggttgtcgacaatgaattgggagatatcacatgaggtccaatagtggcagacaatgctgcacaaaaaccagattgttctcgattctaaccacctttgactatcttgccacatgcttattatgtgggtgaaaagcctgtttgtattctttcaggtctggagcctattccattttacatgttgctctggtctgaatgcttgtgtccctcagaatgcatatgttgaaagggaacccacagtacagtggtgctggtaggtgggtcatctggaaggtgattaggtcatgaggacagagctctcatgaacaggatcagtgcccttataaaagaggcctgagggcacttgttctgcgctcccaccatgtgaaggcacagctggaaacaaagagccagccctcaccagacaccgactttgctggtgccttgatcttggacttcccagcctccagaactgtgggatatatacatatatatatttagacagggtctcgctccgtcacctaggctggaatgcaggggcatgatcatggttcactgcagcccgacctgctgggctcaagcaatcctcatgcctcagcctcccaagtagctgggactacagggtgcatgctcccacacctagctaattatcttatttgttgtagagacagggtctcactattttgcccacgctggtctcaaactcctgagcttagtgatcctcctgctgaggccccccagagtgctgggattaaaggctgggactacaggcgtgagtcaccrtgcccagctttgccctcctttaaaatgggagctgtgttatttattatagtatttccagctgcatatttgggtgaaaaggatttcagtgcagtggaacaattactgcaaagtaacaaaatgtaacagaacatttgagacactttaaaagaattagaacttcattaaacttcatcactcagattcttaaaaatatttcatattattgccatctgtttcaatttgggtctctccaaaagcagactctgagacaaaagtttcagatacaagtaggagattctcctgggggttataagcccctgggcactttcagcctgctctatgcatgggccaagcacacccctgtatccagagaaagccctcaggcagagagacatgggtgcttatatgagaattgccactgaagtgctaggtactacttccagggtgggcaaagagaatgcagttgggacaccagtagcatctcctacaggtgaaaagaaggcagtaagcctgaatttcctaatctccctattctcctacctctagtcccaggcaagacatttttgttaccatgtaaacatcagagtgtatttacacaaacctggagggtgtagcctaccacacacctaggctatatgatataacccattgcttccaggccataaacctgtacaacatgggcctgtactgaatgctgtaggcaattgtaacacaatggtaagtatgtgtgtatctaaacacagaaaaggtgcagtaaaaatatgatataaaagattaaaaatggtccacctgcagagggcaggtgccttgctatgttttgttgaatctgtttttgaatctgctttctacattggggaaatagcccatcaccgtccatcaccatggatggagcttgcaggactggaagttgctctgggtgagtaggcgagtgattggtgagtgaatgtgaaggcttaggatgttactgtgcagaagtgtagactttacaaacactggacacttagcctggctgccctccccctccgccacgctctgtggtttgctgacacgcctgtcaccgggtgtgtgaccggttgcacctttcccaggttgtgggtgcagcctcagcttttacagaggctccttcgagtggaaagaaggaaatgaggctgcctaatctccttatcctcttacccctggaccccacccttctccttcccctctacccctccccctagcatggccaagggattgccaaaagtgttgtaagacaaattatgttccaggagagtctcagaaagtctgctggcagagtctgccctatattgctacaatgatatcatctatttgtagaagctggggttggttaagatgttaaagtgagatcattgcgctgatctgccaaatgtttatatccttctgcctgctagggatggagtatttgtttagaagggaatttattcagtaatgagtacccccaccagtgtccaaaaagacacaacataataacctcttgggttttctgagccagcaggtttaggagggtttgccctgtgcaaacacaacagggagacagagtgagactcaggtggaccctgcacgaggaaacttgactccaaggagggaggaatgtgcccaggaatggtggaatcctgacactaattttaaatagttctgatgtccacgtgtccatctgggtgggtttcctttaataaaccactccctttgtgcgccatccattcttccaactaaaacctgcccactgttgggtgcagccctgatccctggtacagaggatcttcagttttagtcccttgcagctgctctgtgcaatggccttaaccaaatctgctccatcagccacaaaaccaaaacatctgctcaatatcctcttgattcctttattcatctatttgaagtgaattttgcaaacacctttcagccttttctactccagactaaatatttctgtaactttccaaccctttggtcattctaatgtttttgaatcctccccaattttccatattatctttacatcatggagtttaaatggtatgtgagactctacccctaaaatagaggtatagcattcattgatcatgaactttttgtgatgacaacttacagggtctggcccctgactgcagacttctaatggaaaggaaaagagactctaacacaatctgctaattaacccacaggttggattgagaaggaaaaaaatccacctgaattcttaagataaaatgtatcatttaaataattattctgggtctctgcttctcctgtttgacaagacagccgcatcttcttgagcagtgccagctgtgtccctgagacaacatggtgaaggtgaaggccagaaaaaacagatttggccatattgggggcctggtcaccagggatgccaactctggcaaagtggatattgtcactatcaatgacctcaactacatggtctccatgttccagtatgattccgctcatggcaagttccacggcaccatcaaggctgagaacgggaagcctgccatcaatgacaatcccatcaccatctcgcaggagtgagatcccacccaaatcaagtggggtcatgccagcactgattatattgtggcggccaccagcatctttgccagcatggagaaggctggggatcacctagatgggggagccaaaagggtcatcatcactgccccctctgctgatggccccatgtgtgtgatgagtgaaagctatgagaagtactgcctgcagtaagagcttgctactattaatatcatcattttagtaatcatactctgaatcttggcaaaaaagaaaagacggttctgaaaatcaagtctgtctgtttctgccagaatactcatgagacagtttgttcctaaagcagcaattaggagtaaagaaccagaacagtgtgatcatccaaaaagtcagcttctggcttagctccatcaggatcccaattctctacggagtcraggtactctccatggcgttcccagggggtgataaaacagaggggaagaagtcattctcccaccttcttccttccgcatacacctatggcctgatcatcactgcagcacccctcactgccctgaggtccaaatgggggtgcagcacccctcactgccctgaggtccaaatgggagctggcgcactcagatgcccacaggcgccatcgaggagggaagcaggctggtgcaaacgatcaacacatgaacttcgctttcatgctcgtcacctagtgatagtctccacctacacaactaaaggtgtgccgtctcccagattctagaaacacagcctcccttgactttttttgagacagagtctcactctgtcacccaggctggtgtgcagtggcacgatctcagctcactgcaacctctgccccctgggttcaagcaattgtcctgcctcaccctccctagtagctgggattacaggcatgcgctactatgcctggctaatttttgtattttgggtagagacggggtttcaccatgttagtcaggctggtctaaaactcctgacctcaagtgatccgcccacctcagcctcccaatgtgctgggattacaggcatgagccactgtgcccggcccaggctcacttgatttaccttgcatttttccacttttgacggtgacacagatacagagaacaggtttgttcaacactttaacaatacagacatggtcatgacagtccctaagtgttaggagcaacggggaagaatgcrggctgtgctaaactgacgggcacrtaactgcccctggaggtgagccacaccagagccttatgctggaacacagggaatggaaggctgtagaaaggcagcccagagtgtggactgtgctgaagaacctcccaattcttcagtgctggctcctgtggatacatacatagggcaatcaaaacaatgccatgggaaggcctgcagcagacsgataggcacacatccactctgtaagcaacaattcttttctttttcttttcctttttttttttttttttgtgacagaggctcactctgttgccaggctggagtggtgcagtggtgtaatctcgtctcactgcagcctcccactcccagattcaagtaattctcctatctcagcctcctgagtagctgggactacaggcatgtgccaccacgcccagctaatttttgtatttttagtagagacggggtttcaccatgttggccaggatggtcttgatcttttgaccttgtgatctgcctggctcggtctccagaagtgctgggattacaggcatgagccaccgcgcccagccagcaacaattctttctaacttaactctgtgcagagtgtgcagagattctttttttttttttttttttttttttgagatggagtttggctcttgtccaggctggagtgcaatggcgtgatctcagctcactgcaacctctgcctcccgggttcaagtgtttctcctgcctcagccttccgagtagctggtattacaggcgtgcgccaccacgcccacctaatttttgtaattttagtagagacagggttccaccatgttggtcaggctgatctcgaactcctgacctcaggcaatccacccgcctcagcttctcaaagtgctgggattacaggcgtgagccacggcacccagctgagattcttaaaatggtgttcaaactttagggtgtgcaagaaccttcggagacayttgtttaaagtgcagtcctggggctcattacctgagattctgaagcggaggcccaggagtctactttaaaaaaatttttctttttttttttttttttttttgagatggagttttgctcttgttgcccaggctggagtgcaatggtgcgatcttggctcaccacaacctttgcctcctgggttcaagtgattctcctgcctcagcctcccgactagctgggattacaggcatgcgccaccatgctcggctaattttgtatttttagtagagacagggtttctccatgttggtcaggctggtcttgaactcccgacctcatgtgatccacccacctcagcctcacaaagtgctaggattagaggcatgagccaccacacccggctaaaaaaatttttttaataggtaataggctttacttttaaagcagttttagattcacagaaaaattgaagagacagtttgaagatttttccataaaccccatactaagtttccccttttattaacatcttacattagtatggtatatttgtgacaattaaggaatcagtattgatctattattattattattattatttttagaaagaatgttgctctgtggcccaggctggtgtgaggtggcgtgatcttggctcactgcaacctccgcctcccgggttcaagcgattctcctgcctcagcctcctgagtagctgggataacaggtgtgtgccaccatgcccggctaatttttgtatttttagtacagagagggttccaccatgttggtcaggctggtctcgaactcttgacctcatgatctgcccacctcggcctcccaaagtgctgggattacaggcgcgagccactgcacctggccaccagcctccyattctattcaaagycactcctctgctcactgagatagatgcatatctgagttgcctcctttggaaaggctcatcagaaactctaaagaacgtaccgtttgtgtatcacccatctgtgacctgggagctccgtcccctctttgagtattcctgccttcgcttcaagttgtcccgcctttacagatggaaccaatgtacttcttacatatatcagttgatgcctcatgtctccctaagtgtataaaactaagctgtgccttgaccaccytgggcacatgtcgttaggactccctgaggctgtgtcacaggggcttcctcaacgttggcaaaataaactttctaagttaactgagacctgtctcagattttatgggttcacattatggtaaccacgaggggattctgagtggaggtgcccctgacctttgacaaatctattggttcttggtagcagcatgagctaactttatggctcaagccaataggacaatttgctgaggtttgagagcaccccctccagagaatccctgatctcttaaaatttggtcaagatctaaagtttattttgctgtacaactcctctttttttttttttttatttttagttttacttgcttctaataggaaggcaagtttttctgcttccatgatgatagaaggcaggtaactcctttatgtagtttgagctcgcttccaacagggaagatgagtttttttttttcctgctcctaggatggcagagagtagtctacagcctgagacccatcactaggtaagaaactggtttgaggccgggcacggtggctcaagcctggaatcctagcactttgggaggccgacatgggcggatcatgaggtcaggagttcgagaccatcctggccaacatggtgaaaccctgtctctactaaaaatacaaaaaaattagcagggcgtggtggtgggcgcctgtagtcctagctactcgggaggctgaggcaggagaatggcatgaacccgggaggcagagcttgcagtgagccgagatggtgccactgcactccagcctgggggacagagccagactgtctcaaaaaaaaaaaaaaaaaaaagaaaaaaagaaactggtttgagattgtcttgcaatttccttttaaaagactaaagttagcacttaacaaccagctggtgttaatttctgctttcacaaagaacactcagaaattatataatttgtgtgatcaatgttagtttagcagcattttgtcctagctgaaatatggtaataagattaaaaaaatttttgtaaaggaactcaatggttaaaagtcagcttaattaaaaggctaacatccaacatgtgtgtgtgtgcatgtgtgcatgtttgtatttaaaaggccttcatgtttttgggtttttttgtttgtttttgtctcctaagacattgtcttttttttgagcaaaagttttttttttctttttcttcttatttgactgaattttgttttcatctgatttttttttttttaactaaaatagttattgtatcagaggctgctcttgggtttttaaggaacagtgtagtttaatttttttttgaaacggagtctcactctttcctagactggagtgcagtggcatgatctcggctcattgcaacctctacctcctgggttcaagcgattcttctgcccagcctcctgagtagctgggactacaggcgcgcaccaccacgcccagctaatttttgtatttttagtagagatgacgtttcaccatattggccaggctgttctcaaactcctgactttgtgatcmacccgcctcggcytcccaaagtgctgggattataggcgtgagccaccgtgcccggccctaatttttatgtttaacttgggtcaaagaaaaataaaagtgcctctctctagcatcaccagactttttctctttgtactttatgatgtaaattttgctatttgcttttcacctgagttgtttcctttaatgtgcaaatttaaggttatttagctaacaactgcctagggctgtgaaagaggttatcaagaatttgaaagtctaaggtaggaaagaaagcggtggggggggggggggactttataaatctataaaatgtacttccatcggcatgcctaatatgtttttatatgtatttatgtgttgtgtacagaatgtttcactactaaaaatatataagagagctctaattaattggcttttaaaaaagcgcttgaattagatactaaaaaagaaaaaactagtcaaattgtttttcaggtttatgtaacttaagtaaaatctttaataaatacgctagctttaaaattattggtaaagtaatattagaaatgtcttaagaattgcccagcatacatttttgtttgcatttattaatcaagcaattttatacttatccctgccaaatttggcataggggttacaaaactataaaccccgcccaaaacagaatgatctttgcttgtgtaatttttaatgaagaagacattgatatgagtttaatgaaaatagctttatcttgaatttagtaagattaccataacttctaatcctgtggctttaggcagtctgatctgcagacaataaggagggttgttttggggaaaggactgttaccctctttgtttcaaagctaaactataaactaagttcctcccaaagttagttcggcctacgcccaggaatgaacaaggacagcttggaggttaagagcaatatggaatcagtgaggtcaaatcttttcactgtctcagttataattttgcaatggcgatttcataactttaaatcatgactatcacagttttcataaataatctaggtaaacaaataaaacacttagataaatgtaatggaataaatacttgtagataaactgatcataatttataatataaagttatattaaattaaataatagctatttcattatttgggtattttccaatamatatatattgtgggaaaacattcttgctaaataaaaaagtgtgtcctttaaaaaaaaaaaaagtgaacaagttttgtctaattcaaagcttatttaaaggttatatataaaacaaggtgaaaggcaccaggaataaaaagagatgtaaagaaagttataaaaataaggaggttttcttttttgaggtaaaaaagcttaaagagaaataattttatataagaaagaatcttgtatggtaaatttagtcctaaaataaaataactggttatctaaaaaggagggatgttgagaacaaatcagaaagtctgatcatgtcattaacagtcagtgtaagtcacaataagaggatttatattaaaaagaaaaacaaaaacttttatataatcaagttatcatgttattattaagttttggtttgcttaggaaaaaaacagagataaaatttttttttaattaaggttattacatgcatgtatcttcctgtatgtacattgttacattgagtttcaaggctgtaactcctgggtctaaaaaggacaccaagtcctgctaaatcttaaacattgacagcaataaaagcctcatcttcaggccccatagaagatgccaatcaaaacaaattgcattcctgagacacagggcaagaaattaaagctattcaactcctcagggcccagggactatcacagaagaggtgggcgcctaagattgtaagggctgattttgaaagataaaataagttctgtttctctataaattaattattaatgtcaagggcacactaatgcaaaaccagtacatggactcctgtgtcagattagcaaggttttcttgaagcattaaccaacttcttaataaagtttataaaaggcttacagaagttatattttataatcaaggttaaatcttgtagattgcttacaaaattcgaaaaacaaatgtaatttgcttcatgctgtttttattagagcttctcctttagaaaattaaatctcctcaccgggcktggtggctcacgcctgtaatcccagcactttgggaggccgaggcgggtggatcacaaggtcaggagatcgagaccatcctggctaacatggtgaaaccccatctctactaaaaatacaaaaactagctgggcatggtggcatgcgcctgtagtcccaactcaggaggctgaggcaggagaatggcgtgaacccaggaggtggagcttgcagtgagctgaggttatgccactgcactccagcctgggtgacagagcgagactctgtctcaaaaaaaaaaaaaaaagaaaaagaaaagaaaattagatctcctctctcaaagaatgaaggtttttgctttttctgaaatgcttgaattatcactttggttaaataaatgacctcacaatgacctgtaatcctattttgtaataccaagtgttttaaaccctttatatttgacaaactttccaaaatcaaattataaattatgtctttttctaacctaattaatcctttaagaaatgagtttccctaagtccaaaaatgacaaaatttggcttattttggtataaaaattatacaggaagtgtcaaatatgaaatggtgtttggttttctttgggctgtatttgtataaatatgttactggtatgtgttccaaaattatgggaaactcctgtatttctgatataacttagtgtacattatcagtaatagtcataagtgttgttaaaattattgtgtgtcacagaggtaacacatttccttgtcaattgtgtcttttaactgtggctgccttaaaacttttttcatccacagacaattctcttgtttatcttgttttaaaccctctttaaaaggtgggtttataatcagttataggactctaacaggtgcacttaaatgcagttttgctgataactttggaaactgtgacattggaataaaggaataaactttcagaactctcatggagagctgaaatgtttatgactatcaaacagaacaggagttaactgaattaactgaaccaatagaaaactaatctttttgacctttttgcttaaaacattgctaatactttgttttgttttttagaattatgaaaactaaagctatttacagcttttaacaattgagtaaagtatactgttaccagaattgggagcatatttgtttctctctacctggtttctccagaatttggaaactatttgtgagtattcttaatttatggcagtatagttatttgcataagtgccataagaatctgttttcttttgcaataggacacaattggagaaattggttattttactaaggctttgactgggatggtgtgctttcctttaaggaatcgacttgtggagctaataaagcccttggaaaaactggcctcatattttgtgtacasagtccctgtacaggttttctgacctgtgtaagtacagaattcactttctgayaggcacagaagccccakgtttatgttgggacctcaagagaaggggaaattcacccaactcatagatatttgatggcacaaatctatggctgggcttcgcttttaaaatgtcttatctgctattcctcctatggaacaaagttccatcaaagccaatttgaaagcctatgtaaaagataattattcttgctgcactgtatacaaataattaggccaagtataataaagcaagccagtcccaccatgttttgtctttagtaaaaatgggaaactggagagagaataattatgtttcaaaactacagtagacctgttgttagattctagtctgcctaatgtttttttcaatttgtattattttctacagtttagactgaattctaatttttcwtggctacaagtccataaaataatgttttcaatttcttttccttctttttttccatttttcctaatttagagtcactgaaaactaagctgtgttttcttaaaaccctgcaaactgaagccagacaacttgaacttcagaagaaaataacagcaacctatttacgtacataagccactttcatacctgcctactaatgtatggacttcagagtaatgtggcttatatcgatttttctaggattgttcttttgtttgttgttgttttttctcccttcctccctgctattttctcttcacagaatgtgagacttcacaacctactaaaaatgagcttttgggacttacccatctaggaataaaccatcatagctatgagaaatcagatgaagcctgagaccagagactcatttttttgcaaaatgctttctccgacagattttacaaaagaaaagtggtggggggcaggcacagtggctcacacctgtaatcccagcactttgggaggccgaggtgggtggattacctgaggtcaggagtttaagaccaacctgaccaacatggtgaaaccccgtctctatgaaaaatacaaaaattagccaggcatggtggtgggcacctgtagtcccagctactcgrgaggctgagacaagagaattgcttgaacccaagaggcggaggttgcagtgagctgagatcacgccacttcagtccagcctgggcgatggaacaagactccatctcaaaaaaaaaaaaaaaaggtcagaaatgtgaaaggaaaatctcttgggcccctaaaatcactaaggaaaactcaagctggaaactgcttagggcaaacctgcctcccattctattcaaagccactcctctgctcactgagatagatgcatatctgatttgcctcctttggaaaggctcatcagaaactctaaagaatgtaaccctttgtgtctcacctgtctgttacctgagtcttcctgcctttgctttaagttgccccgcctttccagaccaaaccaatgtacttcttacatatattgattgatgtctcatgtctccctaaatgtataaaactaagctgtcctccgaccaccttgggtacatgtcctcaggacttcctgaggctgcgtcatgggtgtgtcctcaaccttggcaagataaactttctaaattaactgaggcctgtctcagatgttccaggttcacatgagtaactcctctgcatgtcttcggcattcaacagacacacactgaataggaattccctgcctccctcctgcggggcatgaagccagatgctaggattgcagagctttcatgggtggatgtgcatgggacaagtgtgaacacagttagcaggacagagcgggagaagtatccaccaatggtttgacctgcccttagtcacttctcctggaaatgacggagagaagcgtgttaagaattgggagagggctggccccagtggctcacgcctgtaatcccagcactttgggaggccaaggtgggtggactctttgagcccaggagtttgagacaagcctgggcaacatggtgaaacccccatttctacaaaaaataaaaaaatcagctgggcatggtggtgtgtgcctgtggtcccagctactctggaggctgaggtgggaggatcacttgagcccaggtggtggagaatgcagtgagccatgatcacaccactgcactccagcctgggtgactgggtgactgagcaagaccctgtctctaaaaaaaattgggataggatatgagctcagagagctcagagctgggctccacaggacatgggaatggggtggagtcaaaaggacctgtggaagttttggaattgaagaggaaaaaaatgttttatcctctgaggctgaccaaaaggaaattggctgcagaaatgtttgtagattgtggtgggggtaggacgatgtttgaggtcacctataacagcttcaattttctggatgaaacgaaagaccagctcattcttcctagaatgaggggtctggggctaaacccaggacctggcaagggcattagaggtttgagatagtggctaggtggctgtcttagcccattttgtgctgctataaaacaggatacctgagactgggtaatttataaagatcagaaatgcatttctcattgttagggaggctgggaggcccaagacagaggcactggcttctggtgagggctttcttgctgtgtcctcacttggcagaagagtgggagagagtgaaccccttcccacaagccctttgcatagaggcatcaatccattcatgggggtggagcccacgtgacctaaacacttcccaaaatgccccacctcccgacactgttgcattggggattaagtttccagcccatgaatacgggggtacacattcagaccatagcaggattacatcagttagggttccatcaggggaccagcagaaacaccagtaatatgaaaagagagaactaaatacaaagacttgttaactacatataatattcaccaggtaactgaaggtgtaaggaataagtctgagatatcacagaggaagcagctaccacctctcaggctgggcaaacggagggaagcaggtccaatgattaaaaccttgaaacttggccaagtgtggtggctcagcctgtaatcccagcactctgggaggccgaggtgggggatgatggatcacttgaggtcaggagttcgagaccagcctggccaacatggtgatacctaatctctactaaaaatacaaaaattagcaggatgtggcggtgcatgcctctaatcccagctacctgggaggctgaggcaggagaatcgcttgaatctgggaggtggaggttgcagtgagccaagatcatgccactgcactccagcatgggcaaaaaaagtgagactctgtctcaaacaaaaacaaaaacaaaaccttgaaacttakaggagtggtcccaggggactgggaccagacctctgagaaggacgcgctggccagctggtggcgggctgggagtggtgaaactggctctgctggtgttgcaagcactggcatctggattcagctgctgctgcagaaagcagctgcatttgctgggtggagtgtccctggggtattgctcaaaggggccccaagcagcaaggaggtcacgagcccctccttcttcctcagcttcctgtagcaccccaaaatggtagaacccaacttgtggtttgcagagtctcagcccaacatcacaaagccaagcagagaagcctgggtttggagtgagaggcaataacttagtaactgtcatggggaacgcacaaagccatccctcactgtatgagtgacatttagggactgtgcaggcacatgagtctgtatattggctgaatttctttcctttgccttctgcaaatcatttcgtattctcctaggcccttgccatattggagaaatatcagaaaatccttaatgggtctcctggttcaaaaggaactgaccaacgattacaagtgtctatcaacagatgaataaataagcaaaatgcagcagaaacatacaatggaatattggccttgaaaaggaaggaaatcctgacctgtgctctaacatggaagaacctggaagatcatctgctaagggaaatacgccagtctcagaaggacaaataccgagtgattccacttatatgaggtgcccagaataggcagatgcctggagaggggaaggagagtggtggttgccaggcctgaaggaggagggaatgggcagttgttgttcggtgggtccagagcttcagttctgcaggatggaaaatgttccgcggatggtggtggtggtggctgcacaacagtgtgaatgcattgaatgcgtgtgactgcacactgagaaatggctaaggcgggacgttttacctgatgtggatttgcccacagtcacatatttttagaaaggaactaggctggctgcagttgctcatgcctgtaatcccagcacttcgggaggccaaggcaggtggatcacttgaggtccggagacaagcctggccaacatggtgaaaccctgtctctactaaaaatacaaaaaattagtcgggcatggtggtgcgtgcctgtagttccagctactcaggaggctgaggcaggagaatcacttgaacttgggaggcagagattgcagtgagccaagattgcgccactgcactccagcctgggtgacagagtgagactccatctcaaaaaaaaaaaaaaaaagaaagaaggaaagaaagaaagaagtaagagagagaaaaagaaaagaaagaaagaaagaaaaagaaagaaagaaagaaagaaagaaaaagaaaaaagaagagaagagaaaagaaaaggaaagaaaggcaagaaaaggccgggcgcggtggctcacgcctgtaatcccagcactttgggaggccgaggcgggcggatcacgaggtcaggagatcgagaccatcctggttaacacggtgaaaccccgtctctactaaaaatacaaaaaactagccgggcgcggtggcgggcgcctgtagtcccagctactctggggcctgaggcaggagaatggcgtgaacccgggaggcagagcttgcagtgagccgagatcgcgccactgcagtccggcctgggtgaaagagcgagagtctcaaaaaaaaaaaaaaaaaaaaaaaagaaagaaagaaaagggaagggggaaagggaaagggaaaaggaaaggaaagaaaagaaactagacagaggttagagctggaggacatgggtgggcgccctgagcctgatgtgtcacatgccttcatcctcccaccttgggtgagcagcattttccaggctttgcttagtgagttctgatgtgcaactgtcttcgtcggccctgctgcacayccactacaggtgtatatgaacagggacggtctgcccctctggtggtcccgggaataaagaattgattccagcagatgataatataacagctaatatggagtgtgttcagcatgccaggcacgtgtgtgatccgcagcacacctgtgttgtagagcctgttatcacctccattttacgatgagaaacctgaagctcagaggggttgtgtccagcctccggtcacccacctgccaagtgcagaagccgaggtagaaccgggctctccgtccgggatctcgtgcccttcaccgcgggactctacctccccctagtggaccatctagccttgcatggtctcacatccagtttctacacaggtgggatacccagctgtctccactcatgagaggtaacttcgcattcgctgtttgctgttccacaagcatgcccctttctcttgccctagctccacgctggctgtgttccaacaagtggcagcagtgctgagttttgctgcacacccagcgaggcaccccagactctcacctgccaggagcacccctgcgggcttcagaggcttgtggcaggattaccaggtgttccttaccatggtccgtcaattcccgcagaagcaaccctgggagatttaagaatcttcttaagcttctgtggctgtggagatccttggaatggtaaagagacttccggatttctttctatagcccagctatgtaaagtactttgtggagtcaactaccctccaggtttctcccttgatcggaggggtctgcgtgggattctgaatgggggaggcatccattgagaagagccttttccacaccatgcaggcaccgtggatgcctctgggattctggcaggtgaatctgggtatcctgggtgatactgatggcttttgttttttgatgcaggatccatctgaggtacacatattgcgtttaattgttatgtttccttttaaattttaacttctcttttcttttcttttttttttagatggagtttcactcttgtcacccaggctggagtgcaatggcgtgatctcggctcaccgcaacctctgcctcccggattcaagtgatgctcctgcctcagcctcctgagtagctgggactacaggcacccaccacacccagctagtttttgtattattagtagagacagggtttcaccatgttggcgaagctggtcttgaactcctgccctcaggtgatcctccagtctctcagggttacatgtgtaggtttattttttattttttatgttttaattttttttgagagagattcgggctctgtcgcccaggctgcagtgcagtggtgtgatctcagctcactgcaacctccacctcccaggttcaagtgattctcctgcctcagcctcctgagtagctgggacttacaggcacgtgccaccatgcccagctaatttttcgtatttttaatagagacatgatttcaccatgttagccaggatggtctcgatctcctgacctcgttatccatctgccttgggctcccaaagtgctgggattacaggcgtgagccactgcacccagcctgtaggtttattgtataggtaaacttgtgtcatgggattttgttgtacagattcttttgtcacccaggtattaattactcattaattatttttctttagcctcttttaatctagaatagtacccccttactactaccttcttgggtttttttggtcacatggaacttttggggttcaggtgagtttactagattgtcccccgctccatgctgaattcgtataatagttgcttcatgtttggattcagatcaaatatactttgtaggtgatggtttgtacttctcactgcctcatatcaggaggaacataaaacctgacctgggaatcacacagtcaataaatgcgtcttaacaatatattacgttgtgtggtgcgctgagtcccctgctatacaatgaacacacaatgggagccattgatatgattgggacatgcagagataatgaaaaccaaagggcaggtttgtgggttggcaataggtgcacttaacagaaaattcaactcacaatagtccatccaaatacaagtcaggaggcaggcagcccagagctgatgcaacagctccacctaattcaggatcttgctctctttcactctgccatcactggggtgtggccttgggtctcatgaatccaagatggcttctgccccccagacattgggaccccttccaggcagggaggaggaaaggggcatgccaactgccctgatctccttttaagaagctttcctggggtggcacccaatgattctactcacacctcattggttggaactgagtcacatgctgaacccaacatgcacgattgggaaatgcagttgtcaggagccttgcgatcctgagcaaaaacatggttcttttagaaaggaagaaggagagaatggatattaggtaggcaattgggagtctttgccctgaagaataaggcaggctggggtttgttttgtttcttgatgtgtgattttattgtttgttattcttagaaaaatctcttttttgtttgtttgttttgacaagacttaaacttggaggtagaatttatcaaagaggacagctctgtctcttggctatctgttcttggcaatttgtttgacctcctgcattctcttgaccaaaagttcagcatgttctgctctgcaacctcttattttcctaaatatgctgttttttcagagcaatagacgtacatttgtgttgctggacacatggaataacaagactgaatcttgggtgctttactcccaggtctcttactttctttgtttaggggctttctcacaaaacactggtgttcatgatcttcttaaggaagatggaaatgtttgtggattctgctatctgttctgagccccaggatagaggcccagtagcatcagtcagtccaggaatattcttctttcctttttagctgatagttaaattgagaacactcagattggcatccgtagtgcaatccagaacagacttgaattttctttaaaaatttttttaagataaaaggtctcactctgtcacccaagatagagtgcagtagtgtgatcacagctcattgcagccttgaactcctgggttcaagcaatcctcttacctcagtttccctagtagctgggatcacaggcaagagccaccacacccagcagacttgtgcctcctttctccagttctccttggtctctaacaagaatgccccttacrcaatggcacatgggcacggccatggtcaggacatcttgcttcttgggggagacttgcttgttgttcccctcactgtcttggaccacataacccttctgttcttttcacccagagcatcagaatacacttctcaaaattggtccaaagttcgtgttcatcatccacttcaatgagctcctggcagcctgtggctgggaagatcagcttcatcttgaagcagctgatcacctccaagtccccacgaaaaagaaaagacagatttttgatggctagtgagacagctacacagattatatcagggtttaaaagttcccacaagccattaaaaaatggattattcctgagatcctttccaagatggccaaataggaacagctccggtctggagctcccagtgtgattgacgcagaagatgggtgatttctgcatttccaactgaggtacctggttcatctcactgggactggttggacagtgggtacagcccacggagggcgagctgaagcagggcggtgtgtcgcctcacccaggaagcgcaagcggtcrgggaatttccctttcctagccaagggaagctgtgacagactgtacctggaaaaacgagacactcccacccaaatactgtgcatttcccaaggtcttagcaaccggcagacaaggagattctctcccgtgcctggctgggcgggtcccacgtccatggagccttgctcactgctagagcggcagtctgagattgaacagcgaggttgcagcctggctcggggagggcgtctgccattgctgaggcttgagtaggtaaacaaagcgaccgggaagctcaaactgggtgcagcccaccacagctcaataaggcctactgcctctagactccacctctgtggtcagggcttagctgaacaaaaggcagtagacaacttctgtagacttaaacatccctgtctgacagctctgaagagagcagtggttctccccaacacagcgtttgagaacggacagactgcctcctcaagtgggtccctgacccccgtgtatcctgactcggagacacctcccagtaggagccgacaggtgggtgcccctctgggacgaagcttccagaagaaggatcaggcagcaatatttgctgttctgaaatatttgctgttctgcagcctccactggtgatacccaggcaaacagggtctggagtggacctccaacaaactccaatagacctgtagctgagggacctgactgttagaagaaaaactaacaaacagaaagcaatagcatcaacattaacaaaaaagacatccacaccaaaaccccatgtgtaggtcaccaacaccaaagaccaaaggtagataaaaccacaaagatagggagaaaccagagcagaaaagctgaaaattctaaaaatcggagtgcctcttctcctccaaaggattgcagatcctcgctagcaatggaacaaagccagatggagaatgactttgacgacttgacagaagtaggctttagaaggttggtaataacaaacttctctgagctaaaggagtatgtttgaacccatcgcaaggaggctaaaaaccttgaaaaaaggttaggtgaatgactaactagaataaacagtgtagagaagaccttaaatgacctgatggagctgaaaaccatggcacgagaacttcatgacgcatgcacaagcttcaatagctgattcgatcaagtggaagaaagggtaacagggattgaagatcaaattaatgaaatacagcgagaagacaaggttagagaaaaaagagtaaaaagaaatgaacaaagcctccaagaaacatgggactatgtgaaaagaccaaatctacatttgactggtgtacctaaaagtgatggggagaatggaaccaagttggaaaacactcttcaggatattacccagcagaacttccccaagctagcaaagcaagccaacattcaaattcaggaaatacagagaacaccacaaagatactcctcgagaagagcaaccccaagacacataattgtcagattcaccaaggttcaaatgaaggaaaaaatgttaagggcagccagagagaaaggttgagttacccacaaaggaagtccatcagactaatagcggatctctcagcagaaaccctacaagccagaagagaatgggggccactattcaacattcttaaagaaaagaattttcaacccagaatgtcatatctcacaaaactaagcctcataagtgaaggagaaaccaaatcctttacagacaagcaaatgctgagagattttgtcaccaccaggcctgccttaacaagagctcctgaaggaagcactaaacatggaaagaaacaaccagtaccagccactgcaaaaacatgccaaattggggtcaggtgtggtggctcatgcctgtaatcccagcactttgggaggccaaggcaggtggatcatgaggtcaggagatcgagaccatcctggctaacacagtgaaaccccatctctactaaaaaatacaaaaaaattagccgggcgtggtggcgggtgcctgtagtcccagctactcgggaggctgaggcaggagaatggtgtgaacccaggaggcggagcttgcagtgagccgagattgtgccactgctccccagcctaggcaacagagtgagactccatctcaaaaaaaaaaaaaaaaaaaaaaaaaaaaaaagccaaattgtaaagaccatcaatgctgtgaagaaactgcatcaattaatgggcaaaataaccagctaacatcataatgacgggatcaaattcacacataacaatattaaccttaaatgtaaatgggctaaatgccccaattaaaagacacagactggcaaattggatagagtcaagacccatcagtgtgctgtattcaggagacccatctcacgtgcaaagatgcacataggctcaaaagaaagggatagaggaagatctaccaaggaaatggaaagcaaaaaaaaaaaaaaacaaccaaaaaaaacaggggttgcaatcctagtctctgataaaacagactttaaaccaacaaagatcaaaagagacaaagaaggccattacataatggtaaagggatcaattcaacaagaagagctaactttcctaaatatgtatgcaccaaatacaggagcacccagatgcataaagcaagtccttagagacctacaaagagacttagactcccacacaataatattgggagactttaacaccccactgtcaatattagacagatcaacgagagagaaggttaacaaggatatccaggacttgaactcagctctgcaccaagcagactaatagatatctacagaactctccaccccaaatcaacagaatatatattcttct

SEQ ID NO: 96511 - DNA, 13385 bp, Homo sapiens
cagagatacttctcagggctaggtatgactcatgggaaaggggtgagtccacagagttgcttcatggaaaagtcggtcctgtgggagtcagaagacctgagggccaccctagttgtgccagtgctgttggttttgaggtgccacttgctcaatctcctttcttttacttcccttgtttttagactgagggcattagatcaggcagtttttaacttgtctctctgcttcagaatccacaccctaactgtgttatcagttgtgagccctctgccagcagcgttggagcatcacctcctaaagggtggggtcatgtctccggcacctctgtaccctccactgcacagtgcagcgcctgcacgtaggaggtgcctgacctgtgtctgtaggaactgaagtcgtgcaggctgctaacagagcagtgagcgcgtgttctaagggatgctgctcttgggtggatggagcttcctgccctggccagggcacagagatgactcagtctacactgggttcttatgcgacgcgagtgaagaagctgtttccctctctctattgcagtggcgtgagcagtgaaactgtgagcatttcaggatagggagaagtgctgaacaatttcaaaaatacatataacagctaattagcgggactatgacagcgtggcgttcttattactcacagtaggggaataattgtgcccaaaattggttgctgaagcaatcaggcaggttggtggtgacagagtcatctccatatccaacatgtggccttgctgcctgctcaccacccttcacgagggtcggaggaggccaggtggtacagcaggcacttgccttgcattttcatgttaggaccatgggagtccctgtgcactcaggagcgaagagccgtcggaagtggctttttgggtatatatggcaagagctaacagtaacagtagtaattaataacggccagtgttttccaagcagctctgatgtgccaggcacatgttcttgtccttactgctgtcctgtaggatggttatagtgcttttcccttccttcagatgaggaaactgaagcagagaacacatcgctagtaaatggtgcagctgagatgtgaatccaggtgttctgtcaatgaattctggagagactgatgtgtgtaatgaggagtgtgactatgaggctcttggaaacagcaggaatttccttcacccactcactccaaacacacagacactcacttgagctctgtcacgctcaccacctctccttaaggagatcattgtataatggcccagcaagcatggactcagtccactgtgggttactaaagattgcaatgaatgcctggtggagctgaaagagtatggttggaacattcccaagagagttactgattctggaaggagggatcgaggctggcttcacagagaatgaggcaggagtagaaaaataataagataacagctcccgaaacactttctacataacaagcattatgcttggtatttcatttattttattttttgacacagggtctctctctgtcacccaggccagagtgcagtggcacaatcacaacccactgcagcctcaacctctgtggctcaagcgatcctcccaccttagcctcctgagtaggtgagactacaggtgcatgacatcacgcctcactaatttttaaaatttttgtagagacaagaagctctcactgtgttgcccaggctggtcttgaacttgtgggcttaaatgatcctcctgcctctgcctcccaaagtgctgggattacaggcgtgtgccactgtgcctagctatgcttgacattttgtttttaatttaaaaaaaaaatttttttgagacagggtcttgccatgttgcccaggctggagtgcagtggcacaatctcagattactgcaagccccacctcccaggtttaagctagtctcctacctcagccacctgagtagctgcgattacaggcaggtgccaccatgcctggctgatttttgtatttttggtagagatggggtttcaccatgttgtccaggctgatcttgaactcctggcctcaagtgattcacccgcctctgcctcctaaagtgctgggattacaggaatgcgccaggccaacattttaaataataacaacagttaatacttattgagtactctacataccagccactgtgctcagcgtcttttggtgaattctcatttaatgctcacaaaaaccaggtaagccatccctgccttacagataaggaaactgcagctaattgaggctgaggagcttgtcagggtcacgtgggtaggatctgcttgagctgcgattcaagtgcaggcagtcagatgcccgatccgtttttgatagcctgtttgccatgacgggccatgcatgagtttcatttcatcttcacagcaaccttaaaggtaggaattgtcaactccattttacagacagagaaatggagtcagagatcgcagacccgtctagggtcccccaggacatggaagagctgatttctgccttgttaactttgtgggtggtttcatcatgccatgtgtcctttgtccttcccttaccttcccccgctttatttcagggaacatcattaagaatgaagccttgtacagagctgggatccatcccctttctctcggttcagtcctgagtgcctcgcgtcgggaggtcctggtggatcacgtggtggagttcagtacagcctggctgcagggcaagttccaaggcagaccgcagcacacacaggtctaccagaaagaacagtgccctgctggccaccaggtcatgaaggaggcgtttgggcccgaagatgggttacagaggctcacctggtggtgcccgcagtgccagccccagttgtcagaggagccagagcagtgccagttctcctaaggagctggtggtgctcctcacggaaccttgccgcttggggaacctgacgtctaagtgtccagaaaggaggatgtgggcagggacggggtacagaggatagtgtgggtcagaggtgccagtagtataatattcatctccctggagttatgttgaaggcagagttttcatagggttagattttttttatccttttctagttcagttaattcatcctgttgaattgcaccatcgtgaaagatgggaaaaatcgtgatgatgggtaaggggaaaacttcccggaaggcaatggggcaaggaaaaagaaagcctatgggaaatggctgtgctcccaacatagctttgcagatgatgtgggttttttttttttttttggttgtttgttttgagagagagtcttgctctgtctccctggctagggtgtggtggtgtgatcttggctcacggcagccttgccctccctggctcaagcagtcttcatctcagcctccagagtagctgggactacaggcatgtgatatgatgctcggctgatttttgtttactttttagagagatggggtcttgccatatttgccaggctggtttgaactcctacaactcaagcattcctcccaccttggtctcccaaaatgttgggaccacgggtgtgagccaccgcgcccagctagctcctgtgttttgtttttgttttgtaactttggttgatgttaaggccctccattttggaaagcaggaaaacaggatttttttttttttatcttgttccctggaggatccagggatgaggatagagtggcctgagagcagtgcttggattcagcctcctgctgggtccttctgctggatacaggcaccaagaggcgggggtggagcagggagctgcgccttcctggggtgcccggtggtgtgtagagaaaagctgcttgtttactccttaagtcaatgtattggtgactgttgatttgttgaacaattcaggaatcaagggctgtggagaaactccctcatgttgttggcaacaggtgaatgaacctagagcggtgacatgaaaataaagctcactgttactcgctgtttttgtctttatttggtagtaaaaggtctttaaatacccaactattcatggaggtggcctccagggcttactgggttagctgaggaatctacataaaagtagcagtgagaggaggtgagcgcacacctgctcctctgccccagctgaacagagatggacttgacctctgtcaccacgatgtctgcacagagatttgtgagagtgaagctgaaaacactggctgatatttctggctttcctttattcttctcttttttttttttttttttttgagacagggtctcactctgttgcccaggctggagtacagtggtgtgaccatggctcactgcagccttgacctcccgggctcaggtgatccttccacctcagccgccctagtagctgggactacaggtgtgcaccactatgcctggctaatttttgtatttttgtatagagggagactcaccatgttgtcccaggtggtctcgaactgcaggcctgaagtgatccacttgctttggcctcccaaaatgctgggataacaggcatgagtcaccatgcccggcctcctctgtcttaaatgactgacaattgtcaacagtgcagagagccacttgatggcagaccaagtctcttgtactgaaggctcctcccgcacggggtgctctccctgtgtcgagggctgtgtctcccccacccagttctcaccacttcgcttacttcttgcacatgatctacaaaacaacacatgaagacaggtcctcaaccttgttgtccttaagttatagatgagaaaacggaagagtctagagaggctgaggacctcgcctaagctcacacagttaacaagggccagagccacaccggagtcagctctggctgccgaaatgtgccctaggggaggtgactcaaacagcagacttatttcttatagttctggagcctgggaagtccaagatcaagggctggctgactcagttcctctgctagatcacactgggcattagggctttatatgtgaattttaagggaacacaattcagtctgttacaggctacaaaggaatttgggagaaaatcctcaacttctcaaaggtcgtctcctcccactcttgaaaaaacatacaatagcttataaaaacctcactttcccttcatgaaggcctggatttaagaaaaaatgaataaaacctcaattccagaatagacgatgggaaaatattgaataatggatttatttgtatttagaagggtagaagagcatactcatgcacttgtgtgtatatatgcacatatataaaatatgtaacatcaaagaatgtgggccaggcgtggtggcttatgcctgtaatcccagcactttgggaggcaaggcaggtggataacctgaggtcaggagtttgagaccagcctggccaacgtggtgaaaccctgtctctactaaaaatacaaaattcaacctggcgtggtggtgggcgcctgtaatcccggttacttgggaggctgaggcaagataatagctttaactggggaggaagaggttgcagtgagcccagatcacgccactgcagtccagcctgggccacagagtgagactctatctcaaaaaaaaagtgtgtgtgtgtgtgtactgaaatgcacctttctaacccatatggttaggacaagactaggactccaggcatgagctgctgcaaatgaggctgagaccatttcctatgagtgggtgtctataggacagtgggtccaggggctccccagacatagtggggactgaataccatggcctgcgtgtggtctgctccaactgggattggtagaaaggaaaaggcggttgtggcgccgaaaaggaagttgttgacaaagaagcaatggggcggctgtagctgtaggagtggagagggtgagaggcgcgggccacggcggcactgggctctgttggtgtcagctggccaacagtgtgggcaccggggcaaggagggaacactggagcggctcagccggcactgagctgagcagtggcagaggccaccgcctggcagatggggaaaggcagagtgggtgagcgggcactgtgtatcaccccctgaggygtgctgagctcgagcctgtgaccacctgtgctgtggagatggagacaatgtaattgggaagcaggcctggcctccccctrccacagggacaggctggtcttagaggcaccgatggggcagctttcctagtaggagtcatgatgagctacagaggctcacagggtgtcatggagcacgaggaaaggtgcagggaatcctagagaaagtcttgtgtttawggagcaagacaggaaggagaaaccagtcagtgagatgggtcaaatgtaagtggagaaaggaacgtccaagsagaagcgggctgtcgctatggtgaatcatgcagagatgaaggcgggacgatggagcagtggccccttgggcttggcaggtgatcaaattcgaggtcatgatgaccttcaggagagcactgtgtgcagagtgccagcagtgggaagggaccgggtgggagggaggaygtggaatgtgagggtggtctcccctgcaggaagtttggccttggaggggatgaaaatgaagggcagggaggagtcgcgagcgaacaagcaggagggtgttcgactgctagagctgagctaagcgatgcctaaatcaaaggaacttgtttcttcaagctcttctggcagtgatyctgacagtgaggttgacaaaaagttaaagaggaaaaagcaagttgctccagaaaaacctgtaaagaagcaaaagacaggtgaaacttcgagagctctgtcatcttctaaacagagcggcagcagcagagatgataacaagtttcagattgggaaaatgaggtacgttagcgttggagattttaaagggaaagtgctaattgatactagagaatattggatggatcctgaaggcgaaatgaaaccaggaagaaaaggtattgctttaaatccagaacaatggagccagctgaaggaacagatttctgtcattgatgatgcagtaagaaaactgtaaaatccgagtcatacaaacaaaacctgtacttttctagttgtttkaatctgtctttttacattggcttttgttttctaaatgttgttctccaagcaattgtatgtttggattgcagaagaatttgtaagatgaacttttttttaatgtgcattattaaaaatgttgagtgragcaattgtcacstttattaaggaggattgctttgtgcccaccacctagtgtaaaataaaatcgagcaatacagtcttaaatgttgtggccttttttgatcataagagttggtactgtttaaggccaaaagtaatagtttttataaatcttttagtytcaactsagcttttacaataaaaaggatttgtattgcattgagtttataaacttttggtttgtgaaatccatatttgatctgttttcttccaatcaaatgtttatttggaaagtcagtgaaactgtcaaaatgttacctcaataagatatttataattgtatgagaactacaatcaccaaatcgactgtcttcagtattagcagatctagtttgataaacaaatggcttgtgtgaaaaccgagcaggtgtttgtcattacccatagtgttctgtgtagttattgcttagtctgcagaaaataatgacctagatgagatgtctgacttgctttcacttattaaacatgttcaccatgggatgatgtctgtaacgtcagatattgttaaactagactaggatttaataaaaattgtgaaagcttactggcctaacattttattttataatattgagtatgaattatatgtagccagagatgtcaataaggcttactgtcagtaggtaatatggttagtttgtagggaaaagagcgtatgagcacatgcttgtgtatttcggcctttgccccagtagatcagacaatgacattctagtcttgatgttactaagttttagcagacactagcaagtggtttgtatttaaccacacccatgaagcagacagactgaggcacagattttagtggctttgtggcaataaatagggcatggtgtgccttaggaaaagaatgtttataaagggaactataactgaaattaaaggaggcggcagtgaagaggaaataattatcttctatctaaatgatatacatatgatattttgagatttttataactgcagtgcaacacaattctgggtagagtagaaaaaggaatggtttaaagacatataaaagattcttgttgacaatttatttttggtagcaaatctcaaatgattacctgctattaagggctgccatatcagagttttgcactattttgctaccaagtttgattcgtacatctaaaacattttgtagttgattgtcaaggacttaatttgaaaatcatttgccaggccacatagttatcaattttctttctagcagctattctgttgtatttttaaaacattttttagatgactttttgaagtctatttagcagtaaccttaagaggtgcaaattagtaaaataaatctcttgtaatttagccttcatcaaataataggtaccaatgtattaaaaatatgtggtttttttttttttggcagccctttgaaccagagtaagttcagagaaactcccaaaatttgtattttagacacgtcatgcttgattggtaacttccctccttttttggggaacatgtttgtgtcctattaacttaattggatagatttttaagtatttcttatttttggcacacaggatggttagaatacagaactttgatttttggtgtagatacggagagaatgatgggtaaatttcctaggtttatatgaatttagggggtgtacgcattttgaaacgctattaacagatggtgctgaaatctattgcctacatgttttctagctctttagcattatgttaatgaagcctccatataaggagtgtttctctggcacagttggtaagttgactgctaacttcattgaaatgtgttactggatatgcagtatactgaaattattgatcttttttgtgtataggaaaagagaagtgggttaaaagaagcaaattaacttgttctgaaaagaaagtatagattaattttgttttctgtttaaattttatctccttggtaagactttttttccaaggcagaaagcttggcatttttaggcatagatcccttaccttataatgtcaaaatgaatttaattccagtactcaggtttttccctttaacagactctatgtgtatcagggctttctaatgggtttttcctctttgtttttaaaatgtgagcagcttttgaccaatttccagtgctcttagcattttacttaaagaacaaccactaaaaaagaaaaacttcgtaatttgcttgtcttttgctttgctttattaatgtctaagaacttaagaatactcctacctcattagctactcaagatgctgtgacgaccaaatctattctacataatgtgtttagaaacaaagacttgggtgaaaaatgaaataagtatattctgacttggctattgagggtaaaaagaaagaattaagtattaagtgttccttgtaggagatatgttagtagaataccataaaagtttgaaaattttaaaaagtactaatatttaggtatcctgaaattatttgcagttcattttttatggaaattaatccagtgaatcacgcaaaagttttttttttaaatggtgtttttccagatcaactctagggtaaacattcacataatcacaaatatgcaattctgtaattgtgaaatgcctgtatgttttgttttcatacatcttccttggagatgtctgaatataatactccatctatgaatattttaaatgttgaaataaaagtaagaaatgtgaaaaaaaaaaatgaaggctagggaggagagcaaaggatgaatataacgtgaaaatgtatgtatagttagttcaggggagaaaaccaggagagagagagagaaagctcacaccagagctgtcgcttaaagatgactggactagggtgggaagagaaagaataacaagtccctagaaaatttgctaaaagtgaggcctttggggtacagaagagtgggcaggtttgtaacggctgtaagggaaacgtgatcacttcgggttagagggaagggctgtagagccacatggcaagcccaggacacctgtgcatttcctgactttccctgacagcatccagtggcttaggataaaaaatggagacattggatgttggattaccccacaatggacatggacgtttgtcagggtaaggatggtgggagacctaagggacaaggagaaacattatttttttaaaattacagacgtcaaaagagtcacacaatacaaagtttatagagtgaaacatgaaagaatgaccttcatccctgccttaggaggatctctggagcagctttgctcatagtgtctctgactgcagtgacttacggaaaaaactaataattgggaaaatactagtacctaacagttgagactaagtgttgtggttggtgccgttggaactccatggaacatgttcctcatggaagaggtggggaagggggaatgtgggcaggtaacaacccacactcccatgcttctctcccagtgagtgagatctaattcaccctggcagtaggttctcagtgggtttcaggttggttccaaaaggaggtagggcctggtgcagtggctcacgcctgtaatcccagcactttgggaggctgaggcaggaggattgcttgaccccgggagttcgagaccagcctgggcaacatagcgagaccccatctctacaaaaaatacaaaaattagccaggcatggtgatgcatacctgtagtcccagctactagggaggttgaggtggaaggatcacttgagcccaggaggtcaaggctgcagtgagccgagatgatgtcactgtactccagtctgggtgacagagtaagaccttgtctcaaaaataaaaaaataaaaattttaaataaatacataaaaggaggtaggcacgatatgttgtaagtggactgaaagagaggagatggtacagagacagcagggtggagtgtgaccagtggcggttatgccttttgtgcctgtgcctgttgcctggaaggaggagaggttttcgcttgacaggactgtgaaggagggcacggaaatatggggggtcgggggtgaatctaggcttccatcttagtaaggagaggcgggatacgtgtgagaggcggcagcatgctggcagccctgcagcccttgctcgctctcggtgcctcctcggcctcggcgcccattctggccgcgcttgaggagcccttcagcccaccgctgcaccgtgggagcccttctctgggctggcctagtccggagccggctccctcggcttgcggggaggtgtggagtgagaggcactggcgggaaccagggctgcgcgcggcgcttgcgggccagcgcaagttccgggtgggcgtgggctcggcgggccgcacttggagcgggcggccggccccgccggccagggcagtgaggggcttagcacctgggccagcagccgccgtgcttgatttctcaacaggccttagctgcctccccgcggggcagggctcgggacctgcagcccgccatgcctgagcctcccccgcgccgccgccgtgggctcctgcgcggcccaagcctccccgacgagcgccaccccctgttccacggcgcccagtcccgtcgaccgcccaagagctgaggagtgcgggcggatggcacgggagtggcaggcagctccacctgcggccctgcgcgggatccactgggtgaagccagctgggctcctgagtctggtggggacttggagaatatttatgtctagctaagggattgtaaatacaccaatcagcactctgtatctagctcaaggtttgtaaacacaccaatcagcaccctgtgtctagctcagagtttgtaaatacaccaatggacactctgtatctagctaatctagtggggaggtggagaccttttatgtctagctcagggattgtaaccgcaccaatcagcaccctgtcaaaacggacaaatcagctctctgtaaaacagaccaatcggctttctgtaaaatggaccaatcagcagggtgtgggtggggccagataagagcataaaagcgggctgccttaaaaaaaacggtggcaacacgctgggtttgctttacaacgcctgggaagctttgttgtttgcaataaattttaatacttgtctgtttcggtctgcactgcctttatgagctgtaacactcacggggtaggtttgcagcttcactcctgaagccagtaagacaacgaacccactgggagaaacaaacaactccagacgcgccgacttaagagctgtaatactcgctgtgacggtctgcagcttcactcctgagccagcgagaccacgaacccaccagaaggaagaaactccgaacacatctgaacatcagaaggaacagactccggacacgccgcctttaagaactgtaacactcaccgcgagggtgggcggtttcattcctgaagtcagtgagaccaagaaccaaccaattccggacacacttggactcgacagactctaaggtgaaagattggtttagttcatgagttggggttttgtgataactgacattgtgaaaaacgggggatttaacatagattttcacagtggctttagacatttcataaatatttcttaaatgcctcctaaatgctaggatttggcaatacaaggctaaacaaaatacaaagccaaatcctactgtaacgggagtatgtaaagtgtttctgttaatggaaaaagtgctgtgtgaggatgggggttaagtgactggactgtttgtgttctgagctttctaggactgatctgattacgctgtaaacactccgccagatactgtgtaggcccagcccttgtgcttgagggggccactgtgaggtggcgaaacagacaagagattattagaatacagaaagttcaggttgggaggaaccactgaacatggtagaagtactgaggtctgtgaaagtaaagatcagcccaatgaacacaaacaaataaggttcttgattcggagcttgctgtagtaagggagttttgtacttagtggacactccgaggcaggcaggggagtgggaagctttacggtggaaaaggggaaggctgcagcagtgctctgattggaggcttctggcctggggaagttggaagcagctgatagaggtaggtgtcttcagtgattggtttgaggagcctatttgtttttctgtggttgattctgagttgcaagagtcctgaccatttggggctgattgctgctgaggttgtggttttctt

SEQ ID NO: 96512 - DNA, 14480 bp, Homo sapiens
ggcaaatgccagccttgatgagggtaggaatcttccagtccttccagaagagctcccgagacatacttctctgcacagacatagcctctcggggcctggacagcactggtgtggagctggttgtcaattatgatttccccccaacgctgcaagattacatccacagagcagggagagtgggccgtgtggggagcgaggtgccaggcaccgtcatcagttttgtgacccatccctgggatgtgagcctggttcagaagattgagctggcggctcgccgaaggagaagtcttccaggactagcatcctcggtgaaagagcctttgccccaagcaacctgattttgacaaatctgattaaaatgtgatgctagaacagggatctttcccagtatcttgagtgggtgaccacacttgtcagtgggaggctctgggctgccctgtcggctccttgagggcgggatgaactgctttgtgacttggaaaggtacgctgctggccagcattggagaagaagctgctgagcatggctttctgtagtctttagcaagacacaagtggattttgactttgtatcatgtcatgatttctaacaataaatgatgtttttatgtgcctcccctaagaataattagcaccggggcggaattcagtagtttctgaggattcatacaccaaacctccacatctaggacaaaggctctttcagttgatgttttcatttataaacatttagtttgtatttcctgcccccaaaaaggtatccattaagcccccagggaaaggaaaggaaaggaaatgtgactagcagtagacagagttactctctaacaatgcccaagacaaacgggcgtcttggcgaaatctctggaaggtactggcagaaaagtaaagggtagacgaacacagaagttttgcttgtacattttcaggttctgccttctatcccaactcggtagccgagaaagaggagagatgattaaacggttttacaaaactggaaaaataaccatatagcattttctttatatatatatatacgtatatatatatatatatatatatatatacatacgtatatatatatatatacatacatatatatacgtatatatatatatgtatatatatatatacgtgtatatatatatacgtgtatatatatatgtgtatatatatatatacacaaaaaaaaattacaaaaatcaacccggcgtggtggcacgcgcctgtagtcccagctactcgggaggctgaggcaggagaatcacttgaacctgggaggcggaggttgcagtgagccaagatcataccactacactccagcctaggggacagagcaagactccatctcaaaaaaaaaaaaaaaaaaaagccgggtgtggtggctcacgcctgtaatgccagcactttgggaggctgaggcaggaggatcacctgaggtcaggagtttaagaccagcctggtaaacatgcgaaaccccatctctattaaaaatacaaaaaaattagctgaatgtggtggtgcacgcctgtaatcccaaatacttgggaggctgaggcacaagaatggcttgaattctggaggcgaaggtttcagtgagccaaaattgcacttctgcactccagcctgggtgacagagctgatattctgtctcaaaaaaaataacagaatcctgagccccactccagatgggattaagctctctaaagtttgacctgagaatactctttgtaaactcccccaggtgatacttgggccctcccaaattgataaaccatttgtctatgctgtactgcctttcccagagtcccagcaaattcctgtaaggctttgtacccccacaagacaagagggatgcttccggacaagtactctctccagagccttggagaatctgagtgatctcatgctagccctcctgccagaacagacttcccaggaaccatccccttgatattttacctcctaccactccctgcaggccatcaattagcaccacactaaagcaacttatgagagaaggtgctatgattctcaaccggggtgacccagtctccaaagatcgggccgtctctacctcctgggcatatcccctctgcaataaccccactaaataaatgtcccatgtttgctttttcaaggccagtaatagggagacctctccttaaggtcatctctctttggtaggaagttcttggccacactgaaccaaaggctgctcctagtgtggtcctgatcaggctaagggcagagttgcctgtttcctttgagtaggaccaaatcgcctttttttaaatataaaaaaaatagacacaaggtctagctatgttacccacgctggtctcaaattcctgggctcaagagatactcctgcctccacctcgcaaagtgctaggattacaggtgtgagccgccacgcctggccctaatgaccttttggtacctctccacagtgctgacctgggctgctgctgggagctaaacctcatcctttcatagtgataagattgtcattgtttgcctatttaaagagagggcagtgtaatgataaggttatgattttgtattgttatctttttttttttttttgaaacagagtcttaactctgtcacccaggctggagtgcagtggcacaatctcggctcactgcaacctctgcctcccaagttcaagcaattctcgggcctcagcctcctgagtagctgggattagaggtgcacaccaccatgcccggctagtttttatatttttagtagagacagagttttgccatgttggccaggctggttgtgaactcctggcctcaagtgacccgcctgcctcagcctcccaaagtgctgggattacagacatgagccaaggcacctggccagtcatttgggattcttatcttgtcatgaatttgtttgaatttcatgttaaaataggttcatctgtagacgtgacatctcactcctataatctcagcactttgggaggccaaggcaagaggatcacttgaggccaggagttccaggttacagtaagctatgatggtgccactgtattctagcctggatgacaaagtgagaccctgtttctgaaaaaagaataaattttaaaaatagaaccatcattcgcacttcatacagtcatttgggagcctcattttgccttggggcacatttaacatacctccagtgtacatcacctttaaatgtgatgagcttgtcctcacattcttaacagctataattctggagccccaaatgaagccctgcggatcagaatgcctctctgctacctgtatgaccttggatggacccctaacctcttggcgttcttgaatcttaggtggtaaaaatgtgagggtgctatgaatttacatttggggcagaacaaagtcaagaagagcctgtatgttttcagtcttcttaactggaacgtattccctctcctattgaaaccgccattgcaaaattacaaccgagagagtgaaagagatttgacctaaccagctccatcgtgcttctaacctccaagctgtccttgttcattcctgggcataggctgaactaactttgggaggaacttagtttatagtttatagtttaaaacaaagaagataacagccctttcccaaaagaaacccccttcatgcctggggactagactgcctttgtaggactaacaaaatcagccaaaagattagaaattatggtttaggagtcatgcagctagaggctacaagattctttttttttttttgagatggagtctcactgttgttgcccaggctggagtgcggaggcgctatcttgactcactgcaacctccgcctcccgggttcaagcaattctcctgcctcagcctcctgagtagctgggattacaggcacccaccaccacgcccagctaattttttgtatttttagtagagacgagtttcaccatgttacccaggctggtcttgaactcttgacctcaggtgatccacccacctcagcctcccaaagtgctgggattacaggcgtgagccactgtgcccggccgaggctacaagattctgaccagtccccaaattgctcttggggataacatcactatataaaacctaagatcatgctcgcttcagcaacacatatactaaaattggaactatacagagaagatgagcacagccccttgtgcaaggatgacatgcaaatccatgaagcgttccatatttgttaattttttaattttttttaaattatatacctaggccgggtatggtggctcatgcctgtaatctcagaactttgggaggccgaggcatctgtctcaaaatatatatatatgtgtgtgtgtgtgtgtgtgtgtgtgtgtgtacatatatacatacatacgtgtcatatatatgttatatattatatatatgacatagtatcagtgcttgagatattttgcacaccctacacttgattggctgggcgcagtggctcacgcctgtaatcccaacactttggaaggccaaggcaggcggatcccttgaggacgggggagtttgagagcagactggccaacatggcaaaaccctgtctctactaaaaatacaaaaattagctgggcgtggtggcaggtgcctgtagtcccagcttctcaggaggctgagacacgagaatcccttgaaggggaggttgcggtgagtcaagatcattgcaccactgtactccagcctgggcaacagagtgagactctgtctcaaaaaacataaataaaataaaaaagaccttgcacttgatggatcagctgacaccacccagattaatcttgtggctcccccacccaggaactgactcggcaagaggatactttcgactacctaagatttcttttttttttcctttgagatggagtctcactctgtcgcctaggctggagtgcagtggcatgatcttggctcactgcaatctctgcctcctgggtttcagtgcttcagcctcccaggtagctagctggggttacagacagcgccaccacgcccggctaactttttgtttttgttgttgtttttgagacagagtctcgctctgtcactaggctggaatgcaatggctggatctcagctcactgcaacccacacctcccagattcaggattcttctgcctcagcctcccaagtagctgggactacaggcacatgccaccacacccagctaaattgtatttttagtagagacagggtttcaccatattggccaggatggtctcgatctcttgacctcgtgatccgcccaccttggcctccgaaagtgctgggattacaggcatgagccaccgcgtccagcctaatttttgtttttttaggggtttcaccatgttggccaggctggtcagcctcccagagtgctgggattacaagcacgagctgccacgcccaagctgactccctatgatttcatctctgacccaaccaatcagctttccggactcactgcccaccacccaccaaattatctttaaaaactctgatccctgaatgcttagggagactgatttgagtaataaaactccagtctcccgcacagctagctctgcgtgaattactctttattgcaatttccctgtcttgataaatcagctttgtctaggcagtggcaaggggaacacgttgggcagttactctttgcgtgtgtccagatctcaccagtccttcaagtccagctcgaaggagccttccatgatccctttgtccatcccaatctctgcctctcctgctgttgattgcttagcaccagtgcgtggctacctatctatctcttagattaatcttgcctctccagctcatatcagaatttaggtttctcttgccctcctgtggtcactggggcttgtaccagccgacagatgtgccccacagagtggctactaggcatttgtagggagggctggatgggagggcccaggcaggattcctctctatctctgccctgctctcctccacaaaaccctgaaggcctgaagcctgccccttaagtcacagattccttaggtgacttcacagggtagtgatgacctcacaagcttccaaagtttccatggcagcgtgactacacacctgcgtcctagagaagcctccctaccatttctctgtaagataccaatctgtttggttggctgagagagaatgactgaccggatcctctatattgtctctaacatgtcctctgtcccctgggagggcagcgcagcaggtaggcatacagggggcatctatacaggaggcgttgctgtacccacagcttcacctggctgacacattccttctgggctggcccaccacacctcgagctttcccagccataagtaatatcgagggcgtggccactcagggacccacagtgttcctgctcagggcaagttcacctgctaagggcaagtgaaatgtcatctgagcaggtgctcagaaagrttctcatcttttttttttttttttttttttaattgagatggggtcttgctatgttgctggggctggtctgaattttttttttttttttttttttttttgagacaggttctctgtcgtccaggttggagcacactggcataatcacagctcactgaaacctcaacttcctgggctcaggggattctcccaactcgtctccctagtagctgggactacaggcacgcgccaccacacccagctaattttttctctttttagtagtgacagggtttcgccatgttgcctaggctggtcttgaactcctgagctcaagcgatcggcccacctcagcctcccaaagtgctaggattacgggcgtgaggcactgtgcctggcccaccaatttgtattagatctttttattttagtctcgctctgtcacccaggctggagtgcagtggcacaatattagatcctttttttctttttctttttcttttttgagacagtgtctcgctctgtcacccaggctggaatgcagtggtgcgatcttggctcactgcaacctccgcctcccaggttcaagcgattctcctgcctcagcctcccaagcagctgggactacaggtgcgtgccaccatgcctgactaattttttgtatttttagtagagatggggtttcaccatgttggccaggctggtactcctgggctcaagtgatcctccctcctcagtttcccaaagtgctgagattataagcgtgaaccaccccacctggctgatagtagatcattttttacaaaacttgaaaataatttccattaaagcctgagatgtgacagaccttaagaaatgtatttttggtcatggaagggatgaggaggatctcctggtctcctgctgctgacacaggctccacataactgctttcacagccagcatcctgtctcagggacacatagaggtgataggccaaggctgtgtctgggatgcgaagaagatgaaaggacttcttaggaagagtcgcgagagagggtaggctgtaacagcacaatgtataaggtaaaagtgactaattctggttttctttccagctgcagtgcctgccacttctcctcccacacctgggcactaccatgttctctaccgagggtgtggagaaactcaggtaggctggcatggggagacgtactgcctggttggtggctaccgggtccatggggatgctcctttggccaccccaacaaaggctgaagcagagaagccagcccccaggcgtgctcccaagagacgtcaagctacgatagagtcagataaagacctgggttgctctagccccaaaattcggcgcttggagcatcgtggcaggagactgaccccacagaagcttgctggctgagccatttgggagaaaggacaaatgtttagctgtctaagacagctaatgcctcttctgcggtgacctcycctgcccaccactgcagatagagcctgagtcattctgcctatgccttcctcatccagaagcccccttccatgctaactacccatggccaaggagcctcagaaactgtggtttaaaatgagaggttgctttgaacatcccaaggctgaagacggcctggaagaaaacctgatgttcctctactcatctctccagagtccctttttgggcagaagatagaaatagtctgcactctgctagccgaggagtcaagtgcagagagggagtgcagcatagcccagtaagggcttgatctaccagatgggtctttgctttgagtcactgccagcaactaccagcacaaaccaggagggccaggacttgctgaaactggaagcagcagcccatggctagtcacagcaggagaaagcctcctgcttggcatctcaggaggtagaagaaagagacctggggagacctgccacctacagcaagaacaataaggaggaagttgagcaacatccccctgaagctcacatgttactttatttcctgcccattatggccccagtgaggtccctactgctcaatttaaaaaaaaattaaaaaaattatttttcsataacagtatttgacttgatcatcttttttttttttcttttttgacggagtctcactctgtcacccaggctggcgtgcagtggcactatctcggctccctgcaagctccacctcctgggttcacgccattctcctgcctcagcctccctggtagctgggactacaggcgcccgccaccacacccagccaatttttgtatttttagcagagacggggtttcaccatgttggccaggatggtcttgatctcctgacctcaagatctgcccgcgttggcctcccaaagttctgggattataggcatgagccaccatacccagcctctttcttcctcctcttcttattcttcttccttcttccttctttcttcttcttctccttctccttctcctccttcttcttcctcttttctctctctctcttagatggggtctcggccaggcacagtggctcagtcctgtaatccctgcactttgggacgctgaggcagtggatcacctaaggtcagaagtttgagaccagcctggccagcacaatgaaaccccatcttactaaaaatacaaaaaattggccaggcgtggtggctcacgcctgtaatcccagcactttgggaggccgaggtgggcggatcacgaggtcaggagattgcgaccatcctaacatggtgaaaccccatctctactaaaaaatacaaaaaattagccaggcgtggtggcgggtgcctgtagtcccagctactcgggaggctgaggcaggagaatggcatgaacccgggaggcagagcttgtggtgagccgagatagtgccactgcactaaagcctgggcgacatccgtatcaaaacaaaaaaaaaaatacaaaaacttaactggtcatggtggtgggcacttgtaatcccagctactcaggaacctcaggcaggagaatcacttgaacctgggaggcaaaggttgcagtgagccgagatcatgccactgcactccaatctgggcaacaagagtgaaactctgtctaaaaaaaaataaaaaaaaaaaggccaggcgctgtggctcacacctgtaatcccaacactttgggaggcagaggcgggcggatcacaaggtcaggagatcaagaccatcctgactaacacagtgaaaccccgtctctcctaaaaatacaaaaaattagtcagttgtggtggcaggcacctgtagtctcagctacttgagaggctgaggcaggagaatggcatgaacccgggaggcggagcttgcagtaagccaagatcacgccactgcactccagcctaggcgacagagcgacactccatctcaaaaaaaaaaaaaaaaaagatggggtcttgccgtgttgtccaggctggtcttgaactcctgggctcaagtgacccatctgcctcagcctcccaaataaataaaaatttaaaaaagaaacgcagagcctggccggccacagtggctcacatctgtaatcccaatactttgggaggccaagatgggagaattgcttgaagccaggagttcaagacgagcttgggcaagtagtgagatcctgtctctacaaaaataaaaataattagttaggtatggtggggtgcacctatagtcctagccatctggggggctgaggcgtgaggatcgcttaaagccaggagttgaaggctgcagtaagctatgatcataccactgcatttcagcagtctgggtgactgggtgacacaacgagaccctgtctcaaaaaagaaagaaaaaaagaaaagctaaaaaaatgtagagcccagtgagtgtttccgtgtgtgtgtgtgtgttttagagagtgttaggagagggacaaaataactaagaagatgctgctccatctatccactcatccattcattcatttattcaacaagtatttattgggcactttttttttttgtttgacacagagttttctctcctgttgcccaggctagagtgcagtggcacgatctcggctcactgcagcctccgccttccgagttcaagcgattctcctgcctcagcctcctgagtagccgggactacaggggcacacccccacacccggctaatttttgtatttttagtagagatgggattcaccatatcggtcaggctggtctcgaactcgtaacctcaggcgatccacccaccaaagtgctgggattacagacataagccaccgcacccggcctattgagcacttcttacataccagccactgtgctggttgcttgggatatattggtgaatgagaaactcctcccctcaaggcacccacaaacaatataatttgttcatagagacaaacaatataatttttgttgttgttgttgtagttgtttttcttgagacggagtctcgctctgtcacccagtctggagtggcgcgatctaggctcactgcaagctctgcctcctgggttcacgccattgtcctgcctcagcctccccaaacaatataattttagataactataactggtataaagaaaaatgaaactggataagagaatacagtaatgaggtgtgctgtgttacaccaggtggttagggaaggcttctctgagatgatgacattgtggctgagatgtgagggaatcgtgaggagtagaagggagagcattactggaggaaatttcaagtataatggtaagaatgagactgatccattttttctttttttgaggtggggtctcactttgtctcccaggatggcgtacaatggtgcgaccttggctcgttgcaacctctgcctctcaggttcaagtgattctcctgcctcagcctcctgagtagctgggactagaggcacatgccactacactcggctaatttttgtgtttttagtagagatggggtttcactatgtttgccaggctggtcttaaactgcagacctcaggtaatccgccagcgttggcctcccagggtgctaggattacaggtgtgagccaacacacccggcctacaagactgaccaatttgagggccagcagaaaggccagtgtggccagggaagaaagatagaggagattgaaagatgtggtggctgggaggccaaggagggagggtcacttgagcccaggagtttgagaccagcctggcaacatagggaggtgccctttctacaaaaaatcaaaaaatcagctgggtgtggtggtgaatgcctgtggtccctagctactcaggaggctgaggcaggaggattgcttgagcctaggaggtataggctgcaacgagccatgatcctgccactgcactccagcctaggcaacgagtgagactctgtcagaaagaaagaaaggaaggaaggaaggaaggaaagatggaaggaaggaaggaaggaaggaaggaaggaaggaaggaaggaaggaaggaaggaaggaaaaaaaaataagatggttggaggccaggtgcagtggctcactcctgtaattccagcaatttgggaggctgaggctagtggatcacctgaggtcaggagttcgagactagcctggccaacatggtgaaaccctgtctctactaaaaaatacaaaaattagctgggtgtggtggcaggcgccttaatcccagctacttgggaggcagaggcaggagaatcatttgaacccgggaggcgaaggctgcagtgagccgagatcgagccattgcactcaagcctgagggacaagagtgagacttgtctcaaaaaaaaaaagaaagaaaagaaaaaggtggttggagaagtaaggaagtaagcaagtaagcatgggccagaccatagtgggccgtgccagccacggtaaggacagtggatcttgttttaagtatattgggaagtcatggaggaatctgaataaggtagggaagtaatctgatatagatgctaaaaagatccgtctgactgctgcgtgccatggtagtgaggtgctggctgttaccagggggactgtctctctctgcagctgggacagctggtgctggggactgggggatggaggagcagtcagcagagaagaaacaccatgacgtttgtcccaagtctgcctgtatcagcagcccagaaaaaggcggcactgtcagcaactcacttgtccttaggggtcccagcagcaagactgttgctcctccccccaacacgcataccatggaggccaggaaaggtcctgataggttttcctaacttgggttaaaggaaggaggcacaggccctgggctcccagaaagttccctgtgagagtctccattaacccccagagtctctcatccgtggcgtgactgaagcagatttgtggttcctggatggcctggatagtttggcagttcccaaagctgaaacaaatagactcaactggggctcttaaaaaagagtgatcccggccaggcgcagtggctcacacctgtaatcccagcactttgggaggccaaggcggggagatcacgaggtcaggagatcgagaccatcctggctaacacggtgaaactccgtctctactaaaaaatacaaaaaaaaaaaaaaaattagccaggtgtggtggtgggtgcctgtagtcccagctacgcgggaagctgaggcaggaaaatggcatgaacccgggaggcggagcttgcagtgagctgagatcgcgccattgcactccagcctgggtgacagagcgagactcggtcttaaaaaaaaaaaagtgatccccagcacccacaccagtctaaagttttagggtactggcctagaaatccacagtattaaaagcttcccctcagctggccatggtggctcatggctgtaatcccagcactttgggaggctgaggtgggaggattgcttgagcccaagagttcgagaccagcctgggcaacacagcagcactccatctctacaaaaaatattaacagtaaagaattagaaaaaaaaattttaaataaataaaagcttgccttaactaccagtttatagaaaacacaaggacacaggaacatgttaaatgacaccatgagatgcaatcagaaaactctacaacatggaaaactctaacggacaaggacgtgattttttcaacaaagaaattgcaaggaagacaaaaaaaagaagaacctgaagattgagtcataacaaccatttacaatgtgggcggtctgagctccattacagttcaaaccaatgaattatttaaaaattggacaatcagataaatttgaacatgatagataatttatgatactaaagaattgggctgggcacggtggctcatgcctgtaatcccagcactttgggaggcagaggtgggcggatgacatgaagtcaggaattcaagaccagcttgaccaacataatgaaaccccgtcactactaaaaatacaaaaaaattagccaggtgtgttaatgcgtgcctgtaatcccagctacttgggaggctgaggcagaagaatcccttgaacctgggaggtagaagttgcagagagccaagaccacgccattgcactccagcctgggcaacaaaaacaaaactccgtctcaaaaaaaaaaaaaaaaaaaggccgggcgtggtggctcacacctgtaatcccagcactttggggaggccgaggcgggtggatcacaaggtcaggagattgagaccatcctggctaacatggtgaaaccccatctctactaaaaatacaaaaaattagccaggcgtggtggcagacacctgtagtcccagctactcgggaggctgaggcaggagaatggcataaacccgagaggcggagcttgcagtgagccgagatggcgccactgcactccaacctgggcgacagagcgagactccatctcaaaaaaaaaaaaaaaagtggctgggtgtggtggctcatgcctgtaatcacagcactttgggaggccaaagagggaggactgcttgagcccaggagttcgtcaccagcctggggaataaaacaggaccctgtctcggccaggcgcggtggctcatgcctgtaatcccagcactttgggaggccgaggcgggtggatcacgaggttag

SEQ ID NO: 96513 - DNA, 17171 bp, Homo sapiens
tccagcctgggcaacacagcaagactctgtctcacacacaaaaaaaagtatgttgtcaaattcaaaatatttaaatgctataatggcagtaggtacattaattttatatctctagtaaaaaaggttgaaagatcccagctacttgggaggctgaggcaggagaattgcttgaacccaggaggtggaggttgcagtgagccgagatcgcaccactgcacacaagcttgggccacaagagggaaactccgtctcaaaaaaaaaaaaaaaaagttgaaagaaaaactagtaaaaacaagtaaagctacagtactttgttaagaatacaaattattttactttagagagctgaggcaggaggatcacttgagctcaggagtttgagaccagcctgggcaacatagtgagaccttgtctctactacacaggtgtagtttgtacctgtataggtaatgtaatgatattgacaagggaatttaagacaaaaattgttaagagacaaaggaagtcatttaaaaatgataaaagggtcaatccatcaagaagacatagcaaatataaatataaatgcaactatcaacagagtcccaaaacacatgaagcaaaaaataacagaattgaggagagaaatactttattcaacaataacagttggagatttccatatcccgctaccagtagtatttagaaaaactaggtagtagagaacttgaacaacactatcaaccaactagacccatcagatatctacagaacactccagccaaacaacagcagaatatatactcttctcaagtacacatggaacaccatattttgggccattaaaaaaggtaccaataaattaaaaataattgaaatagaagaaaatatcttccctgatcacaatggaatgacattaaaaaataagataagaacattcaggaaatttacaaatatgtataaattaaatatactcgtaaatcacaagggaaattagaaaatgctttaagatgaatgaaatgaaaacacaaaataccaaaacctaagggaggtagctaaagcagtgcttggagagaaatttagatttgtaaatgtcaatatgaaaaagaagaataacttaaatcaataagctaacctactaccttaaaaaaaacagagaaagggccaggtgcagtggctcatgcctataatctcagcactttgggagaccgaggcgggcagatcacttgtgctcaggagttcgagaccggcctgggcagcatggcgaaacaccgtctctacaaaaaatacaaaaattagccaggcgtggtggcgtgtgcctgtagtcccagctactcaagagcctgaggtaagagaatcacttgagcctgggaggcagaggttgcagtgagccgagatggcaccactgcactccagcctgggtgacagagtgagaccctgtctcaaaacaaaacaaaacagaaaaagatgagcaaaataaactaggaaaaagaaggaaatagtaaagattagagcaaaaataaatggaatagaggatagaaaaacaccaaaaatcaacaaaatcaagttagttctttaaaaaatcaacaaaactgatgagctttatctagattgatcaagaaaaaaggagagaagaatcaaatcaataaaatcaggaatgacaaagggaagatcagtactgacctcacagaaatataaaggattataagggaatagtataaacaattgtatgcaacatattagttaacaccgataaaacgaacaaattcctataaagtcacaaactaccaaagataacacaagaagtaaagaatacaaatagacttgtgacaagtaaagaggttgagttagtaattttaaaatttcccacaaagaaaatttcaggcccagatggcctcagtggtggtttctacaaaatgttatttatttatttacttattttacagacaaggtctcgctctgtcacccaggctggagtgcagtggcatgatcacagcttcctgcagcctcaacctcttgggctcaagcaatcctctcacctcagcctcccaagtaactgggattacaggtgcatgccaccatgcctggctaattttttttattcttagtagagacaagatttcactatgtttcccaggctcgtatcgaactcctgagctcaagtgatcctcccacctctgcctctcaaagtgctgggaggacagccatgaactaccgcacctggctcaaatgtttaaagaacaattcataccaatcctttacaaactctttcaaaaaataaaaggaggaaatatttctcaactcattctgtaagttgtattatatgagccagtattaccttgttataaaatcggacaaagatatcacaagaaaagaaaacatagatcaatattccttacgaattaagacataaatctgcttaaccaaatattagcaaactgaatccagcaacaggtcaaaagtatatactattactaagcaggatttattccaggaatggaagttggcttagcatccaaaaatcaattgatgttcaccgtattattagaataaaggacaaaaaccacatgatcatctcaattagtgaagaaaaccttgtttgacaaaattcaatatcctttcatgattaaacaaatgctgaacaaactagaaatagaagggaactcaacccaaaacccaatgaagagcatctctgaaaaaacacataacatcatattcaatggtgaaaggctttcaacctaagatcaggaataagaaaaggatatgtactctcaccatgtctatttaaattgtactgaaggttgtagttagtgctattattcaagaaaaaagaaataaaaggtatccaaattggaaagcaagacgtgaaactatttttactcatagatgatatgatattgtatacagaaaattctaaggaatccataaaaacaatatcattaccactaaatgagttcaacaagtttcaggataccagatcaaaatacaaaaatcaattgcatttctatacactagcagtgaacaaatatgaaaatgaatttaagaatatgattcctaatcccagcactttgggaggccaaggcaggcagatcacgaggtcaggagatcgagaccatcctggctaacacggtgaaacgccgtctctactaaaaatacaaaaaattagctgggtgtggtggcgcgcgcctgtagtcccagctactcgggaggctgaggcaggagaatggcgtgaacctgggaggtggaggttgcaatgagccaagatcatgccactgcactccagcctgggggacagagcatgagactctgtctcaaaaaaaaaaaaaagaatatgattccattcataatagcatcaaaaagaataaaatatgtaggaataagtttaacaaaagtaaaagttacaagtaaaagacttgtaactataaaacattgttgaaagacattaaaaacctaaatacatagaaacaaatctcgtgttcatcagtcagaatacttaatattgttaacattgcaatactctcccaaactgatctacagattcaactcaagagctgtcaaaatcccagctgtcttttttgtagaaattgacaacctgattctaaaattcatatggacatgaaagagatccagaatagccaaagcaatcttgaaaaagaaaaaaattggagaaataacacttttcactttcacaacttactacaaatctacaataatcaagacagcatggtagtggcacaaggagagacatatacatcagtggaatcaaactgggagtccaggtttttgacaagggtattaaaacatggggaaaagaatagtcttcaacaaatggtgctgggacacaactggatattcatatgcgaaaaaaagttggacctttatcttacagctttacacaggtgtaatacacttgtataaatacatctttatacaatattaaaaacaactcaaaatagatccatgacctaaataaacataaaagcaaaaatgatgaaagtctttgaagaaaacctaggcaaagagtttcatgacattgaattaggcaatgagttattgaatatgagaccaatagcacaggaaacaaaagtaaaaataggtaactggactacatcaaaattaaaaacttctgtccatcaaaggacaatcaacaggcaacatacagaatgggagaaaatatttgcaaatcatatacctgataaagggtgaattcagaatacataaaagaatactacaactcaacaaaaagaaaactcaattttaaaaataggcaaatgacttgaatagacatttctccaaagaagatatacaaatggctaataagcatggaaaaagatgctcattatcactaattattagagaaatgtacatcaaagtcacaatgagatatcgcctcacactcaacatgatggctactataaacccaaaactcccaaaacaggaaataagtgttgatgaggatgtggagaaattggaacctttgtgcactgctgatggaaatgtaaaatggtgtggccactacagaaaacagtgtggcagttcttcaaaaattaaatatagacttaccatataatcctgcaatttcacttctggatatataccaaaaagaattgaaagaaaggtcttaaagacatatttatatgcccattttcatagcagtattcttcatgatagccaaaagtggaagcaacccaaaggtccattgatagatgaataaataaagaaaatgtggtacatacatacaatgaaatattacccagccttaaaaaggaatgaaattcggatacaccttacaacatggacaaatcttggggacattacgaaaagccagtcacgaaaagacaaatattgcatgattccacttggacaaggaacttacagtacagtagcccaaatcacagagacggaaaatagaatggtggttggcgggggctagggaaagtgaaagtggggaatcgtttaatggatatggagtctcagttttgcaggatgaaaagtttccaagattgattgcaaacagtatgactatatttgacactgctgaactgtaccgttagaaatggttaagatggcacattgtatgtcacgtgtgtttttaccacaatttttaaaaggccatcaaaaattgcttaattatgttttcagaaatgccagatggtaatatattgctgtttaacatatttgagacaattttaatttttctgtgacccttgacttctatacctcaacttttttttttttttttttttttttttgagatgaagtctcgctctgtcgcccaggctggagtgtagtggtgcgatctcagctcactgcaacctctgcctctcgggttcaaacaattcttgtgcctcagcctcccaagtagctgggattacagtgcacgcacggcaccacaccccactaatttttgtatttttagtagagacagggttttaccatgttgtccagggtagtctcgaacttctgacctcagtgatctgtctgcctcagcctcccaaagtgctgggattactgacgtgagccaccatgcccagcctatacctcaacttctacctatgtccacctggctgcccataaattaacccaatagctgtcacttaagcctactcagtatgtgccaggcttttccctatacaattgtgaacaattttctagtgagcaaactgaagctcagtaaggtccagtgacttttcccaaggttgtgcaagagatggagctctcattgggtcccattggcctgaccctaaagcctgggttcttttccaccagacctaatctccatcgagctggccttatcctaagaaccacttggggtatctataaaatccagatgccccctggtgatgagcaattctctagattttgatgaaagttgaatgtgtggatgctggaatgagtaaattaacaagtaaggagatgaatgcaagcaggaatgactaaatggacagactcagggagccttgaagagggtggggtctggaagggaaggaagagaggaaggagaatagctaagtagggagatttcactcagtgcttaccagagcgcgttgtctaccctgtaccgaagacagaggctgtggggacagcctaggggcctggatctattgcctacttagagagaggccaactcagacacagccgtgtaygctcccagcagcaacggaggttcaggcaagatgcccgaaggagggaagggtgacaagggcagtggggagacttggagagtttgtgcagaggggaggaacacacctttctttctgtattgtattgtattgtattgtattttttgagacagagtctcgctctgtcacccaggctggagtgcagtggcacgatcttggctcactgcaacctctgcctcctgggttcaagtgattctcctgcctcagcctcctgagtagctgggattacaggtgcccaccacctcgcctggctaatttttgtatttttagtagagacggggtttcatcatgttggtcaggctggtctcgaactcttgacctcaggatccacccacctcggcctcccaaagtgctgggattacaggcgtgagccactgtgcccggccacatctttctttagaaagatcatgctggctcctgtggggaaggcaacttgaaggggaagaaattggaagagggaagacttgacactaaacatagagccatggtcagtaagtttttggagggacctttaccagagagggagaggaagcagtatccattatccactctttagtgacagagcccaaaggaacagctctgtaatggctgggggtgggggcaagggcagcaatgaacagaggaggcgagggctgctcctgttgttgagtgccttccaggacactaagtgctggtctggctgctccaacatgggaaactttcatgttgtctctcagatctaagggtctctctgcatttttaaaaaaattattttgaattttttaaacttctatcgtttttcaggtggttttggttgcatagataagttctttagtggtgatttctgaattttagtgcaccagtcaccggagcagtgtacactgtactcagtatatagtcttttattcctcaccccctcctcaccttgccccacccccagtctatatcattctcatctgcatttgttttttgagaggtagggtgaggtctgctgcattagcccagagacagctgaggaggctggaaaggaaaatggctttcagagaatagggaaggaaaaagtctgaggaagcaaaactacttaaaaaacactgctctttccatttccgtatcatttaaccaaacaccatcctgtgggttctgtcacttgatcctcatgctgatctgagaactcggcagagctgggtcactgccttccccaaggctaacctggtttctaagctggcacaagaccccaggtgatctatcatctaaccacagagcccttgctggacagagggtgaagacattatgtgtccctggctctgttcagggaagcagaggatagacctgaagaatttaattacttgtcatagataaagcctagagaaaaggtgagggcgcaaagtatctcctccaaattgggaagactcccccagggctcactcactaacgccagttctcctgagcctttaaagcctgggggtgagggagccctcctggtcaaccctctctaccctagcctcagggagcttcagggccccagcattgaaggaacagggtctgacctcatttgccaccgtagggwtggggagactgaggcaggaggtgaatgggctcccagcttggagccctttcccctcaggacttggtttccctaccctagctccgcctgcagggacagaaagacatggtctggaaatggatgccacttctgctgcttctggtctgtgtagccaccatgtgcagtgcccaggacaggactgatctcctcaatgtctgtatggatgccragcaccacaagacaaagccaggtcctgaggacaagctgcatgaccaagtacggctggagtgtgcctctgctaaggagggggcttgttctaacagggaggagaaagtcaggatggtgggagagggattgaggggtcagatacctccacatcctgaagttttcctgtgggagaagatgaaggtggagtaggaagagtggctgaggtgattttaggggggccctccccggaggtggataccatgttgacaatgatattgagtcgtcattcgatgggcacctgtcagttgtcatgtgttttttgtacaaaatttcatattcccaggggttcttggatgtaggtagatgatattctccacattacacaagtaagtgaaaatgaggctcacagaagcacatgggcccacacaggagctggacatgaatggcccctgtggaggggtaggaataggagtgggttaggctcctcctttggtgggygacagactagggagtcgctggcttttcccaccctcactaagtgccatttccatggagtgccaagggagaagaggaggaggcccttctggctgtaatttgaggcacaggggctggacattcacacagtctatatacatgtatgccaggggattgcagccttattagactcaatgtctcccttttatgacagatttttttttagattctcttttctatcctgcaatgaaattcaaagaacctatttgtatgcataatttttgcaaatatcaacataatgctctgtaatataaaggagaaacacacagaaagtaacttgtaataaaataatatatatttcaatatgtcagttctctggtatgactacattagaaggcattaggaaatagcacatgcttgcttttgtcataaaatcattataagtggggagctacaaatgaagattgatacaggtatattctattggtgacttaaacactataagatactataatataagcaatgttgctgttgatgtcatacttttctaaaatagtgaataattctagtagaataaaccacatagtacagccttctatttcatggtatttgcagtcctggaaaacccagtctagattaaaatcttgtgaaaacatgatgtgcctatatgtaagatagagatacatttaaaaagtagggcttttgcttacttttttttttttttttgagaaggagtctcactctgttgcccaggctggagtgcaatggtgtgatctcagctcacggcaacctccgcctcyggggttctggtgattctcctgcctcagcctcccaagtagctggggcacccgccaccatgcctggctaatttttttgtatttttaccagagacgaggtttcaccatgttggccagggtggtctcaaactcctgacctcaggtggtagacctgcctcggcctcccaaagtgctggggttacagctacgagccaccacgcccagcctggcttttgcttactttttccagcaaatattttcatgggcctactatgtgtctggcactggcctagccactggggacacagatcttactacatgccaagaagaataaatatattcaaactccattactccatggctcgctccctctcttcctttgctcaaaatgtcaccaatgtggcatttcctaacctatttaaaatttcagcaattccacattaccatttcctgctcatatcatttaacttttcccatatcatttatcatatcctgacataccatatatatatattttttaagtttcttactgtctgtctcctctgaccagaatgaaaattccatgaatacatatttctgtctgttttgttctcttctgtattcccagcatctataaccgtgactggcataaagtaggtgctcaataatttttaaatgagtaagtgaaaggactttttatgaagtgttacatacctcataaatgataactattattcccaagacagggtttcccctgggctcccacagtcccctgatcacacggttgtaattgtgtttcctccaagaaaggggttcctggaggcctaggagagagggaccatcatctgggaacctgagtgttctcaggacaacctgcctagggcagaggagtaagaaccaaatgggggagagacacgaggtggcaggaggaggagggtatggggaggcacttagtcctgtgtcttccccacccagtgcagtccctggaagaagaatgcctgctgcacagccagcaccagccaggagctgcacaaggacacctcccgcctgtacaactttaactgggaccactgcggcaagatggagcccgcctgcaagcgccacttcatccaggacacctgtctctatgagtgctcacccaacctggggccctggatccagcaggtagggtgtctccccccsacccaccccagcagactgccatccccctcagtcacttcaaggcgatggctgccagcatccctggctgagaggagccctgcctccccacctcccacccaggtgaatcagagctggcgcaaagaacgcttcctggatgtgcccttatgcaaagaggactgtcagcgctggtgggaggattktcacacctcccacacgtgcaagagcaactggcacagaggatgggactggacctcaggtgagggtgattgagttggggttaggaaaaaggagattgaggtagggtttggaaaatcytcaaggatttggggtggggtgaagatttctgggggtggccagaaatgagctttgggcccaggggctgaaagtctgtgtccaccatgcctctccctgcaggagttaacaagtgcccagctggggctctctgccgcacctttgagtcctacttccccactccagctgccctttgtgaaggcctctggagtcactcatacaaggtcagcaactacagccgagggagcggccgctgcatccagatgtggtttgattcagcccagggcaaccccaacgaggaagtggckaggttctatgmtgcagccatgcatgtgaatgctggtgagatgcttcatgggactgggggtctcctgctcagtctggccctgatgctgcaactctggctccttggctgagttcagtcctcccagactacctgccctcagcttggataaccaggctgggctcagctcagctcccacaaatgacagccccttaakcatgcttctattagtcacctaaccctctgtcacccagtctgttgctgctccatggtggggccaagagtcacttctaataaacagactgttttctaataattccatgtctgtggaattgttttggttgtgagtttgtgggtgggtgggagacagattctacggcttctggattccttcaaattagagcaactagacctgtgtttgaatcccagctctgctactttgtgaaaatgaaacagttgcttcactgctctaaacctttgtttccttctggataaaaagaggataatagtcctgccctcaggcttgtgaaatatacaggagctgttgcctagaaagcccgtgagcccagtgtctgcacattaatagtcttcagggatcctgttgttcctgttgccccaagtgggagccaggtcctgagcttatttgtcttggtctccaaacagcctcctggtcctccagcccttgtgcctggctctgtgctcggctctgtaacaggaaagctgggaatgggagtccaggaaaggattcagattgccagtgggatgaaaaaaattcacagtgggatgaaaaaaacgtgatgcacattgaaggagcagagttggggcctgggactctcagaggaaaaacagagccaattggagagggcagtgtagggggtttctggagtggaatactcaagagcctggaactggttcagcgctttggtgtcctggaggtgtggctggaagagttagaaacccttaagggcttcccggggtcaggagcctctggcacctttgtctcctcctgggattggcagatatgcctatcttgagggggttgctctgtctttgcaaagccctcgggagctgggcctaagttatctctgggtctcccaacacccctttccctttggataagtctttgtttgcacactcctactacaactgtccccagagaggcccaggtaagtctctgagaacaccctgcaggtaggtggcccagctaggactagaacccaggtgtgcagactcccagtccaggtctctcccccactaccaaggattcccctcacatcaggctcatcttttcttatactaaaaggtggctgatgagaacggtggcacagattgtaggatgagttattgggttctggaggcactgttgggtgggtgggtggatctcttagttattatatttatctagtgtggaaggccccacagagccccttccacgtcccaggctctgctccagctgggttaagtcaatgcatatttgaaatagaggaaggagctcgagggactgacccgggctccgtcaacaggttcaacgtagcaaagtgaaagttctctcccaggttaaagggattctcccacggcggcccaggagatggtggcggcgggcgcccggctggaggcctgcgcctttaaggagccagggggcggaggggcggggcaggaagacgactccccggagacgccgccaccggctaggtctttttttgggagggggcgggccagacccttttatgggctccgccccctttgcggctgccgcgtcccccttccgccctcggctggaggggaggaagctaggggggcgttgcagcggaccccgtctgggagctccccgctgggcgtccggcccgcggaggcgcgagtttgctgactcggagggagccgctggggcgggggcgagtgctaataatacccgttcgttccgcagccgcgctttacagtttacacagctgtcaccttcgtttctccttaattaataataaaaatagccgccgttcgggagcgcgggctgggcgccaggcccggtgccgagcgcggtacgagctcggcccccagagccggccctcgccacaggatccccattttccagagcgggaagccgacgctcaaccccgcgccgcgacttgcccgaggtcacccagtgggccagcggctccgggaccgaggcgcggggcggggtgaggcgaggcgcggtgctgcccccggctccccggggcggcgcggggcggggcgggcggcgcggagggcgggggcgcgcgcggatggccatcttaagtggccgcctggagcccagggccgctgtccggggaagggggcgccggagcagcccgggaggtgggggtctgcgtgcggcggccgggatcccgggagggaactttctactagacgggccagggatcctcctggcttcggactgctgaaccccctcaaggcccggcctgcgggtgtggggggtggtgctggggaacttggccgagagggggaagggctctgcggggctgggaggggctgcgtgagaggctcgagaacgtcgcacctcgtctgggccccccgccagagtaagaatcttcagaagcctggttagccagggaatctccccgcaggctttgccgggggacggttcccgtggagttgggggttcagatctaagagggggctgcatttcgcaggagttgggggccccgcccgcttgggtggagggaagaggatgggtagggggtggtcctggatccttcgcaggtttggggaactcgatgcagccaagctgtaagggggacgagaggaagagccatggagtggaatcagacctttatggggcttaggggtcatatcattgggagaactgagaagcgctgaattctccagggggtgcctggatcccgaagtgtcggggccaggatggggggactcggatttcgatggggatttggggactggatctcctcgggtgaatgatgggggcaggatcattgtggggtctgggaggtcccgggcccttcgggaaggtgggggcaccgtccccgcaggaggagctgggggcaggggcggcccgggctgcgggccgagcggagggggagggggcggcagccggccctgcgctccgctcctgcccctcccccgccgcctctgaacaaacttttctttctcttcaagttgaggccggcgctgcaggcagcggcggctgcgcggtgaacgaggcggcctgcgcggcggagtgctgagtcccgatccccggctctgtccggcccacggatcctcaagcccgggccccgggcccggccccagcctcagccctgagcgtctcggggcggatggcgcggggcggcgggggcgggcggtgctgagccctgcgcgggccatggcctcggcctgcggggcgccgggcccggggggcgccctgggcagccaggccccctcctggtaccaccgcgacctgagccgggcggccgcggaggagctgctggcccgggcgggccgcgatggcagcttcctggtccgagacagcgagagcgtggcgggggccttcgcgctctgcgtcctgtgagtggggcgggggctccttgcgggctggcgtggaccgggagcgcgggcacggccgggtgtggaaagggcccgggtgagggtttctggggcggtgggacgccagacccgcctccaccccccagagtgggagccttggctttctcctgggtctgaggagggacgcaggggcacttcctgctgtgtgtctgggggcactttcaggagccttgagggtagagaatatggggttctgtggcccagtgtgactgtgatgacgaaaaattcgggcattccccggcagaccccttcaggcatcctccaggtagaagggagcaggggagaggatgtgcattccacgttgtgtgcagtcccgtttggatagggactgagtggtgagcaggagagggagtcggggcagagggactgacggggtgtgtggggatgcctggcagcttccttagggcccctttcggtgctttggggttctgcctggccgtgtatgggtggtgggggcggtgatgggtggtgtagagaggaaggcttggggaagcagaggctgaggctgtatgggaccttgccattatttctgaaccaatgagtgagtgtttgagccctggctctgggcttgagccctggttacctggctgccctagccctgagctatgagtgctgagtgagagcagagccagacttggtgcttctctgagtgggccaggtcctgtggctgtgcctttcagcccagtgtggttggtagtggtgctggggtgagttagcactcttggttttgcagccttctagcggctttgtacctcctgccctgcagtctgacattgagttggcttctgtgggcccagtgagtgggaatctgtgggggctgctttatttagatcagttatttagatctttatttagatctttcttagctctgtgaaccccctcccaaactcctgtcccactgtaccttccttacccctttgttctcctgacatctttggtcggggcgcacattagcctagaccaggggagacctttttttttttttttttttttgagaaagagtctcgctctgttgcccaggctggagtgcagtagtgcaatctcggctcactgcaacctccgcctcctggattcaagtgattcttctgcctctgcctcgccagtagctgggattacaggcgctcgccaccaagcccagctaatttttgtatttttagtagagatggggtttcaccatattggccaggctggtcttgaactcctgacctcaagtgatccacctgccccggcctctcaaagtgctaggattacaggtggagccacctcgcccagctggggagacatttttaattgtcacaactgggatggtgctattgacatctagtgggtagaagccggggatactgctaaacattctacagtgcacaagagagtcccccacaacaaagaactgtgcaatccaaaatgtcagtggtatggaggttgaaaaactctagcctaggcaattgacccaacaaggaaggggccctataagtcttagcttaggcctcaagtctgaggcccagtagggggagactaaggagggacagactaggcagatgaatatccccaagtcctgcttcccagccccctctgaggcataccccctaattaggctggggagggaggcaggtgctgggtcagctgttgagtgggagggggacagctggggcctgtgtctgggtgaggaacattattgtcccaggagggggagaatcctggcctcattgccaagggaggctgtgaatggggtgaggggtctgtctgtgagtgggggcttcaggtttgccagctgactctggctcttccccgcatctcaagagcctgggggtaaggatcagacgtgggcgatcagacgtgggcaatatcttagatttgccaaatacacacatacttgcttacctgtatacattccgggtgttcatggataacatgcaagacacgcccctgccccagcaggcacaggcaatctgaccagcaagctaggatactggccctggcttctgccatggtttaaaatcccaactccaccttttacttactctgtggccttaggaaaatcacttttattctttgagcctgtttcctcagctggagaatggggataataatatctgtttagaagtgtgagaattaagtaagatttataggacactgggtacccagcgtgtcacagataggattcagttaatggtatgctattgtaataaacacagatagtgtttgtaatagtctacaaaggaacacctggtgacagacactcacccagcataagcagccaggagagtcacctagggtgactcctgggtgactccttggggaagcatgccctgaggtgcggaggcagaggatcttccatcccccgctgattgtgcacctggctcagctgccacctgctcaactgcggctcctgtctgtcagcacccctcttgcccctccttggcttggggctcctagaggcccaggtctcccatgggggccctctttggtgggaaggcctagggtgatgcccccacactcctcggcacaagtgccctagacatacccgactccagcagagccagagagcagcataaacacaggaggcatacacacgtgttagcacgttgcccgtgtgtgcaaatgggctaaccaggcttctgaagactcttactctggcggggagcccagactggtaccacagcccagaggggctgtttagacagctgtggaggccacaaaagagctccctgttgcttctcaggccctgccctgtggtgggt

SEQ ID NO: 96514 - DNA, 13531 bp, Homo sapiens
acaaagtttcagtaaattcatatatagtatgaatcaaattcatactatatatgaatattacatgtgcttagagtctactacatgtacaaggaaatgatcctaaccatttgatattccagttgtgatagtcattcttggtgcttagggctactgaaagaaatatttctgacccactgtagcattgcttatatttataaatgttgtccatattctactttcttagtgatctttttgtagatatttgatgagccaaatattgggtattaaaatatatacagatggtctctattttgattgatgttagtaacctcataaccagctgtgtgatctctcagctttttctttttatttctggaatgaaattaggaacatgttaaacttgaaggtctccaaaatgagcaggaggaaatttggtagttaattttcaaaaggagactgagatgatttttaatatgaaagaaaatcctttttctattttagaatagagtatcaaagaattgtttgatttttaatgaggttagctggatattacaaatgataaaataattaaaacagttgatattcaggtttaagacttcacagaataaataaatcaaatattaaggaaagaaagcttatttttaaaagtatacatgagtattatgaatgtttaaggatacataataacacaatgcatatacaatagaaatgcccatgagcagaagagtgcttttgaattcacaaataaatgcccctagggtggcttatgatgttggtgctaaatattttaagaaacataaagttacttattaaactcagagtaacatttcctgactacttatggaccgagtttgtgacaggtggagtgttaaagtgaattgttctatgtacattttttgcatcctaaaatatggtaaagcacattcttcaagaacttcaatttaatttgtgaagcatttattcagcacctcctgtgtacaattcactgtgctcaagtgaagattcaaattttatgaggcctgaagtgtatacaatttgagagctcttctttaagaaaagaaaaattcatagatttgaaattaggcgcagggctttgaaagagtcccatgcaagtgagggaccctacttaagcttcagtaacttcatgataaagttatcccttcacatctaggggggcttggttccaggatcccccatggataccaaaatccatctatgctcttaagtctgttatagaaaatagtgtattatttgcatataatctacacatatccttccatatactttaaatcatctttggattacttatggtatatctaatacaatgtatatgctgtatatatacttgatatactatattgtttagggaataatggaaagaaaaaagtatgtacacgttcagtacagacataaacattctatttttttcccaaatattttcaatgcacagttgattgaatcctcagatgtggaacccacagatatggagggccgactgtaaacatgtctttgactctaatttatgttgtgggactcagagataactaaggaattattcctaccttgctcaagcatagaatgaaatctctacttaaatttcaaggatattgctgtgaaacatgagataaatgtaaaaaaaaatgctttgatctcctagtgataaaattttgaatttcttatctttttattaattatctttatttcagatctgttgtaggccaaagttttggaaacataagatcatttctgatagaacagaattcatttttaccccttgccactatttataaagctcattacatatatcattcaatgatgatgtgttacagttgccattattaaaataggttgaattgatgagccatactcactattgactttcttgcaactcaagtaactgtcaacagatggtagtgatgatctgttatgcaacagggaacaaatgataaagatctcttttcatgtgacctttaaaaacattagaaaaatttccttaaaatgcctttctgctttgaaaataattacatgaatatttaattttcctctcaatgaaagacgaaaaaacaaatagaaacagtagaagattttaaaataaaaacctgagtatgatagcattgacccatctactcattcattcattcatccatcaatccaattgagtgtcctctgctccaaaaactgtagtgtgctctgtggaacacaggcaagcagtgtggacaaattgctgttctcatggaacctatgatcttgtgggaaaaacacaatcaacagtaaaccctcaataattttctacaactctaacattctttaagtagaaagctacaaatatataccagtgtttattttatttctatttttttcctctattttactcagaagaaactggttttaggtgtcaaaaataacattttttgtatttggctattttgtgttatacttgattcataaataaattcaacaactaacttttctgttccaaaatctcccaagctctcttcctttagtttaagttgttactaatattttctctttggagttggagtaaagaataaggcccttagtctgtctgagatgctgtgcttaaaaattatgacgttacctggagagaacattttatcctaaacactggcttactcagtttactccatcaaatagggtgttgtccacctttcttcatttcttctcttactcaaccctttctctaaattgcatccattgatctcttccacatgtcaggattatgctttcaaaatgttcgttagatatttttcttaaagaaacacagcttcattcctcttccatgactcttttagattcattagaatgcagcatatttagtaaataattgcaaaactactttacagagcaatttccacaaggaattaatggtaatgtttgcatttgttgcttttaacaaaacaaagcagaaattgctggctaaatgtaactgtatactagatccattaaattgcttaatagtaagtgcaaataatttaatgaaaatgttatatatgttgtctcattttgctttataaaatgttttgttgtaaaagggagattagccattgacctgaattcatgatgtaactttcaaaagtgacacacatgaacaagttggggataatataagtagtaacagatttgtaaaaatgatggctatgaataaagttttagaaaaatgtattttgtatgtatttaaaaggttgtactttccttctttatagatccatacttcgtagacataaatgtccgctctgaaacattgaccaaatctgtggtctttaattcctgtatgtgaggtgtaaagttaagtcagtgcccttcaaatgtgttgttaactccaatatttcgttagcttttcatttttatagtttactaaaaacagttgtttgaatccctggaacaataattaaaccataatttttcttaattttaaaattattgttatggaattgtctgttgactagtgattgtctattgtttttcacttgttttttcagtaaaagaagccttgagccctataaaatttaacagatggggtctcccagaagtagatccagaaactatgcaaactagtgaagcatgggtatttgcaggtggtgatgtcgttggtttggctaacactacagtggaatcggtgaatgatggaaagcaagcttcttggtacattcacaaatacgtacaggtaggcatttgccatcatttccacttaattcttttccaatggataagtgcttcatttatttttgatactcatctataagagcatttctatttggtatataataagcatatatacaatatgtcacgtacatacttggatacaaattttaaaatgtagactaggtagtagaactgttgagttgattaaaaattgggccaggcgggcatgccacctaatgcctataatcccagcaattttggaggctgaagcgggaggatgcttgagcccggtgttcaagatcagcctgggcaacataggaatatcccatctctacaaaaaataaaaaattagatgggcatggtggcacacgcctgtggtacgagcttcttgggaggctgaggtgggaggatctcttgagctgaggaggtcaaggctgcagtaagccatgatcgtgccacttgcacttcaacctggacaacagagagagaccttgtctcaaaaaaaaaaaataagaaagaaaatttatcatgcattcctaccatttgagtactgtgaagtcattagtcctgatgtgttcaaaatatttattattggcttaaatacatagatcatacacttatcaaatctgatggtatacaatattataggacatatactagaatctacattaattataatcttacatactccaaaagatggtttgatctgttcatttggaccagataaggtcctgtctgttttccaaattctatgcacctaagtggaaaggaaacaaacatttgatgaatttcagttgtaatttttattttttaaattaaattaaatttaatttttttatattttttgagacaaagtctcgctctaatgcccaggctggagtgcagtggcacgatcttggctcactgcagcctccacctcctgggttcaagcaattcttatgcctcagcccctgagtagctgggactataggttcatgccaccacacccagctaatttttgtatttttagtagagatggggtttcactatgttggccaagctggtctcaaactcctggcctcaagtgatccgcccacctcagcctcccaaagtgctgggattacagacataagccaccgtgcccagccttcagttgtaatttttgaaaacaatttagtttttaacaatttaggatacagaatgtgaaatgatgagatgtgaagctgagcatactttgccacaacgactgtggtcttgaggaagaaaagtgtaactaccagatctcagtagcttactttccgactaaatgctttgttttctttttgttctgtgatttaattaaatgtagatacagttacctcatttatgtaaaatgttcctggaaaatttgctcttgttaataaaatttttattctttctttcctattcaaggaagagtgctcacactatgcctttttaccactcttgtttttaccactcttgttttggttctcttgtttgtttcccacatgctaacaaaattcactttatctttaatgcttcctttaatttcttcctcttttccatgaccattttgtctattctagttgtccttctcatgtttgtgtaactaatgcaggacctacttatttgctaggtagggcctggacttgacactgatagtatcatcttttaaaagtttgattcacctgcctacttccacctcctccttggcatctttgagtagtggggcttgagttgttgggccaaaccgtggtgtcccagaaatgtaggaatctcaaaatgaatgaggtaattgggagactgaggtgggaggattacttaagcccagaagttggaggctatagtgagctatgatcacaccactgcactctagcctgggtgacagagtgagacctcatctttaaacaacaacaacaacaacaaaacaacgagagagaaagagagagaaaggagcctgtggattttgcaaagagacaaagctttgattcaggaaatagcatctagggagatgccaaatctaaaattttaaaactttaaaaagttatacatcaaaagggactaggctaggcaaagaaagaaagaaagaaaaagaacacaatttaaacagagacagacactggaaaacccaaaggagacaagttggtgagtggttcaggctccagtctttgcagtgactgaaggatagatagcagcactatgctttaccaagtgtttattgcctcagacagaggaagcagcaaaggacagctatccactcagggagtggatggttccctactttgcctccttctgcatttcctgccccccaaactatcttcctgtttttattttctcattctactcttattttcagagtaatttcacagttttttttaataataacaaaggatttattatcatttgcagatgaaataaatgcaccatcccatacttgaaaggtttcartaagccttaacatttttcaggttgtaccaaggcactgccactgcctagttatattatgcacccatttctagagtaaaaaaactacacctccctcaacatcagttctgtactgtttctggtttatgataaacttccaaaacagcaaaaaattgcaaatatgtgcaaacactatggtccattcagagtactgcttagtcatcatcttcctcttcctcctcttcttcctcaaagctatcttcaaagccctcactgtcctcctggtcttcatccccctctattgctgtatcccactgtgggtgattttctggcacaggcttggcctcatgaacttccaacttcaatggtttaatctgatccaaacccatataggagtctgatctcagaaacacagtatactgataatttccaggcttgcctggtgcaggaaacttcagctctacttcctctgtatcttttagtgtacacacatgatatggcatggatattaatgtctgctccttcctatctgcaatgtaaagccaccaccattcttgtttttcctcaggaaagtaaaggctatacacaggatgtgttatttttgatttggtttccaatagagcgctctcttcttgctgtatgctttgtagtaattcttgccactctgcttcatcatctttgttttgtttttcatcttgctctctatcagagtctctgtcactaccatcatctttctcacttcaggaatctctattggtttcttcttcttcagaatcactgcccttatctgaaacttcttcttcatcttcctttactgcagcttcattcccaacaactccatttgccagcttttgtttctgttgctttgactgtggtaatagcacaggtgcaggtttttttttttaaaggtttctttttttttgatttagcagttttcttgggtcctttactcttctgttgccatcctcgttttgtcctgttcttgttagtttcaccctgcccatcttctgctggctgttcctctgcagcacagaaggactgctccttttcaaatacttcagccattgtttgccttgtcaacttaaccagcactgtaactaaggatcctactgtgatgttgttgctgtcttcatcatctaacacctgtgattttatattcatggtcacatatggaaaactcccaaggacagccataacctcttcatatttttcatcttcaaggaagtgcagtagagtatgacaatctgattctttaaactcaccaaatcctggatagtttaaattttatacttcttatgattagaaacctgtctaagattgtcctcttcaatgtaagggagctgcagaaggggagacttaaattgctgaagtccctgaacggccatctgagaaagcttcatgcagttttctagggatgccaaagttggagcacgaaattccctttcttcacggttcggggccattactattagttggcagtttttagtttcacagtttttaatcttacctcctgctgtgtaactctctaatctgtacctccaacagggcactctcttgcataatccagcagtccactgaatatcttcccttgtgtctctaatctacttttcatattcaccaaacatcttcatgtaaatgtctttcctacatttcagattcactgcttttaagtcaaacatttcttcccaacttgctccaactccagtatttaacattttttatttccaggttcaaacctactaagttagtggtcctcataaattactcagaataattaaaatttcaacattgatttggaaatcaatacaatgctgatggcttcttcttttacagaataacaatattagaacaaaggaaactgacatttatttatataaattaataggacactttatgaaaaagttaggaaaggctagagtctcagaataagagatacgctcaagaaagtacagttaaaagatttacattggtgcacatatacaacatgcacataattttttttcattataagacaaaacggtacatagctgtatttaccaactacttatctaagttttattcttctctcttttctatataactggtcaattcttattctatctcttaaaaactcttttatacccttattttattttatcttttgtgtggagttataattttgattgaccagaaatcttactgagcagcctgctagctcctttaagaaatgaaagtggaatcaagggataagagatgaggttcttgtgttagaccagatgaagcccagtgaatgtgtgaattcatagtgaaaatggtatgtgggcagagaagctaaaaagatttgaaaaagtaaaattgaacacaggtcagtggaggattttgttttttgttcttatcctaaatatttaaatccatttatagattttaaattaaaatgaataaacaatgcttaaatatatttatgattgtagtttggtggtgtttcacaatatcattctaaaggaatcttaatgttttttttttttctgttcatttcactgttgtcttgtaacttcctgaatctaataaatgtgtactggaaaaaaaaagaaattattttacttccatgtaatggcagataggaagtttgaatagaaatctgatgtgtagagaaaggagagaaacagacctttagctataatgaagaaaacatgcatgtgctttaaaaacacatattgctaggaatgatagtgtttgaaatataaaataaaggttgtgccatgtaagaattttggatttggttgaaggattcagacttgtcaaactaagtgttgaattacatgttaaaatggagtagagatggaaggtaggtaaaaatctctgtcaagtaaaatcaacatttccaccttcctgccagggtgttggatgcaaagtgctaagcagcgataaggctaacaaggtacatatagacaaagtgggatttttctctctccacattgtcattaacttagttctggcctctatcacctctcttgaaattgcctccactttctctcctgtcaaatccaatgcccctacactgcagccagagtcatctttctagattatcagttgaatcctaattagctcatttaaaacccttcaatgacttttactcacactcaaggtaaaggccaaacttcttagctttgagatgctgatttgaatgtccccaagcataccaagatttctcctgaatctgggcctttcccccacttcacccatttccctctggttgagtcccacttgtccttcaggattggctttctcctcctcgtccagggagtttgtgacatgaacttcctttgtgctccttgtttgaagcctgcttactggtctgtctctgcacaagctaggaaccatgtttatgtattgctgtaccctcaaaataaagtattcatctattacataggaaaaatatgcagaaatcatttatcttaaatacatttaaggaggagttaagaaaactaatgagtttgttatatgataagttcattagcatataatattgttttctcacaaatgtagcatttgttaaaaaaatttctgtaatgtctatagtatgtttcacaactaaggcttatgacattttgtcttatattttacattagtttgttttgggggaaaaggtaacattgaatagcttattttaaaatatgattttataaacagattatagtattaatgcatgcaattgggtgtttagaaattctttgtaatatgcattttcagataaatgtgattgtttgaagacatccatgttgggagaaagtggaggcaatttctctgaggagagcttcacttaaatttcatcagttaatttgctcaattaccacttattaagtaatagcctttgggcccacacttgacttcgggagggtaccacaatgcataaataagagcagtataatatagtggttataaatttgggctctctgaactacagagaagacatcagatccagttccaacactttccaatcatgttaccttggacaggttacttcagcactccagggtatagaagtgaataagcaattataaattattattattacttaaaataataattagagctgctatcttcttgggtcttgcagaagattatgaaagaaagtatggaaagctcttggtaaagactaagctttgtgaatatttgttgtgtataccattgttgtgggttattagaaatcattcaccttgtattgttaaaacgagatcaggaaaaagatggcaaataggaaatttgaatagaaatctgatgtatagagtcttaacagatgaatattgaaataggatattttaggtagttgcaaaagcattttatttagtcattaatttattcatccacatacatccatcaatctcatttatgcattaattaattcattcattcaaaagatgcattttaaaaagtagtggatataatagatagcaccaattattagatttaaatttgcaagtaagaatcctattgtctagtaaagaagtgagttgtgtaaatgtaagcccaatatagcatacttaacacaataataaaaagcatcaagttacaaaggtaacctggaagagacaatgactgattccatctggatgtgggtattaggatgtggaatcagcaaggacatcacaaacaacaagaaacaaaatttaaaaagaataagaaaaattagaataatactgggtaattagatttactgggatttaaagaaggctactggataagattttatatgttgctcactccatgaggggtacccagaccagggtacaagctggctgaaatccagaccaagctccactaatcaaacaataaaaccttttgttgttctgcttctatacagaggagggagtaccttcctcaaattttcataaagatgttctctgtttggtccataagttttgcactgtgcagcaactcctttttatttcaccaaaaagcatagggtggacaaatggaagctctgaatatagagattatataggaaaaatgagagagagaaagttcagtaattataccaggagtagaacatgatgagattgcctagctaggatttcaatttggagtaggtaatgtggtaggaattgttcatgtatagaaatgatatggtagtgtcagatctggtattaatgtgaagaaaagcgttttccagtttgtcagaaattcccttcttaagtgtcattctgttataatattaaatttacttttttagttacttctactaataattcaatatgacttcaccttaattgtttataatgtgatattagtggagtccaggcatatttattttcttctaccaaatgaataagaattactgaatacgaaagataattttgacagtgtacctaaagaaagaatttgtaactgaaagaatgactatagctaaatgaattccttaattagtttaattccttaatttctcttttcctatgaaaccaaaattaatactttgttggttaatcagaaaaagttaaaatgggaaactgtaaaaaggatatacacatacattaacctcatcattttattatttattacataagcagcacatgaccaaagcttataattttatttaaagcatatagatattttctcattttcctttttcttttaaaaaaatccagggccaagatgtttttaaataaaatagccagatgtgtattatgtatcttgcctaaatctatctataacatattgtctaccattttcatttttaaaagtggtacaagaccttcgagaatcatacaatgcaattttccagatttttatgtttgtcctgcagtcatttcagtggtttgaccaacacctaatttgacagcagtattttttaagtaactcatttttatcatatccttcaagaacattcaacttagttttcatagaatcaaccttctttctttttgcatccatataactaattaatgtttatttatttacatttatatccaacagaaacagggcgagaaacatacagctgactcttgataagtagacaactcaactaataaaagcagaaatttcgtaggtatacaggggtaccactggttataaagcatcagcattacttggccatcttttgtgtctcttagggaggaaaacaagggaaggaaatagtccagtaaatctgtcagatgcaaccaacttggttaagagagcatgtagaggacctcagtttcttcattacaaaagcaccaaatagagactgaattaatatccaatgttactaatttataaaaacacatggtgatattgtgaaattttcatctttaccctgtttcctggcatacaactcctaaaatctttggaatctccaaagtgatgagtatgtgtgtgtgtgtgtatgctaatgagttgactgatggctgacagcccataggtaactacaggataggggctagtcaccagaaggactgaggcaggactaggattgggactttcagccctgctccccaacctccggggagagtcaaggggctgaaggttaagttgattgacagtggccaatgatctaatcagtcatgcctatgtaatgaactttccataaaaactcaaatggactaggttctgagaacttgccaatagacaaatatgggtgacgggggtgcttccaggaaagtaaactagaacgcttccgtgtgccaagaaggtggcacaccccagctccacagggacagaagcttctgctctgggggccctttcagaccttgccctatgtgtctcttcatctgactgttgtgtttgtatcctttaaaatactctttgtaataaactagtaaaagtttggtttttgttttgttttgttttgttttgttttgtttgttccctgccccgccgccacccccaccccccaccccccaccccgggttctgtaagctgctctaaccagttaatctaacccgaagaaggggttgtgggaatcccagtttatagctggttggtcagaagcacaggtaaaataacctggggcttgttattggcatttgaagtggtagggggcagttttggggaatgagctctcaacctgtaggaactggtgctatcatcaggtagatagtgtcagaattgagctgaattagaagacattcagcttgtgtccactacagaattgattgcttgcttgcttgctggtggggagcagttcgcacacacctggtgtcagaagcgtgttgtgagattttagtggagaaactgagtttgttttatccactcacacagcattcagaaggcggagcacttactttgttctagtattagcatatagacagatttggttgcaaaaagtggagagaaaaaggctatatggatatctcatcatgttttgtcctgccactgagaaaaaacttggagatagaacacaaactaaattattctaaattataatcccagatcagaagctcattgtcccttcagtagtcatggtagtcctgagaaggagctcttataaacatggaacattttgtcaaataatgttgatctttatagaaattat

SEQ ID NO: 96515 - DNA, 13265 bp, Homo sapiens
  misc_feature (1)...(13265): n = A,T,C or G
ggagaataaggccatctgtcccggtggaatgtaggggcagctggtgtggtttccctcgagatcttgtacaagaacagctgcacccacctccaacacctgcacacactggggcctctgtccccaacacatcagccatgcaccgagcccctgctccaagcatactctagaaaacagagcaaaggtggtcacttgccatatcttttttccagggcaacccagatgacacttaatatgagcctctgcctgacttgccatctggctgtcctttccagagccctacttttaacacacagacagtcagagcttgagtctgacctgctggggctgtctggctgtccagtgtagaacaagggcaggagagcctgtgttttagtcacaacctgcccaacctgagcaaacctgccccagattacggaggtgtgcagcaacactaccgatggctgttgatctaagtttttcatttctggtttattttgttgtatgtaacccgtcctgattcggtttcctgcctgggcccctaggcccgttccctactcctgagtcccagagcgtggggggtaaactgccagggccagccttcccctttctggacctcatgcttcctcatctgcaaaataacggcccaggacgagcccctcatcaggttccctcccagccgtgggaacccgtgacctctcctgagtgactcagcttctgtctctcgagctgcgcttttccgtcagggcctgtggcttgggattctcctttgaaaggtcagtgcctgcttgggggtgggggcgggccagcactcactgtttgcttccccaggccagctggaggtgatcttggaccggcggctgatgcaggatgacaaccggggcctaggccaagggctcaaggacaacaagagaacctgcaaccgtttccgcctcctgctagagcggcgaaccgtgggcagtgaggtaacatctggggctgacgcccagggagccaggtctggctagtccctgggggtggccggggggtccagcctagggctcgaggagcgtagttggaggtgggcaagagagagagagtagggctgaattcctggggtggggggaggcagtctggcgttttgtgtcccatctcacgcagcctggcaccttcctctcccagcagcgctctgtcacctgtgcccctcatgttcgtctcccactttcctctgtgctgccctcctctgccctgtcccagcattctctaagcctgtgctccaaccccgctcatctcatggctttctttgccccaccagcctgactttttctccaaactggcagccatgtttaggggcttgatctttcacagcagcaggagcggtaaccgagaggtaagggtcggctctgggagcggggaactagtacgagcaaggtgtagctgcgccagagcccaggtgacagagcccgccactcagtcactcgtgcatcagatagatattgagcacctgctttactgtgaggacccagagggacataagtgcagacagtgctgactctcccaggagtttactcgtgagtaggggtggcagagaagccatgtgtgtaaaaatgcaaggtagaaagggctttgtctcactgatcctgaggagcaaggtaataatgtgggctaaggagatcgaggtcaaggaggtgtcacccaggtgtggctttgatgaatggggtgtgatttgaagatatgaaccagggcacaggataggaggcaggaaagacaacaggctggggaacagcagtgagttccttagttatgctggagctatgctatccagtacggtggccagtagccctatatggctatttaaattacaactaaatcaagtaaaaaatttgctttcttattcctactgaccacacttcaagtactcaagtggctaagtggctgccgtattagaccatgtggtgtcggatatttccatccttgcagaatgccctcttggctggtgctgggctagagtgctagggggagatcagggcagacggcagagcaccttgagtgcctgctaagggatctggactttatcctggctaggaaaggtccaggctaaggaaagagctgagcaaggagggacaccgtcagaactctggtctcagcatgtcacgctgacagtacggagcaggttggatctgtgggaagggagactggaggagggtgacagcgggaggctgttcaggcaggacatgctggctgcttgaactaggccagaggctggagaagttgccggtggctatgaggacactgcccaggtgcgacggaagagggtttagcattacctgggaatgcagagggaagtgagagatgctgggcgcttggaagaagggggatgccagggacagaagtccagaatattcagcccaggcctgtgagtctgacgtccaggtgagctgctaaggagtagccctgctggcagagccccggccgcgctgggcctgagagccaggctggcactgtggatgtggcatcgctcgtgaagccgcagattacccagagcactctggattggaggtccgtgctccatggtgaggcctgcgtctgcctggctgccatcctccctgcactgtggatccatgtgtgaggggagacatggctgatgggagtgggttgctcatgatagtgttatgtgagcaaggaactaaaaagtagagaagaaacagcttagtgaagtagccctctgcgttaggggagacggcaaatgtccacacttgaagggttagcggaacctcgcctggagccaggcgtgcccttgagtccaggcacaccaggaaaggtctttccaaaacaactgacctgggtgtgcttttatcctgcctcgtcctctcccctcagcctggctttggtccctcaccaatatctcgggtcaattttgcaggtccaagatagccactctaccagctacccatccctcctcagccacctgacctccatgtacctgaacgccccggcgctcgctctgcctgtagccaggatgcagctcccaggccctggtctgcgctcatttcatcctctggcttcctcactgccctgtgacttccacctgctcaacctacgtacgctccaggctgaggtgagtgtccctcagcgtgacatgctgagagcagagttctgatggtgtccctccctgctcagctccttccttagcctccaggatgaggtccagaccccttagcaggtattcggctccaaacctccaggaccaggttttggcctttccttacccacacgcctccctgtgccagcactgcctctgggcagaggcgctgctgcatctccgatctctgaaagccctgcgcccacttccctgggcactgtctgtcatccaggaggacaccctaccctcggcggagaccgcactcatcttacaccgcaagggttttgactgcggcctggaggccaagaacttgggcttcaactgcaccacaagccaaggcaaggtgagtagggtggggaaacagagcacctaggaatggcaggcatgagcttggtaagactgggctgagattcggtgacaggctgggagaagaaagtgtcactccagggctttctggagagaaggggggaagctgtagacatgttttcagagctccggaggcctggcagggggagttccagacaaggtagatcgcttgagaacttttgttccctgagcagggacctctatcaagcaaagtggaaaacaccagaaatagaaaaccagaacccatcctgttgttactttgtaagctcatatcagccggcactgataaatgtccccgggtgccaggtcctctgctgggctccagtgtttcagaagtgaaccaagacatggtcactgttttcacagagctcacagctcagtggaacggttcttacccggagatctgtaggcaggctttagggttgagcaaatctcagcaagcccgtgagactggatgcacactcatgtgtaagaaggcatggtgttgctgagaggggccagccggaactggagtgcagtggcgtgatcgcagctcactgcaacccccgcctcctggttcaagtgatcctcctgcctcagcctcccgagtagctgggattacaggcgcctgcccccacgcccagctaatttttatattgttagtagagacggggtttcgccatgttggccaggctggtctcgaactcctgacctcaggtgatccacccgccttggcctcccaaagtgctgggattacaggtgtgagccactgcccctggctgagattcttaaagaggtaccaaattgtagatgaacagccacattctttagtgtctcggcacctagcacaaccctgccccttctctgctctccacaggtagccctgggcagccttttccatggcctggatgtggtattccttcagccaacctccttgacgttactgtaccctctggcctccccgtccaacagcactgacgtctatttggagcccatggagattgctacctttcgcctccgcttgggttagggcttcttgtggcctgaagagaaagttcattcacagagactgcctcttaacatgaagatcattggacaagccacacgggtatcccatcccgatctgcctcccagaactgtgacacactgggctctgccctcattttctgtttattgctgctgctgtgttttcggcgcaacccacaaacccagtgatgggtaaatagggcagacgccagtgagatcagggagagaaggcccttggtcagagtgggcagtgccaggctctgctttgggttgtgagtggacacccaactgggcacaggctcaggcacccatcctttttccaaacagggatatagaagtggtggaagcagacagaagaggtaagggaggctaagtgggtaacagcccagcatcagggtcactgtggcaacagcaggctctaggggaatcctgtggttatgtagagactccatgtcctggtgtgatgagcaggatcagagtgactctgggaggacaggggtggggacccagagttagcagtggggatggagcagtagaaggaatcactgtttctcctaggagtctgaaggcctcgctgctttctgtgatggctttgcagtaagtgccgcctggcctgcatgcattggctaacaggctgcagaatggcaggaaggactcgctagagattgtcatggccagagatcataggtcacttcaggtagcaagacccctggcaaactgggcacttggcctatgtactgatttgtgggatggtggcaggggtgtggggtccttcaccctgcctgaattctctttggcttctgtgctctgtatgctgctgtccccaagagctctttcttattatggcagggagtggggattggtcctactttctttctctggaaaggaaagcctccaagactccatgtgcttgggcagcttgagaaggcgttcagcaccacgcctagcaggcagaccttgaagcctcacctttagtctatctgcagaggtattcagttcctggcacaggggactaggggcatgtagagtatatgaggaggcagtatggctgtgcaggagccttcatttcagcttcaattaatagggaagaatttatgatagctctatagatgctgaaaaggtatttcgtaagatttaaaatccatcccttattaaaactcttagtaaattaagtctggaaagaaacaccctaatctagataaaggtctgtttcagaaaccaacagtgatggcattctaaagagtcagacgccacaggcattcccattaaagtcagaaactagccaagggcaagctattattcagcagtgtcccggcactactaacccctgcaacaagccagatgaggaacataaggaagaattataattgtcattatttgtagacaataaaactgcctacctgtaaaacctaagaatcaactgaagacctgttaagagtattctgtaagtcaacccaatgatacacatcatgttcctgtccacatactggttttccccaaatcagctgataaattcagtgtaattccaatgagattgaaactttggaattgacagttctaaagtgcatttgggagagtgaatgtgtgagaacactaagaccactctgaacgatgataatgagttggggggtggactgctcgggggtgatcctgccagattcccagaggattctcacsccaccattacctcactcagtgtgacctggagggggtcagacagacgggagagtccagaaacagacccagggctacaggaatttagtatatggtaagagggatgttttaagtggggaaaaaggtggattatttaataaacagyacttttagacaactagctatcaaagctagatctcagctgggtgcgatggctcacgcctgtaatcccggcactttgggaggccaaggtgggtggatcacttgaggtcaggagttcgagaccagcctggccaagatggcgaaacsctgtgtctactaaaaatacaaaaactagccaggaatggtggcrcgcgcctgtaatcccagttacttaggaggctgaggcaggagaatcacatcaacctgggaggcggaggttgcagtgagcttagatcatgccaccatgccactgcactccagcctgggtgacacagccaaaaaaaaaaccactaagttagatctctacctcacagtgtccatacaaattagttccagagggaagatataccacaaaaytactcaaaaatttttatacctctggtgtgggacggtcttttctaaactttaacatgagacttaaaagatataataagggaaaagataagcagatttcrcaaccaaaaaatatcgaaagtctctgtgtgatggaaaacatcaaggttaaaacacaaatgacagatatggaagaaaatatttgcagcacataaaaaaatcaacgagtacaattactttaggagaaaagcttgcttcagggtccttagagaaagtcactggggcctgccaagctgccacctaaagacaagagtgagagggctgagttcttccaggtcatcagagttgttgctgcccgtattaggccacacagtggaaccccatttatatcatagcagaagaaataggattatcaatgtgaactgcttagcatggtgcctggtatataygagagctccacaaatgtgagctataatcctactagtaaaggatgctaagcagttccactgtggcaggtgtcatttgctagtagaatttgtaatcaaacaataggaggggaatctgtgaacgcctagaaaatgagcagaataaaggatattatctttggaagtcttagatgtgcaatgaaattatttgtctgacagaaacgaatgctgaattctatttacttaagcctttaaaatgacttaaggcagtccgggcacggtggctcatgactgtaatcccagcaccttgggaggccaaggtgggtggaccacctgagctcaggagttggagaccagcctggacaacatggcgaaaccccatctctaccaaaaaaatacaaaaatgagccgggcgtggtggtgtgtgcctgtaatcccagctactcggtaggctgaggcaggagaatcacttgaacctaggaggcagaggttgctgtgagccaagattgcgccattgtactccagcctgggtgacagagcgagactctgtctcaaaaacaaaaaaacaaaaaaaaaaaacataaaatgacttaaggcagcatggctcaaggtgtgattcagaatcaccagaactgccattgaaagtacaggtttctgttctgactagggcttcttcagcctggaggctgcagtgcagatgcgtagggcagagccacagctgccctgagactgctgtgtcataggagataggagcaagaaacaaaagctgacttcagtgcacagggggataaaggcagattcctgggtacaacctttgaactggtttctgggagtagaggccaaataatttgcatttttaacaagctcccaggtgattcttgtgcatgcataatttggaaatggcccaacttttaaagcaagcagcaaccctttaccacagagctgtggtactgaggcctcacggtttgtttgtttgttttttttttttttgagacagagtcttgccttgttgcccaggatagagtgcagtggcacaatctcggctcactgcaacctccgcctcctgggttcaagcaattctcatgcctcagcctcccaagtagctgggactataggcgtgcaccaccatgcctggctaatttttgtatttttagtagagacaggttttcaccatgttggccagactggtcttgaactcctgacctcaagtgatccgcctgtctcggcctcccaaagtgctgggattacaggcgtgagccactgcgcccggccagcctcacagttctgagggttaccatcaaaatgaaccaggacatgacagaagccatttcaaccactggagacggatcggattctattcctacatttacttggaaccatccagctttcatgaagaaggaagggctgtatggccagttggaaccacagagagaaaggctccagttgaaccacttaagagctggtcctcccatgcagggcgagccagcccagacagtgtcctcatatggcttgcctcagggtaggtaaaacataaaacctcgaccacttgtgcagagagagcagcatctttaatttgacctgaacctgacttgcttaccttgctctgtcactggggcatctgtgcactcacggagggggaaaatcagtctaggatggtgggaatgaggcttaccatccacaatagagatctctgaacaaaatctttgttcttccctaacaaaaaagtgtgtgaaggacaaacacttcaagggctcattctcattctcattctcatagtgagaagagataagacagagaccagatccttcgcaacaaccctcaattttacttagggtcagtgagaaatcaattcagatggtaacagtacccaggaccagctgggtctgcagttggctcctgactcctgacattctggctcctgactttggacctccctagttgagaataaacctgaactaaaaatccatgtagttaggtagtctgggcacaggaaaccaaagtggggttggagatgcggactctgtcattctgaatgtgacagagttgaagatttgagacacagcattgagtgtggagacctagagaaggcccctcagtggagtaggaaggactggggtttcccagtcagcatgcctcccgcaagtttgaatatttgtgtccctctcaaattcatactgaaacttaacctccaatgcagcatattaagaggtggggcctttagaaggtgattaggtcatgagagcttctccctcgtgaataggattaaggccctaatgaaagaggcttcacacagcctgccttttttactgtgtgaggatgcagtgaccaccttggaagcaaaaagcagccctcgctagacaccgaacctgccagcaccttcatcttggacttcctgcttctagaactgtgagaaaacgaatttctgttctttataaattacccagtctcaggtatttttgtcataacagcacagactaacatacctagagacttgcattccaactagaggcgcaagcacacctataattctgccctctcaactcctaatgccagagattgctaaataaatactaaaaatgtaaaaacaggccgggcacagcccagcactttgggaggccgaggcaggcagatcacctgaggtcaggagttccagaccagccagaccaccatggcgaaaccccatctctactaaaaaatacaaaaattagccgggtgtggtggtgggcgcctgtaatcccagctacttgggaggctgaggcacgagaatcacttgaacccaggaggcagaggttgcagtgagctgagatcttgccattgcactccagcctgggcaacagagcaagactccatctcaaaaaaaaaaaaaaaaaaaaaaaagaaagcaaaaactgtcaaactcaaaataaaggaaatcttctttgacaaagaatggagagaataatacagccattagcagaggctgaggctatacagcttgagagaagtagagactagttcaggatggtaggtgctgggacttcaaagtccacgtgggacaggtaaccaagtgtaacctaggaacgtcaagggaccagaaccagactctgagaggtacacaggcaggaaaaatgtaagttgcaaacaaaaacaggatgacatgcaagcaatctaaaaaaatactttaaaaaatatatatgtgcaatcaccaaagagctaaagatattcagtcttgcaatgagaaactgactgaaaagaagcaaataagattttacaaattatacatgctggaaatgtaaaaatacaattattgaaatatactctatgtatggtataagccctagactggaggcagatgacataaaaatttagcaggtctggaaaacaactgaggaatcacccagaatgcaccacagtgataaaagaaatataaaaaagaagctaagacagatggaggatagactgagaagctttggcataatgtttcatagcagttttagaaaaaaagactagtgagaatacagggatgagaaaacaaagacggtgaatttttcagaactgaagaaagatgtgagatctcagaatcaaagagctcattaagttccaagaaaggtacatttaaaaaaaaaggccaggccgggtgcggtggctcatgcctgtaatcccagcactttgggaggccgaggcgggtggaacatgaggtcaggagatcgagaccatcctggctaacatggtgagatcccgtcactactaaaaaaatacaaaaaaattagctgggccaggtggcaggcgcctgtagtcccagctactcaggaggctgaggcaggagaatggcgagaacccaggaggcagaggttgcagtgagccgagatcgcaccactgcactccagcctgggtgacagagcaagactccatctcaaaaaaaatagatagctgggcgcggtggctcacccctgtaatcccagcactttgggaggccgaggcgggcggatcatggggtcaggagatcgagaccatcctggctaacatggtgaaaccttgtctctactaaaagtacaaaaaattagccgggcatggtggcgggcgcctgtagtctcagctacttgggaggctgaggcaggagaatggcatgaacccggaggcagaggttttagtgagccgagatcgcgccactgcactccagcctgggcgacagagtgagactccgtctcaaaacaacaacaacaacaacaaacaaacaaataaataaataaacaggccaggtgcagtggctcatgtctataatcccagtactttgggaggccaacgtgggcagatcacttgaggtcaggagtttgagactagcctggccaacgtggtgaaaccctgtctctactaaaaatacaaaaaaacccaaaaaccagaaaaatcaaaatgtagcggggcatgctggtgtgtgcctatagcctgtaatcccagctacttggaaggctgaggcagaagaatcgcttgaacctgggagatggaggttgcaaatagccaagatcatgccactgcacttcatcctgagcgacagagcacgactccgtctcaaaaaaattaaaacaatttaaaaaacctcgtgtagatatattgcaaattacgtaagataaaacctaaaggccaggcacggtggctcacgcctgtaattccagcactttgggaggccaaggtgggtggatcacctgaggtcaggagtttgagatcggcctggcccacatggcaaaaccctgtctgtactaaaaatacaaaaattagctgggctggtggcatgcgcctgtagtcaaagctactcaggaggctgaggcagaagaatagcttaaaccagggaggtggaggttgcagttagctgagatcatgccactgcactccagccttggcaatagagtgagtgggattcactctcaaaagagaaaggcaaatataagaacttattgagaaactgcaggaatgaatataacctgttgtacaaccatggtttaactgtagatttttagcctagcttttttttttttttttttttttttgagacggagtctagctctgtcgcccaagctggagtgcagtggcgtgatctcggctcactgcaacctctgcctcccaggttcaagtgattctcctgcctcagcctcccaagtagctgggactaaaggcgcccgccaccacgcctggctaattttttgtagttttagtagagacagggtttcaccgtgttagccaggatggtcttgatctcctgacctcatgatccacccgcctcggcctcccaaagtgttgggattacaggcgtgagccaccacactggcctttttttttttttttttttttgagacggagtcttgctctgtctcccaggctggagtgcagtggcatgaccttggctcactgcaacctccgcctcctgggttcaagtgattctcctgcctcagcctcccgagtagctgggactacaggtgcccgccaccatgcccgggtaattaannnnnnnnnnnnnnnnnnnnnnnnnnnnnnnnnnnnnnnnnnnnnnnnnnnnnnnnnnnnnnnnnnnnnnnnnnnnnnnnnnnnnnnnnnnnnnnnnnnnnnnnnnnnnnnnnnnnnnnnnnnnnnnnnnnnnnnnnnnnnnnnnnnnnnnnnnnnnnnnnnnnnnnnnnnnnnnnnnnnnnnnnnnnnnnnnnntgtgtgtatatatatatatttgttttttttttaagaaactcaaaaaattagccaggtgcagtggtgagcagctgtagtcccagctacttaggaggctgaggcaggaggattgcttgagcccaagagttcaagctgcagtgagctatgatcaggccactgcactccagcttgggcaacagagcaagaccccatctctaaaattgagaaagaaaaaaaaatccaggtgctgtagctcatgcatgtaatcccagcactttgggaggccaaggcaggcggataacttgaggtcaggagtttgagaccagcctggccagcatggtgaaaccctgtctctactagaaatacaaaaattagccgggcgtggtggcacacatctgtaatcccagctactagggaggctgtggcataagaatcgcttgaacccaggaggcagaggttgcagtgagccgagattgcgccactgtactccagcctgggtgacagagcgagaatccatcttaaaaaaaaaaaaaggc

SEQ ID NO: 96516 - DNA, 14176 bp, Homo sapiens
ccctccagaaccagagtctctggggtgggccctctgcttgtctagcagcctccaggggacacttgtgcctgccagagcaagtctaataagcactgctgtaaacccctcgtccccacagccttctggttcgtctcccttttcctgctgggatctgcatcaggattaaatgccaacatcagggatcaggttatacttgtgaaccctgagacaatacctgcatctttttttttcttgaggctgtcttgctcgctctgtcatccaggctgaagtacaatggtgtgatatccactcatggcaacctccacctccagggttcaagcaattctcctgtctcagcctcctgagtagctgggactacaggctcacaccaccacacctggctaatttttgtatttttagtagagatggagtttcaccatgttggccaggctggtctcgaactcctggcctcaagcgatccgcccgcctcagcctcccaaagtgctgggactacaggcgtgagccactgcgcccggcctgatacctatatcttgaccaagctgctgtggaaacattgagttccccttgatagttttgtccacagagtgaatgtttaggaaccggcgaggcatctctcacccccacccagatggcggcctggaggcagcgtttctgaccctgtgatgggatttgtctctcttgtccaagagactttagagatgtggcccctgaatgtgggggcccctgttggggtgggaacgggagctggccctggccattgtccagtgaccccatctcagtgcctcgatcctagcaccctcgatctcagcgcctccccttccccggctccgcgcggagatcacgtggcttgcgctgagcaatcctccactgcccccgtcgcgttcctgctgcagggaagcctttccagggagccagctgacacatttggcctccattatttgtttttgaacaggaatgaaaggagagagtgagtaagaaagtggcaggaggtgggggttgcagagtaggggaaggtcagagagaggggaggaaagatctggaaagtccaggcatgtgctctggaagcaggtgccagcgatgagctcatctggagggtggccgcccgccctgagccctgcctggggccagcagggaacactctgccagggcatgtcgctgggagcctgtccttggctcactttctgctgctttgagcgctgagcagatttgtttccattttagggacaacgcaaggaggctgtcattccacccctcaccttattaatatttcatgaatcataagtgaccacttactgcgtcctgacgtactccaggcgctgggctcgaagctttatgcgcttcatgggatgtatctgcactatcgccgtagaaaacggttcctgttactactgcagagaagaaggcaccgaggcacagagaggttgaggaactggcctcaggccacacagctagaagcggctgaccctggctgtgaacacagggctgcttgactccaaagcctgagctggtttgcagcgaggctcatggtttctgtgccactgtttgagcctctggtcgagccccttggctcagtggggggcccagtgacctaccagctgttccattatatgttgtggacacctccacggcccacctgggtgggagggaaggggcttcaggaggtgggaggggtacagggaacacagtccagcctgcttgggcccaataccttgaccttcaaggtaccccttgagggtagcatgaggctaagctcttgttctcctccaggactctgttcctgtgagggcctcggggtcccttgcttttttctgggggccttgctggtcaggatcacagagaagctctttgctgttgatctttctgcctctgtatcttttggcaagccattttatgactcagttgctttgtctgtaaaatgggttgaataacattgtcctgcctcggagggtttttgggaggatcaaatgagacctgttgcacagaagccctttgtaagccatgctgactggcggtcgccgggcccccaagtgaatgggcatccgggcactgagtgtgtggactcagtactcggaaggaggggctggggggtacctagaactcctgggaggcttggacccctgctctgctcagattctgagcttctccttggccagtttaattcccatcagtagggtgagggtaaccaggacttacgcatagttgggcgaagtcgagtgaccacatgtggaagtctagcgtccttcatgcaaagtgggcaggcggccaaagtgagctctgctccagtccccccacccccggggctgttcctggcgccctgccctcccccagagccccactgacctgcaccatgtgacccgggcctgggaagatgggcccagctgtgggaggtcgtgcgggctggggactgagagtgccggaggagggcctcccaggaaaacccagctgcacaggaagccgggccagcggcctccggaagcctctgggctttgcaagctggactccccagatctgtggctgtggggccctctcctgcctgcagctgagagcccttgacccgcacctgagggcttcagaggtccgggagggggatgtgaccgtgtccccagggtgaagcccacccgagtgtcactctggatacagccctcacctcttcctggccccctctctggtcatggggacgctgcctggggggggttcccttacatggaaggagctgcagctgagctggcgggcctcgcacacccccaaggccgcctgacttccagcctccaagtggggttgcattcaccactcaggacctggagcctcagccagagagggaccctccactgcctctttctctgtctcttgggaaaggtagggtctttgtgccccctcccacccagggacctggcatgttgggaggctaagaggaagctgccccccgctcatctaccccccaaccctcccagccagcagagttttacctgtgtgcttagaatctgtgcgtggagccagaagtcacaaggttggcccagctgtgtctgaccctggttgtgcggtcttggacagtcccagccctcctggagctgagcatcctgatctgtagaggagaggctgctgtgccggccccgcagggccctgtgcagaggggagtgtgtgcggctgtgagttcaggccatgccctcagacaggaggataggatcggaacagtgggtcaggatggccagagggtcccagcctcaggaggaggcctccacacctcccagcacctccacaccaggaaatgcagccaggcccccaggcctcccatgtcaggaagcagcaccccgccccccacctctggttgcctgggcctgagaagttgagcactcctcccgaatccgagtgccctctgacccctgcttgggtagttgtccctcctgaactgaccgcctgtcctacacagtcccctgtggtttgcccgacagggtggccagcgagtcccctgcacagcacacctcccccaggagtgctgcctgtgatgatggtgtaaagggtgcccccccgagcccccggaggcatgcagtggcgcaacagcgtgagcccaggagccccggtgagctcctggatggagaatctgttcagatcactccccagcctaaaccttccctgggtgtctgctgtgcttggggcgctgactcatcgtggggcggcctgtgagaccctacgtcacctggccactcccctcagcccctgttcactgcaccggtcccctggcctggctgctcctggaacatgagggctcatcctcacggaagaatattcacttgttccctcctggaaagtccctccctagacctcctggccgcctcattcaggtcttgctgaagcgctgccatcttggagaggcctccctgtcacccgcagttaaaacagccctcccatgcctgtgggtggctttctatggggcatggatgagtattggagagtcttgccgtttatttgttcatatgccctctgggagggcaggggacactgacttgtgttgtgggtgccttgcatgtcacgggtgctcagtgaatgcctgttaagcattaggggagcacaaaggagggaagcctctgtccaactggagcagtcagggaagacttcctggaggaagtggtatctggtctgcttagaatgtggcgatttgtctgtatgcagacattagattagagggcaaaggccattatcataacttagcagacagctacaagcagctaaggaattgctatgacatggactgctcgtgattggagctaagaaggagtcagagacagaggtccctgtgctctggcgtgagtccttgggggaggctgagctcccagaatgtggggccgcctgtgcagaggccggaggtgggagacacacctgtgagtgccggtgagtgtggggtgagccactggggctggatcagaagatgggaatccctaaacccaccaaccagccttggtgccctgggagtgacaggagacggggcttctgggggactaacccagcacaagtggacgagatgggatgcaggggaaaggacaaagctctctgaggctttgggaagctgagttagggtagagccatgacagggtgagttccagaagcaacacaagaaaaaatagctagactgggttttcccttcactgtgggagatgccccacctcacttcccccgtcctccgggctctggcaatgggctgggcacagtgaatgggttccatctgcaggagtggtcacaccccttgggcacagctgcctcatacactgtattgagatgggatccgaggccgggaagaacagcttcttctgtaggttgacattgtcagccttcggggagggaaggacggcagggggcctggagcatctccttttgccatccacactctgtgcctgcctgcagggtcttgagccctgtctgttctgcctcagtcctggtcaggaacttgttggagcccataggggcagtcaggctggaacaggaggagaccaggccggcaggggagccgagagggggccctggacagcacccagggctgagtcatcctgggcctgcccgacttgctatttggagctgttcccgcttgctcatcatgtgcaaggtcctgatccactcgggtctgtttaaccagcgcccctccccaggcccagttagcctggttttcgttcgattcatttattgtcatcagtgccatccttgcaccacgtaactagcctttgcagcatgccagccaccaagctcagggccctctgtgcatctcctgtaaccctcacagcaacccgggaggcacagagaggctgagtcgctggcccatagtcacacagcaggtatggggcattgccaggatttagccggatctctgactccagggcctttccagggccttgggtgggacactggcaaggaagcaaggtatgaacactggccctgccttggacagagctcggggacggtggcctggcaggcccagctgacacagtgaccctggtgcaggttcaaccattggcaaagtgttcaagtacacacagaatctcaactggggagacaggcgaagcggtcaagggagggctgtgagtgacaggtggacactgtacctactggcagatcagctgaccttggtgccttctggagcctttcaacttccttatccagaaaaagaggaactaacagttccacccccaaactgggtgggagtaccacattcgaaattgaagcaaagctggtcgtgtcacaggctcggcagatgttagctgtgcaggcaacttagtgaccatttgaagtaggctgtgcggcggcatcctcatcttgcagatgtagtccagagaggttagggcactaaccctgggtcacacagcgacagctcaggctacagagagcagtgctggatgggagggtgttggcagcttcaggcacaggctgggagggctgtggggtcagcagagggagggcacacttcccagctggtggggttcccttgtgcctcagtactcatgtgggcccaaaggagctggaaggagggaggttagagccacccatgggttcagaagctgataagcaggttattgactctgaatttgcctcatcgtatgtaaattggggacaaatttggggatttaatgatataatgtaagaagcagacatgtcacagccctggttatacagtcagtgtataataagtggtaagccstcagaggaggcagccggtgagaatgggagcatctcagcagccctccgccccctgctcctggttgcagatgtacctgttcttggctatttgtgccccagctccgtgtcctccggtgtgtgtgaggccargctcctggggtggggacttgggggtgtgtctgcagctcctgaggccaagaccaaggctgaggccgaggctgaggctgaggccaccttggtgaggaggaaattgcaggtggagaagctcgttgacygtgaccttgatctgaccgtaattttgatggtgccgatgccgtsagcacgcaggcctcctgccctcgccacgactggctcctgcagcccacctggctgagaggtgtgctggctctcgcaggttgcraaatggggacatcaccgtccgcctgggctacagcgtgctcgccgattgcatttggggagggactgagggctgattgtgttgtggggatgttggcagagaatcagagagggcatccaaaaaggccaacagttcggtggggagaggaggcgcaaggctggttcctgttttctgggctttgatcgaaagggaacaggggacacatctggggacagtctcyttcctggaggaagaagggcttagggtgctggtgtggagtttgcacagatggggataatgagctggagggtgctgggcaggagctggccagtaataggctgacgagggaggccctgctggctgggcctggttttcaagtgagcatcctgagctgcggggacccagggggtcttagagacctcagagctgagactcgggaccacagaggggtgggctgtgctcagggcaacacagcggatggggcagatgttgcgaaacctgtctctctgcctctctttctcctgctacagaactggatcctcccagctcatggctgtcaaatcctttagatgcttctgggttccatgggcgccttacactggcttccctgtaggacagcagaccctgggggttggctctgatggtattcaccatggggtaccccatgcaagcacagtgctttcacgcccagcctcccagcctgtggagtaggcctgtgtctggccagcctcactttgtggccagaggagggagacagtggttctggagacaggagctggcctggggctgccctcccagcccctgttctcccagctcatctccttgccttgcgggtgctggccaccctccccccgccagctccatccccagctttctctgcccgagccgtgacctgtcagtagggggcagtggaggccttgaaagtccttggagaggactttgaagcagtttttacaaatctgtccctggaaagtctctcctgtcacacccccagcggctccctccctcctaacatttttcctggggttgtcatgcagcggggggtggaggaacccactaggccgtggatagagcagagccatgttgacacaaaccctggctgaacccacatgctccctacagccagcggccgatcactggaaccagggaagtgacctcatagcaagggcccgcagagcagccatcacgcattcccgatcttggtttctggacccagctctggaaaagaagccagatcctagccacttggagctgcctagggaagaccccagcctggtgccggctgacagctcactggaacttttcatctgcttggccaggtgatgccaaggggcagaggttagaagtgctaagaagcaggccgagggtggtggctcacgcatgtaatcccaacactttgggaggccaaggcgggtgratcccttaaggtcaggagttcaagaccaggctggtcaacatggcgaaaccccatctctactgaaaatacaaaaattagccaggtatggtggtgcacgcttgtaatcccagctactctggaggctgaggcaggagaatctcttgaacccgggaggcagaggttgcagtgagccgagactgtgctactgcactccagcctgggcaacagagcaatactccgtatcaaaaaaaaaaaaaagaagaagaacaagaagtgctaagaagcatctgtcttcctgattgaaaagcaatctttgctgggcgtggtggctcacgcctgtaatcccagctttgggaggctgcggtgggagagtcgcttgaggccaggcgttcgagaccagtctgggcaacagaggtgctaggggtagtggcgcttgcctgtagtcccagctcctcaggaggctcaggtaggaggattgcttgagttaggagtttgaggctgcagtgagctatgaccacaccactgtactccagctcctgggtgacaggatgagaccctgtctcaaaaaacaaaacacaaacaaaaaaccaacgtttatcttttgtgattttaaaaatcacacctacttgtgacaaaataattaaattagaaaatgtaaaggaaatgatcaataataattgcgtcctccagacaaacactgttaacatgttcacgtttccttctagtctttttctacatagacactcaatacttattaatttgttttgaactaaagatggttttctctgctttgtatgagaaccacctcagccaggcacggtggttcacgtctataatcccagaaagctgaggcaggcagattgcttgagcccacgagtttgagaccagcctgggcaacatggcgaaactccatctctacaaaaaaacacaaaaattagcctggtgtggtggcacatgcctgtgctcccagctcctcaggaggctgaggcaggagaatagcttgagcccgggaggtagaggttgcagtgagccaagatcgtgccactgcattccagcctaggcaacgggagtgaaatgctgtctcaaaaaaaaaaaaaaaaaaaaaaaagttgccacgttgtcacctctctcagggattttcatcctttctacttttcgcccaagacttgccctgtaaaaggatgaggccaaatagccatgggagggtggtactggatgttcaaaaaaatgtttcgtggctggcgggacttagaaacaggttggggaggtttcagcagagggtggaccccagctgggggtggggggcagcaggggggcccctcacatgctctctctgcgtgtttcatggggctgcctgtgaggccgtgtgaaccagagcccggctgggaagccacatgctacctggactctgacctttcctggcagcatgaccttagccaatacgctcaactatgttcccctctgtaaaatgggctaatagaaatgtccactcgagacatgatgagaaacaaaggtgttcatagagcaaagtgcttagaacggtcctggcatgacaggagcccacatgtcagtgctgccgttggcatcgtcatcatcacggcggcattggctgctttgtttctcccttgtccctgtcaccttcttccctcagcaggctctcattcacttgttcatttattcatggccgaggccccgtctgtgtcaggcctggtgctgagaacgggggtagagagatgggggctgtgccctgctccctgacccaagggttccctttgcaatgtgaagttcttggagactggaccctcaggctgttccaccagcccctcctcaggccagcttaacccttccgtgctcgttttctgagctgttagaggaagagagcgggaggaaggatggagtggggtttttgtggggactgagcggggggtgtgtgaggccctggaaatggtgcctgcggcactcacgcagcattagcttttgctgcagttgctgtttggagaatattcttggatttcaggacactgatgacagaaggtggaacgctttttctggaagccatcaagaggggaccaccgcggcggctgagcagagttgctgacttgtgagctgtggcctgaccacagtcactgttctcatgagcgaggccccctgtggtccccctcccaggaatttctggccccttggcaggggacagttcagggctgggggtgggtagtggtgtctgcaggccctcttggagtcagagaatcccctgtcgccgtggcggggctgttccctcctgcccctcccctcccgctgtgctctcagctgctccgacaggatgcttttggcctgagagacagaaaccccaactctgaatggcttcagccctcaagagaatttggagcttttttgtgcaaaatgagatgttctgagcatcgaggatgctgtgggggatcctccatcccaccatctccagccgtggtgtccctctcggtcacaggatgctgcagccacgttgcagggaaggagagcctcccttcctgtgagcctagggagcccctccatgcagccccttcactggccattgcctgagacccgacctggtggctcctgccccaaggagcagaaagggggttcgctaggtcagggtggggctgggtgcgaggaccccccccggccaacagggtctgcttaggtgtccgtcctgttggggcagcagggaagggacccacatgtggcactgggacacggagaggcttttgtgcctgtgacggccaaaagggatggcgccccagccacgttcccacccaccccgaggcccagcatggccatgccggaaatagcagcatcgtccccctcactgtcctggcttgctttcaataggccagaggggtggggctggagcgggcgtctgacctgtggctggatctagctgcccgtggacaggctgtgagtgaatctgcagaggaagggagatgggaatgccgggaccttctcctgcacctcccgaacccccgttccctgtgagttagatggggagtgcacccctgccctcccctcctgggtatcccctgcgccccccgccccaggcacttgatgttgcctgttcattttccctctctgcccctcccgctggcccttcccatatggtcctaattaggaccttccgcccgttggtggatgggcagagaggggagcttgctgtggggcctcccccgatcgggggacttcccagcacagagctttctggcctctgcagggacgctgtgtgtgcctgtgtgagtctggcgtgttagaagcgctaagctgcagctgttctgtgcgtttttcacatttctcacttctcaaaggccctgggtttggtgtctgtgggctggggatctgtgttggggtctccaggaggcccttggtgggagaggcagggccccttcccctttaatctgggcaaccttgctttggcctgctgtctgcggaaagtgccctaggatacggtggcaggactggctggggttctggctccaggcccagccccagcccctgtcagacttaccctccttgtgcctccgttcaccctgtccacccgcagggcctgcaggagcatcctgagagttggtagggtggcctgcccggcgtccgcacagggtctgctggtgggtggctgaggctgcggtgaggtctccatggctccctcgtcctgcacatccttcccttgttgtgttgtctcgctagcatatgagcccgtactgcctctgagtctgcagcctgttttccttaccaggtggctaagcagggtggcagccagggtggcagagtcccattggcctgcaggggaccctctgtgggctgcaggtagtcccctgtggttgaaggtgccctggcaggacctgcaccatgacccccgtcaaagctcacgtccaaggcatttgtgggcacccccgccccagacgtgagggttggcatcttctcttgcacgtgaagcaaaggcctgtttgaaggagcgtgtggaagcctgggtgtgatgaaggcaaggaccggtggctcacccctcttgcacctggaccttgggtggcaggcctggggccttcagtccttaattcaggagggtagccagtcgctggaactaagagtgaacttcagctgttgttgccatagctggagggaagaggggaaaggaggcgctgcaggggagcagagacctcacccttcctctgccgacatcaggctgccggtgctggacggggccctggcaaccgtggcaggagtggtgatgtccgatgatggtaacaagggcttcctgaggaccccgagctgtcttaagggctctttacctggagtaagtatcccctttaatcctcccaacaacactgtgaaattgattctgttgttattcccatttcaccgatgaggaacccacagcccagagatgttaagtaacctgcccaagcctccctctgagcatggcagagggagggtccgaatgcggaaagtctggcttcagtgcccccatccctaaccactgtcatttacctcttcggccagccctctgattgcaaaacctgaggcccagaggagtgcagtgacttggccagcttcgcacggcaggttagtggcagagctgagcagtgtctcccatgccctgattctgtggcttcttgaggtggctcacccctaaacacgccccccatggtggctctgtttcctcctctcctctgaacctgccagcctgtgctcaggcagggggagaagtagagcaaccatgccgggcgggtcgtcgtgccccagtgccgcctgccctacacctgattggcagcagagtggcccctccttggtgtggtctggaggtgccagtggtcactcatcagcacagcccagtctcacacatgtcactcccaaaggatgttgacacagaatgaagcagctaggggaggcggacgctttggcacgagggtggcgtttctggtaatccgtagtgctgttgtctgtggctgcctttggctggcatctcacctcctcctggctgtcctgcagccacctgagggaggtcagcatgtcgccttcatcccaggacagtgtgaatgcagcagcgcaagcttgccagcgccgcactgcgggatctggaggcctttgctcctgagccctgcctctgtgtaatccctaaagcacggacttcttaggggcttccattcctccacctggaaaaaccttacaccgtttagggcttgaggcagggctagagcatggagacgttgctggaggaccaagggagaactgagcgcgtgttctcttggcctcagcctcgtgtgtgtgtttatgcatgggtactttgccatccacactggcttccacggctgggtgggagttgagttgagctcggcggctgcctttccaccctgcgggcctggttggggagtgtgaggatgcctgctggaagccaacgtgcacgaaagagttaatggtggatcccatttcctcagccccctctccagctttcccagggaaagggcaggaacagagaggccttatcttcagaggaaggggtgggcggggacacagcgctgttcggcacagtcccctctgagccaccctgcatgtttcattccaccgacttctgcagcccagctgttcagagcggatccagaaggtggagagagggtttccaataagcagaggatggagtgaatgtgagattcattactgggatttggcaaagcaaagagcctcactttctccccgcagatgggacgggggcggggctggagccagcggggtgggggtatccagcaagagctccttcccatcctcccacttcctttgccatgggccccctcctccacgcagaccctcagcctggaatgatcagtgtccagcttttctcgcccctctcctgccccgctggagggagtgacctggcccctggccccggccacctacacctcctgttttgctgcactagcctcgtggtaggggctgcggcggaggtgggcaaaagccgcttccgggcagccagcccccatcctgggagtgactgaaagtccttgggggttcctgcagggtgagctgcccattctggccctggtaaggacacccaggagagggccagggtgcctgtatttggggcacagcataaagaacagccgtaagtgtttctcaggcaggagggtgccgaagcattgggaagctgggatttagaagcattgtttggggtggtgagtggaagatgcaggacacagattcacgcgattgtgcagatcacctggcctcac

SEQ ID NO: 96517 - DNA, 20229 bp, Homo sapiens
gtcccagaaaacccagccatgaggaccgctctgagaagggtctataggctttgcaagcagaaagaaaggtgggctgacctctgacctggattcagggggtgtctggggtcatccccaaagccaagtatggttggaaaggagaaggactgagaaaagacgatggccctggcatcagcaggtgaggcccaggatgacccatgctagaatctgggggaggacgcgggccctgcccagccagcagttggtcatctctgggggccacacaggccatgccagtcagcttcgctctcgcaccgggcccggccatggaagaagtgcctgatgaggttctgggcctcttctttcactacagattcagggtgggggcatgaggaggtgagcgttagcctcctccctgtagaccaccctcccaagtgcctcctggccctggcaatgccagcgctcaccgctccttccaggagaggtcttctgagtcagcaagtgtgagaggtggcgggcaaagcctttaaacaactcctggaagggagagggagaagagaagcagagagcaggacccttggtggccgggcgcagtggctcacgcctgtaatcccagcactttgggaggccgaggcgggcggatcatgaggtcaggagatcgagaccatcctggctaacacggtgaaaccctgactctactaaaaataccaaaaattagccaggcgtggtggcgggtgcctgtagtcccagctactcgggaggctgaggcaggagaatggcgtgaacccgggaggcggaggttgcagtgagctgaaatcgcaccactgcactccagcctgggcgacagagataaaaaaaaaaaaaaaagagagcaggaccctgccctgacccccagagcaacccacggccatgacccaacggcaaggcaggccccagggaggacgggcgtggggctggccctaggcccactgtgttctggggctcaaactccctgcctcccacccccactacacccacataccccaggcatgggagaaggcagagcccactcactccccctaccttggaagcaaacttgccctccttgtagaaaggggtgaggcacttgaccacaacatttgcagcctccttcaaggagacgccaggagcggagagctggaaggggtcttgagccgtgggattcaaggtgccctgttcgctggccgagacgctgcccttgacctcagctacgacggagggcttggctgaggggcgtggcctcttctgaggctggctctctgggttctcctgagaagggccacagcagagggtcactcctgagctcccttccactggcctgctcccctcctccagaagactgggtccccgcaccagctgcctctctccagcccagcccatctgctgccaggtgtggaaagaaagctgattttccctgaccccttgagcagggcacaacagctcctggcctcgcccacagcccttctctcctccccaacagactcatccctgccggcacctgctgggatcgaggccgcttgcccttccatgtgtcctttgcaggggtgggctggacttcaggggtgccctggtctctgggcgggcaggtgctggtagagggaagagcaggcatcacagcactgggtcctggtggctccctcatcccaggaggcctaggagagcccatctcaggggtgagctctgagcttcagacgcccagtgagcaaaggggatgctgccgtgtaggttccagaagattctatgactacctgtacccttaccttggcctctccctgaggcactcctcagtctggggaggggcaggcgaatgtcccccggctccatcttcctcccctgtgtacttctctggggccatcgggggtccctgaaccccctcacaggaggggcaggcaccttctgcctctggggctgatgccagcagagctgggctttccacccttcggcagaagaagcgggcgatgctctgagaatccttgtgggccgctgtggctaggagctgctgtttcttgctagcccggcccttggcaagggaactgcccccagaggaactttttgccttcttctcaggggagggccccccatagtgagcgctgcctccagggacctcccctctgggcccagggaggggctcactcccatcctcatccaggaggccacagggccggctcgggggctcgtgctcgcctccccgctcgggctggggggcttgctccctgatccgagtcgtctccatcagttccgtggccgtctggaacgggcaggagcctttggggaaaccagctcccacccgcttgggtttgagctgtaaatgtgagcaggaggagaggaggttcagcccactaggcccccttgagggcaccgctggctggagcagtcactcacattgggacggggctctcaggagtgtgggagggaagaggcaggcaggaccctggtggggagccaggccttggcaagaggtgcacccctgagggcagaggggaagtgaagcctttcctggtcacaggtctggaggccactgggccacagctcaccgagtacacatgggaggctggtggaatgtcatactcattgggctccgggggctcagcttgggcactgcagctcttggcactgcctcccatgtcatagggctgcccatccttggaggctctgtggatatcggccacctgggcagggataggcagggaggctgtggcacccgccagctcctcctgacatgccccacctagccctccttttctactaggcactacaagtgggtttctgtggccagtggccacaggcaactgaccactgggcaagttttaggcctcccatcctcacagggttggctagaaacatgtccagccagtggagaatggagctctacccccataaactgtctctggggtgggctggggagggtgagttctgggctgcctgagcccagagagctggcagacagcttctgcctcagagtatggaggggcccctgcaacgaccctgggtccgcctgcaccaggcccaccttcttcagcacgctggccttgtagaggttggccaccttggcgttccggaatgtctcatgttccagctccacggccttggcccggaggtcagctctgtgggtgcaaggtaacaggcacaaggtatcaggtgggcctgggcttctccctgctgagctcttgcgggactccaggcctggtggggtaggccttgggcacagggattctgattagggctctctgagcaccctgtggcttactgtccctcagcagctgctggtagcacctaagttgtagccatgcctggccctggtggggttgtaggggcagtcccctggagtaggagaggtacaatctggggagaggtggcccaaacaggccagggttgacagggtcctgcagtctccaagggaacgagagcttggagtgctcctcagcccagtgatcgtggaactcactcatcagcggtacgtgttgactggcggttgctgctcagcgcctcctccagaagccgcaggcagtgctcccgtgcctggcacaggacagtgagactggtcgcatggcctcgcggctgggagagggccccggggggtggctgaggagctgcccgtctcttaccttcacagtcagcctggggatcctcctgctagaagcctctttcaggggacagttctcatctgtgggggggggggggtggtccttggtcctttcgctccaccttctgcgctctgaggtcccccacagcccggatgagaatcctccctccatgccccgggaagagcccacaagcctccaggaacatttctgtactgacctgggggtacaaattcttctatcttggggtctttgccctggaggacaacatgaaggacccatgaggcgtcctgccctgccgcaggacagtcccatccagcaccagagaaggggctgagaggtgcgagcagggggccaccaggggccccacacaggccactgagtgcctcccctcaccttgcgcagctgcatctgcttctgatagaagaggttccactcccgcttgtgggcctcatctctgccttcatccccgctgcctccagaaccttcgtcatacctagggacaggccaggcgtgagtggccctggcctgggctctgccctccccatgtgtgctgctgctagaacggcaatgtccctgatgtcctaccagctcaaggggggattgcggcatcgtgccacctctggtctggccctggcgccaagggaatgccaggcaattccagcgggttggagccctggcttctcggccccttacctgctgaagtccccgtagcccttgcggcctccctcgtacagctcggggtcaaagccgttcccctgggagggcccgatgcaggtcttgctccagctgctgctgcgctccaaggcctccagccgcctccgcacggccgtggggttctggcagtggtcgcagcctttggcgcaggcaggcagcgcatccccgaagtacttggcaatggcggcatggcggcacctggagcaggcagcaccgcagaggtgaggggcggagagcccagtcggccagcgtctgttcacccgagcccgaatcgctagctgagcgagcactgccgcgtccggcaccatgccgggagccccacacccctcatctcatccaagctgcaccaggcatcgtttggctctccccactacacagatgaggacgataaggtgaaccaactttcccaaggtcacgtaacacatgggggtctcccgggaagcaggatgtgaaccccactctgtccagttactcctctgctcctcccctctgtcctctggcaatgggatgtagatgctggctctgccatgaagggtgtcttttgggtgacacacttcacctcctaaagcccatgcattcccgtcagtaagatggtgcagaaaggcacagccctcacggactgagcgaagatggctgaggtgatgtctgaagtgcattacagtacagtcatgccccatggaatgactgcacagccaatggtggtcccctacgattctaacactgtatttctactgtactttttctatgcttatgtgtgcttagatatgtgaataccactgtgttacaactgcatacggtactcaggacagtaacgtgatgtacaggtttgtggtctaggagcaacaagctgtagcgcatggcctgggtgtgtaggaggctgtgccgcttgatatttttttccttctcttccctggaattgctgtttgatttccctaagtatactctgtgaccgcacaatgacaagttaaatttctcaaaacgtatttgcattgctaaggcaggcacggctgtgtagtaatatgtcccatcatcaacccgtgagggtgtcacaggtggggcctttagccagggagacgcagcctcgcctggagtcctcctctcgtcttcctctgtctcaaccctgctgcagccctcctggggtgagcggcctctgcccatgctgggagcagggagcagcctctggctggcccacgaggctctgtcgcatctctgttccctctgcatgggggtggctgtcgacccttggggcagctgcagaggccgcaagaggggccatagctctctcaggctccttataaacagccattcctgccaccaggaacgtggcacagggtagggaagcccaagaggagatgctggaacacaggcagggctgtctggggtgccacatcccagggacaagaatagctggcattaactgctctaactagaactcctcccagtgtgagcactgctgcggctgcaagaagccctttgaggggctgcgaccccaaggcgcaggctcaaggatgcaaggctgattgcaacaccccggtaaggaagcagggcctggctgactttcttttagctgagtgaatgcagctctgaagcctgacctgggctgggacagccgaggcggccaccagagggcgctcctgcccccactctgctccaatgagtaaatgcaacaaatggttcatccccaggagtccgtgcgcccgcacagcggccgcctgtccagcctctgggaggctctggcatccgagtggtgtgaccacatggctggcttcctccccctgccctcctcaggccctgactcactggggttttgtgctcggactcaaagagctccattgacagcggggctggggtcggtttctctccacacagcctagcctgctgggaggcacaaccaggcaaatgtcacagggcccggcccctggactctggagccctgccctgacagctgggccaggagtgcggtcacagccccagcagaaggccctcacctcacaaggaacatgaggcgccttgccgggcgcgcaggccactcccaggtcactcaggattccaagttctcccccaagacgccttcagatgctgagcggcacaagggcctccccagggactggttgcaaagcctcctgctcagcttgagagggccaccagctccccactgtttactgttgttcctgagagaggccagagggagggaccagccagggagtggccagagggacagaaggggtggccttcctgagggcagggtgggtgccccagacctgagagcgctgcaggactcccctccacaggctcaggtggagcctccccagggtcctcctggccaggaaggcagagagccgacttctttcttcagctcccaacccaggcccagcccacggcgtgggagtcggggagagggagaggaggaggaaggaggaggagagagggagcttgtcttgtccctgagcagcgctctcagggcagaggtgaggcaccgggacatgaagttggaggacaagttcccaagcagggcttcctcgggctccccctcgcgacggtaatttgacacttggatctccaggacgaccaacaacaaaaaagccaggcagagacagcagctggctgtcagcagaggagctgggctgaggcgcccaggggagcagcggcgcccacgaaggaagtacgaggacagcacgtggaggctccgcgctggggcactgctgctcagcccccaacacctgagctcccaggtgagtggcaatggccacagaagaaggggggacagggagggagcagcaagggtcccctgcccccagggtgaagggccacagtctaccataaacacggagaggtcttcggggacatgctgggtcgcttccctgcagggaagtcagccagcctcctgcacacacctgcactctccctgctgctgggaccctgcactaggggagggctgggggctctgctcagagcgcctcctgctccgcctgctgtgcagcagaggggccccgagggcctgcttattctgcaagttcatttcagctcttttattcagggggcttaaaagagggatttggctgtccagcttgggagagaatggctgccggcctgctgagcctccctttttcccaggattagggcagagccctgtcgaggtcagcgcagggtctgcccagccagcatgcggcgcccccaggatgcagcaggactctgcccatctgtgtcctttcaggggcttggcccactcactgctggtgttctcagctcacggctcagcctgggtcctcctccctgggcccatctagaaccccataaactcctagatctccctctggtgatgagccttgaacaccaaaccaggaacctggaggactgactttcaactcaggctcaggtgggcagaaggtcacagaagtgaggctgggagggaccacgctggcaaccgggacctctgctgtgccaccgtgatgcacaggctgacatgacaccacccctaaggaagcaggacccggctgtttggttctttggggaacactgagagcagccctcctgggcagggcccgtgagccgaggctgcctactcctcctgccgccctgtcctcaagccagcgttaaagccaccaccccccatatgttttcctcaaagcaaacaagctggcatctagtgagaaacaaaaacaatgacccagggaaatgtggaaaccaaggactagcccaagtgttctcagctcagcagaggctgggggcttcggctggggctggtgtctggggagacaagctcctgcggtgttgggaggcgcacagtagggaagagtcaggccaggtcggggtcggggcacagcggtgagcctggagaccccagtggctgtcactcacaagacgccccaggcaggcaggtggggatccctgtcctgcatccacaggacacgagtggacagggtctctccaacacagtccctgaaccaggacggagggtgaatgaacagccagcttctgtagctgcagaaagagcgcctactgtttctaacaccagcagcagaaagcgcttcctcccgccctgggtggctacaggagcagggcctgccaggggttcaagcaccactttctacttccagttggagccagggcaaaaaggggagtcacccaaaggctcagtgccacaaataggggcatcccccccggctgctcaggcacaggaccctgcaaatctcccacaagtgtcagttatgcctccttctaggtggacctcaaacgagataatgcccaacagggcaagggtgactaaaacccaccatgacgaaacaacagggcagagcaagcagccctctggggccccgcgctgccaacacacctcgcttatcagtctcaaacacgccgcctgctgccagcccttcctcgtgaggcgcctggggttggagtatcagctctgcgaggaggaaacagggaagcttcgggaccaagtggcagctgtctggcctgcgggatgcctgcctgttgmaaggctccgtgtgccaggagatgccacataaaggaatgcttcccatccctccggctctgccagccttctctgccctgagtgtttcccctgtgctgaccgctactgcagccagggcacaccctctgaaggctccaagcagggctggctgggcagcctgggcagcaggagggcctggtggcagctgggctacactccctcttaaggccagagggagccaccacttgctctggcagccactcaggaacccctgaggaccctgagaagcctccaaccaaggcactackgagcgtggggttgggagggactctggttgccctggttcgcaggtgggcactaccaagcgtggggttgggagggactggttgccctggttcgcaggtgggaagtgtggttttggaaggagttgggtgaacctgagatagaaagacgggaaaaatatgggatcatcagtagccctcctgggcttccctgccttcctcctgccaaacctaggaagggaaaggggaggagaggtggccagcctcagagctcccatgttcccctcgccacagctgggaacactaaggttcccttaggagcagcggctggggcacatgccacacagtcacctgacggctgctggttatattgggcaccaagtgtcaggcactccttggcctggctttaaatagcccgctgggaagaccacctggggaccggctggaatgcgcctcctcctctttagagaacaggacccctcagctcccccacctgcgccatgaaggttcagtcgcgggtttacgctccaaatgacaagatatcaactgcaaaacaaagggggtcccggggttcctctccagctctctgggggcagaacagccacgtccaacggtcctacttctgctcactgtgtgacaggataccgtgagtacccctgggtcagaccctggggctgggtgaggctggccatgcctggctggcaaattcagcttccagtcagccccctagggaagccctgggcgcaaagctatgacactgtccacagccgcagcctgctgctgctgggaactgacacttttccccgctggaggccggggtccacmcggcatgagtctgcagctctcccactttgcagcccctggaggaggctggccagagcttctcagcaacaaaccccacttttcctgcaccagtaaattcagcctcagtccaaccttcctcctccctgttctggtgagcacagccccaggtctctcgctcacaaggaaaagtgccccctgcaatctctccctgggtctctgggtgtggcacaagcgaaaaagctctccctgcccgctccctctttgaaggagtgtctctgctgggctacattaggccgtgtgggcacagtgccagtcaggctgaaaacgccagaccaagtgtagacagagagggaggggagaaaggcagcccagctcctgaaccacgcgcaaactgtcccgtaagggacactgtcggcattgtcgtccctctaagaatgagggaacctggaaagctggggcgtgaggatggcacggaggtcccggaaccaagaggggaccactgtccttgtgcaagcctgctccacctggccagagagaatgtcccattcagtctgaccagagggttcagtcctacactcaggctggctagactcacaagacctgtacctgtggtgacaaggactccaggtagtctcaaagagcctggtgtggccccggcctggtggtgatatgctgataaaagcagcttcagatccacaaatgtgggctggggctggccgagcacagccagctggcttccagggggctctcgggccctggctcctgtactgagcccactgcacgggcagtaccctcagcggggctgctcctggctatcttgctggtctaagctggagacaggcctccatggagagacagcgtggggcaccagtgggggtgctggctggggccctgtcctgctgtgtaacctcagagaagttgcttgctctctcgggtctcagcttccccacgtatagaaggaaggaggcgggagcggatgatctatagcattctaggaccctatgcctctcagtacatttgaaaactgagatcctcacctccacagaaacgcactcactccaggtgaggtgtgagaagctgggtggatctaactcagggaacccacggcttttgacaagaactcatctaattttccacggagccatcttctgcctgctaccctcatcatcacttaaaaaaacagctccccaggccgggcgcagtggctcacacctgtaatcccaacactttgggaggccgagggcggatcacctgatgtcaggagttcgagaccagtctggctaacatggtgaaatcctgtttctactaaaaatacaaaaattagccgggcatggtggcgcacactcgtgatcccagctactcgggaggctgaggcaggagaatcacttgaatctgggaggcagaggttgcagtgagctgagatcatgccattgcactctagcttgggcaacaagagagaaactccatctcaaagaaaaccaaaaccaacaacaaaaacatagctccccacctccagcttgcctaccttccttcagggcacacaccgcagacaccctaggacagacacccaaaaggtgttgggggtgctagtgacgrtgcacgggggtgacagcccccaaagccagtgagacccgtcccgggggggcattctcgtgtgccgggcacccccctatggctgtctacaatgtgctgctagatggtcagtcctcccaatagcctcaaaacacgggcatctcattccatatcagagacatgaagcaacctgttcatgtcacaaaaggaagaagtggaggtggcattcaaggaggagcagctgaaaacactagagcaggcccctggcagagaaggaaatccagaaggtacatgccggctgccatcttgctcctgaagggctacgaggcagaagagggggcaaggtctaagtgaccacaagtgggactaactgggggccagcagggagtccgaccttctgcagtgggtgggctgcctcagcaggcggaggttcctcaccatcctgggtgctcatgcaaagaccacatggcctcaaggatggccgcaggccaattgcagggtggagggccccgttcgatgaccttcacggtggttctaaaccagctctgccaaggcagcggcaccgggagtgactggcctcactgacgtagccatctcagcgagaaccggctgagacctgggacaaggcaacgataattacagccaaaggtctggcaccagcccctggccacctgtccccaccaccacccctggattagagcaactgccttggtgaactggatcaggctgggttgggacaaggttgtctctggctcctctctaaagaggcaccagctccctcatgcccacaggagaggcagaaggggaaagccttctggagtggcaccttgggcctcttgggcaccctgagacaggaagaggctctcctggggcaggggtgggagtggagaggactttcctggtcaggctagagaaacagatgacgccagcaggggaggggctggcttgagcaacctgggcctcctgaccccctcccaacagacaggacagaaaccctggcaaaacctggagggacacggtgcggcctccccctctggcagaacaggcatgagtgtagaaactgggctggtgggagaggttggggggcctgggggacaggggggcagttttcacctctgactgaccctggccagaagccccatgaacctgctctcgggagaacctgctccttctgtccccacattgatggaaggcaagagtaccagcttggcatcctatcccagtctccccaccccgagggagctgtgccagtcccaagcacccaggcaaaacccagtagtggtacctcaagacaagggaatggaacagcgaagccagaaaccaccaccagccgccgccttggccggcagcccccgaagcaagcccttggtctcactgtcctcaccggcttcctccaccctgagctgtgtcagctgggtggggactgagggccaccactaggtggaagtcaccaggggtgcaatgtgtgagacctgacaaacttgttctgcgggctgcggatgggtgcgagggtggaatctcggtgctgcgacgagtgtggggccagccgtggaggctccaggtgttctctctgccccagcagagcccggcaggagccccaacaggaagccagcgcggcatggctgccaccgacttcgtgcaggagatgcgcgccgtgggcgagaggctgctgctcaagctgcagagactgccccaggctgagcccgtggagatcgtggccttctcagtcatcatccttttcacaggttagttggggcactcagcaccccatggctctccctggcatctgggagagaccacaccatggtgccagccagagggctggcagaggtggcgggtgtctgccggatcaaggaggaaaaccagttgtcccttgggggaagccaagggacttccctcatcctctgatatgctgcttgggtgatgggcggtgctggggactgggcccagcagtaccccrggatcccaaacgcggggatgacgggagccaggcttgggcagtgaaagagaagacacaacatggaggaggttggccctggcggctggcatggggaccgtccgcacctctcaccagcctctcggatctttctgacctccaccaaacctgtgggggaaagaccctggcaggcagtgggtttctctgggaggagggtgggcatcctttctctcccccaacctgagtcccgtgctctctcccggccctccagctactgttctgctgttgctgctgatagcctgcagctgctgctgcactcactgctgctgccctgagcggagaggcaggaaggtccaggtgcagccgacaccaccatgacggacgggcgatggctgaggagaagctggagaggagatggccaatgccatgacacaggccatcagcctggccctgcagcccttacccctcaagaccaggctcccctggccccagctctggcccagcccaggtacctggacactgacaacttgagccctaccaaggaaacaagggctggtataggtgcaaacctctcatctgccagtggacactgggtgctggggagtcagctgtttcaaagactgggtcaactgcctgggcttcttcgcctacctgcactttttaacaaaacaaggaagtaggggtccccataccttgatggagaacagtccccacctgtgggcaattggcccttggggctctgctgatacatgccaaagaggagcaaggcaatcagaggggctttgtgcaatagcttctgcatccgagctcccgccagagcgtgagcatgtcagtattctagtccagtatttgccagtttccaagtaaaagcttttgtgttacgtgtttctgcggtgccggactccctgaggttgggctgggctctgtacattgggagggggtatggctggtgcccgtccttcccaggcctctgctctccctgtgcccacgaaagctggaaaaccacgcagagaagcatgccacacaggcggttaacaccacgggaccagtggacggtgccatgaaattcctgtcatgcattagctgctaatgagctctgccaggctgaggcactactctgcagagtggcagagactgtgtttgcccaaaggcaggagctaagctcaggaacagcactttactctgtcaactgcctgcacctttggcctgcacatcccacactagcagactcagaccagtgggtcttcacaaactgccagaggaaggccctaatgtcacctgtaacctgcctcctgaccctgtggccctcccccatttgtgtgctgtctgggctcacaccctcaccctgtcagctgcgtgactcaacttccctaagccgaactcccccttggtgaaatggagcaaatcctggtactgcttcctggggtttgctgtgaggataaactaagatgacctatgtctagcactcagctcggtgctgggcatatctttagagccccatcaccatgacccgttattatttgcccctctaaacatgggaccaaccagggcaacagggacccattttaaagactggtcttgctgagaagcagcacctttccttccttaccccctcctttcagctgagtttttcttccagagaactttccaggtagagctacgaacccaggagtgaggggaggggaggcacatggctccagaaatgccaatgggtccagacagagcatcccgaggtgcctccccggggcttccccagagcctcaagaagtctgtgtttttcacatgcttccatcatcttggcctgcgtgacccgtgctctggccacctgggagcagagccctgtctacctgggaaacatgtcatggagaggggatcccagcccctgccacacccccgccatttccagctggcagtccaggccacactggcaatagcaggcagggaggggaagctctcaccctctggtttcactttctagtgtccacggacttgtctgacaggtttaggttaaagacccagagagtaagtgttttcatacaaaagaaaagaaattcaaaaatttgtccattctcagccccctccaaagaataggattcagaatgatgacgatgatcatgaggaggaggatgaagatgatgatgaagatggctaaaatttactgaggagttacacatactcagcattgtcttcagcattttggtgcagataaactcaattactcatcacagtacctccatgttgaagataccactattacccccattttagagatgaggaagctgggcctcagcgatgttaggtaacttgtctacattcaaccagctgaaaaggagcagggcctgcttgagtccagcctatctggctccagagcctctgcttaccacacccagggctctgagacccagaacttggcctcctggttgcagtacagataaggctctaatccattatcctccatcgaccaaccctacacccaaaacacccacaccccaaactctgtctcaaaataaccttcgcaggactgggtgggacccaacaggtaagagctggggtggtgcccaatgaggcacccctcccggaagaaaaacacagggtagtggacggacaggaaaccctgcatttttcattcccagcaccaatggctggagggtccctggaagccttctgtttgggagatggccaacagggaagcagcccaattcctgggtgacttttccataagccagttttcatcagcataagaatagccctgctccagggcggctgaggctgaggccctttgttagaaaatattctgcttccccagcccagctgcggagaggtgggaaccacagacagccctgggcacagacaggccgaatggccgctctagggcaggcggtgaacaactgctgagtccgcacaggattcggtccctgccctcacaggactcactcctccctgctccttggccaactggcacacaccaggcccggctgtcgggccaactccttcacaggcttcaaacccactgagattaacaaaccagacctgctctccgacagcagcctggcccgctcctttaagaggcagcttcttgtgccggtcttccctggggaagatgggcatggaaaggtggcagcagttgccccactgtgggaaagaataaacagaaagatgctgcagacctgggcggcctgaagacaggtgggggccatggaaggggcagccatcaggctggtttcaggtttagaggacgtctgacttggtcaccacctctctgttcccgccactgtgccatcctggaccatgccaccatcaatgcttacctgtggtcactgcagcagcatcctaagtggtccccacaatcatgtcgccagcctcttcatgcccaccccaagctgtgccctctgcttccgccacagggcaggctgctctcggctcctcaaaagggctgcactctactctgaagacctgcgtgccacactgtctgtacatcatgcctgattaaaagctacaatagggatgggcgtggtgactcctgcctgtaatcccagcactttgggaggctgaggcaggcagatcatttgaagtcaggagttcaagaccagcctgaccaacatggtgaaacctgtctctactaaaaatacaaaaaaattagccgggtgtggtggcgcacgcctgtagtcccagctactcgggaggctgaagcaggagaattgcttgaacccaggaggcagaggttgcagtgagctgagatcacgccaccgcactccagcctgagcgacagagtgagattccgtctcaagcaaacaaacaaaaaacaacaacagaccagcatagtatatcacatgcatgtaatcccagcactttggaaggccaaggatccttgagctcgggagtttgagaccagcctgggcaacatggggagaccctgtccctacaaatataaaaaaaaattagccaggtgtggtagcatacacctgtggtcccagctactcctgtggaggttgaggcaggaggactgcctggggcatgacagtggcactgcactccagcctgagtgacagagcaagaccctgtctcaaaaaaaataaaataaaaataaaaaatgacaataaagccacggatacaagaatctcattagaaaaacttggcagagagtatataaaagtttcctcccaaccgggcatggtggcacacgcctgtgatcccagctactcaggaggctgaggcaggagaatcgcctgaacccgggagacagaggttgcagtgagccaagatcacaccactgcactccagcctgggctacagagtgagactctgcctcaaaaaaaaaaaaaaaaaattatccaattggggccggcagttaattgaaagagctggtcaaagcaacttttgttaaagaacacctaagttctctacacatctattacttttttacatatctcacattaaatggaaacatacacctattccttggccggccttcctggccttttctctgagtgtgggcttgccaaccagagctcctggattgctatcttctagttttggttgagtgtgggcttgccaaccacagctcctggattgttattttctagttttggtttctttaaagcagaacaaaaacttaaagtcattggaacttaaaggcaaaggaagctgggtgtgaaaaccttctgggtttttacaaaatgtccctgatgtttagttatcatgtctgcatctttttcaacaggaacattatctgagtgattccaaagtcatcccaaagtagtcaataggtatttctagaaagaatttctttctccactcgctctgaggtgcagcacaggtgcttcagcgctcagactgtgtgctgctggattcaaactccaactcagttacttactagctgatgacctcggctaagttatttaacctctctgtgcccgttccccacatgtaaaattggggtttcagctattattgttgcttcattggttcccgggatgttaaattcaattatgtaattacaagtacaactgccatgaacaggtttgggaaccaacacttgactcttgataagcatctgacttaactgacggagctgcacgcaaagggtgagctagagactggcccactgctgtgagcattcagcatgccaagggccttagtcagtaagtttcacacaaggaaacagaaaacatcaggtaacccgggtcagtgacgcccatgatagttaagaacgactgttctaaatctgcctccatctgtcatccaaccctggccacacctggggagaatcacctggggatgtgtaaacaatacgacatcctggcaaccccagagactgatataagtggtaccaggtggggcctgggcatttctcaaagctcctagatctttaccagctgggataagcacccgagggctagaagggaagcccttggagggcagggcccgcctctctgatctcacaactggacacacagtgcctggcatggttcctggccatagcgggccctcacatcctagcttttaaaggagtatatggtggccactaggtttcaagcaccagggcacaggcttgatcccctcttcccagcttccctattgtgccagtgggcagaaaccaaccacacaatgttgctgaggccgtgcccagggagcagacaaaggcaccaatgggaagcctcaggggggagcaacacttcccccagaaacagttccaggaggcaccaggcgccagccagggctgcagttaatcattcaccccacaacacaggaagtgagccctacgccagtcccagccccagggcttcctgagctcggggcaggtccgcagtccacacgtcacccagacagaggacagcccagcccagccacaggtgaggcggcctgatggcctggggcaaaggccctcggtccagtctcttccccgtccaccccaagtctgacttctctcaggagggactcatgaacacgtgccctgagcacccccaaaatgacatcacacaagggcagaaaggagctgaagggggaacgtgaaaggcagaaagggagccgtggttgccaggcaaccagccctagcccacctttgtttgtttggtgacagcaactaaggtctggtcagggccgcttggccacgctcatgccttttcctctcaacagttgcttctttgagtcagggtgcagctctggtcacctggcggcctcttcagctcagccctccacaaagtgtgagcctgaaggaccaccctgaattgcccttgtaggacccagaacagctaccagcagaatcaggtaatggctccctccttctccacctgggctgccctcacctggctatgggcttgcagtctgcgataaggagctccgcttctagaggactcctaagttctattctcagctgctccaaggaggctaccgaggcctcagctggagttggcccctcctcggctcctatacgctctctcaaatgcctcccaaatgtttggcagttggggcaggaaaaacagggagactctatcatgatgctttttagattctagccaagtaggtctcagggatgagagagagtccttgctcacacttgctactcaggaaagaaggactggagaatccaggggcatcccctaggaagaatccagggccccacttcttgcgccagtcctggctcctgtatctagagcgggggaaatgccatttgctgctggctgcaggcatccagcacaaagactctagccctttcatgtcccctggctgccaggcgggccggctgctcacagaggctgctacagaggctggagtcggcgggcagagcatagcacctgggacagggcctgggagggctgcctgcactcaggtcctctgtccctcttttccagattctcatggaccaactggtattcaaagagacaa

SEQ ID NO: 96518 - DNA, 13501 bp, Homo sapiens
ccaatttttcccttttggtcacttttttactgttaagggtaaaaactgctctgccttaaaacttttgtgaaggtaaaataataatgtacgttaacattttggaaattgtaaaatgcagtacagatgtaataagatagcattaacagtaatattggaaagtaaatggaacattaaactttgatgtcctatgattaatattgttatggcaaacatactataagtttaggagtcagactgccatttttttatgaatgttaatagttattttataggaaatgtaacctttttggttagactcttgaaaataagattagtattattgctagctctatttcaggaagatttatcaaacatttagaaaaataaacacagttgattttcattattctcggtggtgttatgttccataaagttgtcaaacaccgaattagcgaatactgaaccattactcctaggggaaataaaagattatctttttttgatcttctagttaattatgtaaattaatacataaccattttatgtttctgttgaaaaacatcttctcagtgtatattgttgattcattaacatttaactcgtggccaacagcactataaccatgcctgaaggaagctcatctaaacatgtattttatcagtaaagcatgtcacagccttcttgcacttagaaacactagatagcactttagcattatgttggggaccatttcaaacaatgaaattactaacaaaaagcacaaaaatgcaaaaagcatggtactaagtaggctgcaaaaaaaaacaaaaaacaaaaaaaaaaccccacaggtttacagaaagagagctgaaacagaagacagagtgctgccttgttcaacctcagctgggactcaaatttttctccactctgcgcattgtctgtaaatgactgcaaaagcccctagtattgatttttggcttacaaataccagatgtccttcaacttacaatggggctatgtcctgataagcactactggaagtcaaaaatacagttaatgctggtaataaaccagatagtccccgaccaacagtggttccacttaatgttttttacgatggtgagaaagcaatatacatttagtagaaatcacatgcattcagtagaaaccataaccccgacatgagtaagttgtgaggagttccttgacttacagtggggccgcgccccaataaacccatcctaacatctgaaaatcattaagtagaaacatcaggaaccatctttatatttttaggagtaggtgaattcacagacacaaaatccccaaataatgagaattgactgtatgctgaatagtgagaaaatgatttggattaagttagtattttagttgttaaaatttgatttagttacttttatcttgaatttcttaatctttcatagtaaatagaacatcctctacttttgtcttctgatttctcaaacaatgtatattgccacaaaaactccattatcaatgatatttgttacaaatacttaaaattaatgctttcacctttcatttgataataaggagtttgctacttaaaggaatcatgaattgctttgtggcacaagaagacagaggaattcggccagtgtgaggcatcccttactttctttaacacagccgcctgatagaacagtagccatgctctttaagtaactctactctgacaacctcgaaggatttctgggcataaaaattgggggcatccaatatagcaaaggggttgagagcatggactctatcttggtaccatcacttaccagatgtgtggctttaggttcattacttaaattctttgtgtgttaatttttaaatgacgatgataaaatatctacctgataattttggtgtgagaattaaatgaattgatacatggaaagttcataaactggtgccctccacgtaagttcgtgctagataaatgttagctataatcattactactattattattatccttaatttaagtagactctttatttctccctactccttactgtcacaagtgataaagcaatgggaatacctgtgttttatatttcttttgcatttgtaacctctcccagtactcatgtttgttactaatatggttagtcatttttctcctattgatactgtcgttgtaggtcaggtaaacatgtatgttcagtccttcactatgagtgagccaaaagttcatatgaagacttcagcattgagtccccaaaggattttttagaaagttcattaatatcttcatttgtcttcttccaagatgagcctcttgactgactcttctcagaaaatgattgacactttatgtgagagtaaaacttaaagtgagctatgaattaatgttaaaaccagattacgaaaaagtaagacttcatcctacgattctaccatcctattatccactcaccttgtacaaaaacaaaatccagaaacattttcaaaaaggaaggaaaattcagtcaagtattttggaaactgagttccagtcatcatggagtaaacaagcaataagcagattaggtagcgctgcaataaattaaaattgtaacagagctataaattagattctgaatgttttctaaatttattttcaaacttgacttttaatatatgtgattattaagatgtaatggtgatgtgctatgtagatatgaatctgttacagtaatctatttttctcttaacattttattatgaaaatgtgtaaacatacaataaagctgaaaattttagtgactacttatatgctcatcatctagattctatccttgagtaatctatttttataaaggtattgatgtaactattttataaatgaaaaactacacactaaaaaccaaatatgtgatctccagcatcacagaaatgaaataaggatttttttttaacttaggtaatattgcttgaactgtagtaattcaaatgtagcaatttcaaaggtagaatttcccatgtattactatactgcttcacatcagctctattaataaaagtagaacagttgcaaaggaacttttatgatctgttttgacaggacagacaatttaaaaagttgttaataaaggtttttagaattcactataagcctttcatgtggctttagttagccacatggagatacgttctgggacgaaagttggaagtattctcaagaagtaaaaaataccaaataatttataggggcacgagtggtttgaagtactgtttaggattagagtgggtcttggcatttgtccagaaaccagactactttgcacaattatacttgaattcctaatcatatccactagcctactctcttaaatagaccacagaaaccttgctcttaacatttaagacaatggagtgtcttgctttctagaaatgcttttatttttattaccactatgcaaataaatgtaattttcacagtgtcataacattgattttgtcattgaagatattatctattttttccctgacagtttatgttaaaatacatttagctttgttaggtaagagaactttgatacttccttttcctctttattgtgtatacaggtatatttgggatatatggcatttaagggtattcttttagaagacttgtctaagttgttaatagttgtaaaataccacatattaattttttttctacatttaaatgaccatcgtcctgtgttactggacttgtctcagaaatgagggaaatatagggccattattaattttgtatttgaatcatatcattggctattaataatcttctacagtcacatctacatatattagcagtgaagaatcatttcagtgacaatttgttagtcttcaaagagaaaaaagaaaaatctgagtttcataccaagtcttctataagaacaattctaatgtcaatgtagagccctttcttttttgtttttaaaactctctaagatagctctactttatatggaaacaaattttctaaagagcaggcaatggatttatggaaatttgcacataaacgtgtaatcacattttgtctaaaaactgtaaaaatattttaacgtcattcaaaacatacgttaaatgttgagtaataccaagaagcaatttgatctcatttgcagggtcaacagagcagttaatacaatgacagtagatttggggaggcttttgcgtagaatcaaatctgttgggataatgaatacttaaatagttttaaacagcaggaaaagatgaaaaaacacactgaaaccctttggaggattaagttaaattttgaaaataatgattgaagctaatactttagatattctcatagaaacagaaaaaccagttgtttagtatagcaaatatagattacatattctgtagattgtcatggcatttttttgtaatctgattttttttttcaatttcagaagataatgaataaaccctaggtaactctttcatttccattcccttaacaaataactgcagtctctcatagaccattttgattcctgctggtttctctatcttgtttgtctgaaggtagagcagagacacctctgtgtattgtattttctgtcagctagttcttagatctttcaactatttttttttttttttaaatccttgatacatgctttccaaaggctgaggaaacagaaagtgagagaggggtgaaagctgtatataatggggattatctggagattagttaaagtttcactaatgccattaatttaaatatttgactccggccctttcgtgtatgagatttgttccgccattacttcaggtagatttcattacctcgactggactgcctaaatacaacttttgtgtcagtcaatatggttatacttatacttaatttacacatgctaatggcaatattagatctattgaacagatatcatcagtaaacagttaatgattgatattcaggtccaactttgattattgatcatataatattttgtgtaatttctgtggttattataaatatatgattgataaccagttattcaggcaatttgcatttataattttttatgtagattttactaatcagctagaaatatctcttcatgaaggtaattattagtaaaaaaatttgtgcagagaattgcgcagagtatcttaactttattctaacttatcctactactaggaatgttcttaataatctttattaaaaacttagtttcttagattgtctgtacctgtgttaaaatgtggtctacagccatttaaataaaaggtctctattttatgacttatgtgaatttcggatttgtaacgtatatatgtatgtatatttatgtttgtgcatttgtgcataagttaaatctttgactaaaagatggacctcaacaagtgtgggaaagtgttatagttacaatatcctgctttttgcttttctgtataagagacttggtagctgcatcatatatcatggtcatccaaacctcttgttttaaatgagagacatagttaatcataattaaaaatgctaaataaatttgaaataggaactatttgacccattaaataaaaagatcccaggaattcttagatgtaaagttatctaattcttgagatttaacttaaaaatataagtatttatttatgggtagttttaaatttgtctttcaagcattatggagattagaaattttgtgtgctttttttaaatttgaaggtccttaataaaacagtatgtaattgtgagaagcaagagtgctgcagcatgttgtgtcttttaaatatctttgagagtaacagaaaagcccaaattctctcctagtgtcgtttttaaaatcaagtattgaaactgaatatagttcagctaagctttctttgctgtcactcttaacattgccataactctactttcctagtcatttgattgtacagaaaaaagtaaattcttttactatgtaagtatacccttatcatcaatcatgtactgcataatgcatagaaaagaatacatgtaacattttttgaagcataacagtaacacaatactgatgatttctcacccagcttaaaaactagatggtatcattgaatctctatatgttgtctgtccctattcagtcactctatttcccttcacccagatgtgatcattattctaagatgttttcattcatttccttacttcttataaaaataatggtttctgaatgtattactaaacggcatatattgtttaattttgagcactatacattacataatgtaattacctattaatgtaattattataatgtaattatacttttttctcttaaatcttgttttaagatttatttgagtcttggcatgtagctatagttaaatttcatgctgtatacgattttattacgtggatatacttgtattcattgtagtagggtatattgggtgttccatgtttattttgttttttgtcactatgaacaatcgtactgtgaagattactgaacatgtgttctagtaatatgtgagtaaattctttcattgtatatctaagagtggaataggtgagtctcacagagaacgtgcatattcaaccatgcaagataatgccaaattggtgatacactgatacacatttccaccagcaaagtgcaatagttctctttgcgctgcaggtttatcaactctgacaatcttcagacttcttgatttttcctaatctatgggtataaaaatagtatttcatcatggttttaatttgcatttcctaataatgaggttgaacaatttttttatgtttatcttccattctcatttctgtgaaatgccttttttttgttatttgtccccctgcccccaattttgttttattaggggttcttatgtattgtggatacagatgccttttgtacatatatgttgcaaaaatcttctctctgttaatgacttggttcttttatggtatattagtgaaaagaactgaatttaaatggtagttaaatttatcagtctcttatatgattagcactttttgtgtcatggttaagaaattactytctgtcccaaggtctcgaggatatctttatttttttttcaaaggcttgcccttagtgttccaaatttatttggaattgattctttgaaaagggtaaggtagtagtccaatttcatttttctccatatggataactatttgttttagtaactttattgaatagtccagtggctagagtgccatctgtcatttcatgattctttttttgcctagttctgtgttgggctcttccrttctattcatcaagttgtctatctctgcacaaatagtacatgatatagttttaattactataattctaatgagtcttgatatctagtaggacaagtatctgtattttcattaggagctgcctgacgcattcatataaaatgagaatcagcttatcaaattccttggaaaagtattcttgtggttttaattagaattttattgaatttgagaaattagaagtagaattcttaaaaatgttgaattttctttttcataaacatactgtatcaccctcatttatttaggatttctttaattctgattttgctttgtaattttctgtattcaagtattgtacatcttttgctaaatttatttctaggagtttaatatttttgatgcttttgtaagttttatctaaaaacttgttttttatctagcaaccttgtataaatgttctttttaattctaataatttgcttatacattacattctttgatttttatctgtagacaatctttttttttttttttttttaagttctgtttcttactttactgtctaggacaaccaagtcataattgagcttcttttcttgttccatgttttaaatggagcggtataaacttgtcatctttaatattgatgtttggcgtgggtgtttgaaaaggtattctttatcaattaattcggtcccttttttttttttttttgagacggagtctctctctgtcgccaggtgggggtgcagtggtgcagtctcggctcattgcaacctctgcctccagggttcaagtgattccccttcctcagcctcccgagctgggactacaggcgcccgccaccatgcctggctaatttttgtatttttagtagagaccaggtttcatcatgttggccaggattttcttgattccttgacctcatgatccacctgcttcggcctcccaaagtgctgcgattacaggtgtgagccaccacacctggctcctctatttttccatgaaagtattttggttgtctttggtggtggtggtggtggccttatgtaaactcttcattgggcattaaattttaatgaatactttatctactaaagtaataatcatatggttttgctttaatctattaatatgataaattgaatatgtatatttttcttttgtatttatttatttatttattttttgagacggagtcttgctctgtcgcccaggctggagtgcagtggcacgatctcatctcagaatgtgtatatttttctaatgtcagactaactttgcatttccaatttggcaatatatattatcttttttcaatatgaacagtcttggatatgatttgttactaagagtcttacatgtgtgttcatgatttgagattggcttctttttttcttacacctaattagcctgtttttaatactggcctcagagaaaaaaaattatttttttattttttatttttgattctcagaagcgttttaagagtggaatgatctcacttgaaatttgatagaagtctcctgtaaaactatgtggacctggtggttttgtatttgggataaggtggggaaaaggtggaaattaactacaagtcccatctctatattgtataaccagtattcacttagtctgttctttttagtaggttgaatttttctaggaattagagcatttatttttttcatgtctgttatttctgtcttctctctgtcttgtcacaaggtttctatgttttattagtcttgacccaaaaatttaaaaaaaattttagtttttattgacactattttgtgtttgtgttgtgtttcactagtttatactattacgtttgttaccttttctatttacttgagctaattttgctgttctttttgtaattttttagattgggttcttaatttttagcttttcttctgtaatacaaacattaaagctgtacatttacctctaagtactgatttttgtggcctctcatactatttttttaaaaaatttgttaaaaattgcttttggacctaatgtattgttagattttatacatatgtccagtgtgcttgagaaaaatatctcttctctgattgttacatatagggtttgctatgttttcattaaatcatgttcatttattatgtggttcagatattctgtatcttcattttttccctctggttgtcaaaaacaagatacgtagaaatgtgtttgctgtattactttttatttatatattgctgtataatctttgctgtattactataccttgaggctattttattatgtagagcaagcttacaatgtttcagtagcatatatttttaccgtttttgtttttttgtcattttaaagtaccacattactctgtgtgtttttatttatttagtctgacagtcttttaagagtttggtttgtttgtattcattatgataggggtttgttactaccatttacttaacgactactttctgtttttctctttctgcgcccctcctccttgccttgcctttttgattgattgaggactgtttgcttattagttttggtgttttgttttgttttgctcataattccattccttctttacacccatttttggaggctatacactatttctgtatccttagtggttctgaaactttactgtgcttacttaaaaagaagtcgtaagttaataatcttaactcattctagtataagacaatgattgtgaaacagtttaattttaatcagctcctttcctgattaaatgtttccagactagtgacttttaaaatgccagttgcttctgtttaactcaaaagtttgtccggctcacaaatgccattttggaaatgccatgtagcctgttcttacaatctaagagtattctgcaatggaaaaccagcttcagggaggtgctccattaggaaaatctagaaaccaaaaactgtggataatcactttgctgaggttttcattccctgaagaagcaaaagttgctagtctccctttgaacaaattttatgcctagcttttcttgggtttagagggcaaaattaactttttttgttgaagtagtgtgttatgaaggctaaagcgaacatcattatttcaaaggaaaagtaaaatagaatatggtcttactcacctggtagcaattgcataaaataacgtgtatccaacattaatttttaatcggtaatatttttttcctctggagagccagcttctgctatctgataaaaaatatatattatccttttatatacatgggttacaaaaaagtcatttgactaacttattcaaatggcccctatttaacgaacctctgtagtagatagcgtggataagataatgaagtttcaaagaaacatttgagtcatttagtatttttcaatatctttatatcttaggactttctcatttgtcagtgtctcatttgacccatttctttattcttattctttattcttaactccagattttttaacttgatatttattttcttctaagaaaaatttaccatctctttgaaacactgtaatttggacatgcaaagaaaacaaagttgcaaaaatgtaattattaaatatgcctccttattcccaactgattcagaaccactgcaatttttgggcaagcgctttaatttaggattatcaaacactgtctcagcccaaaatctccttaagctgataagcaacttcagcaaagtctcaggatacaaaatcaatgtgcaaaaatcacaagcattcttaaacaccaataacagacgcagagccaaatcatgagtgaactcccattcacaattgcttcaaagagaataaaatacctaggaatccaacttacaagggatatgaaggacctcttcaaggagaactacaaaccactgctcaacgaaataaaagaggacacaaacaaatggaagaacattccatgctcatggataggaagaatcaatattgtaaaaacggccatactgcccaaggtaatttatagattcaatgccatccccatcaaggtaccaacgactttcttcacagaattggaaacaactactttaaagttcatatggcaccaaaaaagagcccgcattgccaagacaatcctaagccaaaagagcaaagctggaggcatcacgctacctgacttcaaactatactacaaggctacagtaaccaaaacagcagggtactggtaccaaaacggagatatagaccaatggaacagaacagagccttcagaaataataccacacatctacaactatctgatctttgacaaacctgacaaaaacaagaaatggggaaaggatttcctatttaataaatggtgctgggaaaagtggctagccatatgtagaaagctgaaactggatcccttccttacaccttatacaaaaattaattcaagatggattaaagacttaaatattagacctaaaaccataaaaaccctagaagaaaacctaggcaataccatttaggacataggcatgggcaaagacttcatgtctaaaacaccaaaagcaatggcaacaaaagccaaaatagacaaatgggatctcattaaactaaagagcttctgcacagcaaaagaaactaccatcagagtgaacaggcaacctacagaatgggagaaaatttttgcaagctacccatctgacaaagggctaatacccagaatctacaaagaactcaaacaaatttagaagaaaaaaacaaccccatcaacaagtgggcgaaggatatgaacagacacttctcaaaagaagacatttatgcagccaaaagacacatgaaaaaatgctcatcatcactggccatcagagaaatgcaaatcaaaaccacaatgagataccatctcacaccagttagaatggcaatcattaaaaagtcaggaaacaacaggtgctggagaggacgtggagaaataggaacacttttacactgttggtgggactgtaaactagttcaaccattgtggaagacagtgtggcaatttctcaaggatcttgaactagaaataccatttgacccaccaatcccattactgggtatatacccaaaggattataaatcatgctgctataaagacacatacacatgtatgtttattgtggcagtattcacagtagcaaagacttggaaccaacccaaatgtccatcaatgatagactggattaagaaaatgtggcacatatacaccatggaatactgtgcagccataagaaaggatgagttcatgtcctttgtagggacatggatgaagctggaaaccatcattctcagcaaactgttgcaagaacagaaaaccaaacaccacaggttctcactcataggtgggaattgaacaatgagaacacttggacacaggaaggggaacatcacacaccgggacctaccgtggggtggggggagcggggagagatagcattaggagatacacctaatgtaaatgacaagttaatgggtgcaacacaccaacatggcacatgtatacatatgtaacgaacctgcacgttgtgcacatgtaccctagaacttaaagtataataaaaaaaattaaaaagaaatttcctggaactagcatgtcagaataccattttatgtccagcttaaagtttagtgtgaaccttgaattttatttcatttctatttatattcaagtttctaaagaacaagtttccatgaacaaatgtggctttcaacaggtgaaatgatttgagtaatagaaaaaaattagaatttgaaaaatttgaagaatttaaaaagttaacatatttgaagaatatgaaatactaacattagggaagattagtttgatacttttaatttaggaactattagagaaaggggaaagacaactaatattttaggtgattctatttagataaatggcaaaatccgccttggaaaagctacataataaatatacaagtcatttgtaaactattcggatcacttaggtgctttatggttagtattcatattttaaaattaatgtacattacagcaaaataactgttttgttttaatatttatatgcattctatataagggataaccttttgaattgtaaaaagtgaaacctacaaagtaaaacctacacctattatactatgatttgcatgatgtaaggctataaatgtatattcctttttctgaactattctttcaagggttgcagtagtactgtcagctgctgatttttctttttgaacttaaacacagcttttgtcattgtcatggaaatgttaccatgttctttattttaaaatgtatttataaaaaatgtgaattactttttaaatagtaataactactctta

SEQ ID NO: 96519 - DNA, 13225 bp, Homo sapiens
  misc_feature (1)...(13225): n = A,T,C or G
agaaaaaaaaaaattattcaggcatggtggcactcgcctgtagtcccagctacttagctactcaggaggccgacatgggacgactgcttcagctcaggagttcaaggctgctgtgagctatgattgcaccactgcactccagcctgggtgacagagcaagactgtgtctaaaaaaacaaaacaaaacaaaaaaaacaaaaaccaaccccacaaaactttatttatggacactgacacaggaaacttacaacattttcaaatgtcataaaatattattcttttgattttttttcattcatttaaaaatgtaaaaaccatttttaggtggcaggccatagaaaaactggcagcaaattgtgccgattcttagtaaaaagaattttaaaaagaaaaagaaaaacaggcagcaggccagatttgatcctctgcccttagtttgccaactcctgctctaaaccctttctacctcagttcagttaaaaatacctattgcatatgataaccctgagtgtacagagtaggaaagaaggtagaagaagttgaatctgccatgtgttaaggatttttgttttgttttgtttttaaacttcgttctgcaataatttcaggcttagaaacaaaaagttgaaaaaaagagtaaaaataattccttcattgattttccaaatgttaacattttaccacatttgcttttctttctcacgttcttttcatgcctggaataccatttctctccctctctctctctctctttctctctctctccatttttttttgtgaactgtttgagaatcagttgcaaagatgatgcccttttgtttcctaaaaaacaaggatgttcttttatataaccattaccaaaattaccattaccgttacccaaatcaatacactaatacaaaactattatttaatatttagaccgtgtaccattatcaaaatcagaaagttaacattgatgcggccgggcacagtggctcatgcctgtaatcccagcactttgggaggccgaggtgggcaaatcacttgaggtcaagagctccagaccagcctggctaacatggtgataccccatctctactaaaaatacaaaaattagccaagcctagtggtgggtgcctgtaatcccagctactttggaggctgaggtgggagaatcacttgaacctgggaggcggaggttgcagtgagccgagattgtgccactgcactccagcctgggtgacagagtgagactctgtccccccacccccccaaaaaggaaattaacattgatgcatggtactaatctaacctacaagtctaattctgatttcatcaactgtcccactaacatcctgtatataccaagcttcttatcgtcatcatctctggtaatttccccaattatccagtgaatttgatattattagccctgctttaccaacaaagaaactaagctcagagaggttaagtaatttgcccacagttacacagacagtaagtggcagagctggaattccaactcaagtgtacttcctccagagcccttgttctttaatactgaactagaattgcagagcttggaaaggacttcacagtgcaaggacacggaattggtactacaggcatgaaaagaagccaggcacggtggctcatgtctgtaattccagcattttgggagttccaggcaggtagattgcttgatcccagaacttcaagacctgcctgggaaacgtggtgagaccctgtctctacaaaaaatacaaaaattagccgggtgtggtggcgcacgcctgtagtcccagccacttggtaggctgagacgggagaattgcttgagcccaggaggccaaagctgcagtaagnnnnnnnnnnnnnnnnnnnnnnnnnnnnnnnnnnnnnnnnnnnnnnnnnnnnnnnncactccagcctgggtgacagagtgaggaccctgtctcaaaaaacacaaaaacaaaacaaaaaaacaaccccccaaaccaaaaaacaaaaacctaagaaaagccagtaactgatactttctcaatctctcaatgaaatgtcctttctgatactttctcaatctctcaaggacatgtccggtaggaaaggagaaaggagtgaacaaatagaattttggctactttgttatacaatgtaaaaaggctttttggaacaccaaggcataaactaaggttatttaaaaaaagaaaatttttttttgatacggaatttcgctcttattgcccaggctggagcgcaatggctcgatctcggtttactgcaacctccacctcccgggttcaagcgattctcctgtctcagcctcctcagtagctgggattacaggcgcctgccaccacgcccggctaatttttgtatttttagtagagacggggtttcatcatactggtcaggctggtctggaactcctgacctcaggcgatccgcccgcctcggcctcccaaagtgctgggattacaggcgtgagcaggattttcattctaacaagttccaggtgagttgatacagtggctccagggaccgaccacattttgctaacccccggcttagagttattcaaagagcccgtatatgagacgcggattccatctagggcgtttaggtttaatgattaacaatttccctcttctgctctctcaaggcagccagggaacagggagaccatgattcatgtccaatccccgaggcgcgttatcaagctgctgaaagcaggccctccggactgcagttccaaagggtcccttcccagggaagacgcctgcaaaacccagatagtactatcctggagtcacgcggcggcgcgcagcctcctagccgcccccacccgcccggctcggccacagcggggcggggcgcggggctgagcaggcgcgagggctggctgctgggccgacgaggggcggtgccaggccgtgggtccttagtcaagtgacgcgaagcggccggcctgggcgccgactgcagagccgggaggctggtggtcatgccggggttcctggttcgcatcctccctctgctgctggttctgctgcttctgggccctacgcgcggcttgcgcgtaagtctgcgggacccgggtacggggaggcattgctaggggacaggctggcggggaaccgggctggggtcgcagccacccgcggtcccgcagggcggggagcctgagccccgaagtgccccccagcaggctcgcggccggcggaacgcaggcagtggaccggccttccccgtcgggggcgggccgggcggggcgcgcgtccttccaggcagctcggtcgcttgtgcgttccgctccggccgccctttgcgcttggatccacttccccatctgtaacgaggtgttgagacgaggtgcgtgtaaacatttcctaagttggctttccgggaggggattccaagttgcgcgggttagagggtgcctccggctctggtttggggcgccctcgctttcccagttggtgctctgcggagcgctccggaaggagaaaaatggggtcaggagaggcccttgcagtgggaacattgggttatttcccctctgggtgctctccctcttcgtgcatcttgttcctttctcaccactccccgtcgcctgccctttggcttgggtttttctttgtatttgtgggaccgttttccttcggcgtttgggggtccaggttgagggggggaataggcaggctgccgggggatgccatcgttgatcggggcagggctggcgaggcgaataggtgaggtgcggggcgtgcacagttggtgggagaggaaggacagcttcactcgctgcgtccgagctgaggcgactggctgaggggctccaaagcgctgcctggggaggtttgcatcacacctgcggaaaggagagtgggtagttgcaagctgctcctctgcacgttccgcggaccaactttggttcctccagggtgtaggtgggctgagcctgcagtatgctttaagtaagagctggtagcatttgacaccgttgacttgtaagttacaccctttaataacgctttcaataacgtgcctagggcagagaaaagtggtacatttatctacaaccaagattgaacatcttaagtatttggaaaacagctgctgaaaatgttttcattttgggaaaaagtcagcacagattatttgctgctccctcttcaccccgtctgtggttcccctaccccagtatgtagacagagttttcttgtccagaaggcccgtaggaccttaggagtcagagctagccagctgtgagaaccactggggaaggtggaactggggcacagttcaggagaacagtggcagggtaaggggctaggggaaaggcagatcttaaccagtatctgggagtgggggtagggagagagagaaggatttatgaaccaggaacaggtggacagggtcaatctgtctgatgtgagctcatcagtcttgtgcagcgtcattgggtcagggtggatgccctgtggctgccatacctgaggcccacacagggaggctggcatcaccccaggaattctcatttcaggtgcctaggtgtccctcttgggcttctgtgcccacagctaaagaaagataccagcagtctagctttccattatctccttgtttacatttctttagggttcacgccattctcctgcctcagcctcccgagtagctgggactacaggcgcccgccatcacacccgactaatttttttctttttttgtatttttagtagagacggggtttcaccatgttagccaggatggtctcgatctcctgacctcgtgacccagcggttctcaaattttaactaaattttagctgtcctagaaattaagagaatattcctttttttttttttttttttttttttgagacagagtctcgctcttttgcccaggctggagtgcagtggcacgatcttggctcactacaacttccacctcccaggttcaagtgattctcctgcctcagcctcccgagtagctgggattacatgcatccaccaccatgcctggctaatttttgaatttttagtagagacagggttttaccatgttggccaggctggtcttgaactcctgacctcaggtaatctgcctgcctcggcctcccaaagtgctggaattataggcgtcagccactgtgcccagccctagagaatattttaaactatttgttaagaaatactacatcattacacgttaataaacaatatatatatttgaaaaacaatagtatttctccccaaattttagggtgaagagttgcactgttttacatttctgcaaatctctttcaatgtctcttaatagaagacagtcaaattttcatgtttatttctgcattaaatctgttgccatatcacatgtcacatagcctctggaagactccaccctcaggacagagtgagaatggaaaaggcagtaatggcttggaattataataaaaatagttttgactaattggacccctgaagggctctctccagaccacactttgaataccgctgatttggaatgtttttataaaacaagtacatgcttactgtagagaaactttaaacgtatagaacatgtggtaagaaaatgaaaactgcccatcatgtcacaatgctgtgagtttctttttgaataataaagtatagctagcaactgactggtatttgagtagcttggattcaaggtgggttgggcagatgtaagtggcctttgagttttgaatgggtacaaggacactctaatatcccacaaagctgatgctggttcctggttgcaggcggagttgacctggaaacctctccttggccactgtcctttctaaggaactcatttccagagtccaccagcacagaactggtgggggagcctactaggagcagagaaaatggccatcttcaggcagctgtccctaggcgcgaaggccaccctggctgctgtcactgtcttcgtgtccatgatcgcctcccgctcgtatctggcagagagccttgagctcagggcctggcgttggctgcttcgcttgcagcttgccctgtttgtcaactcgctcttgctcattggctccctctacatttggcgcagcacagtgagcaacctctgccactccccagctgcagagtcaacctgttttcagctttggaaggtggtggttctggcatttctggccctggcccattccagtttctttaccatgttctttttagtggccgaagagccctatctcttttccttggcggcctactcctgcctgggtgcttacatcatcatgctcttcttcctcttcatcctcagcggcatggagcaggcctaccagctcttggcctggcgcagtggtagggtcgtgggcagccttgagaagacaaggaagctcgtgctcaggcctgccctggcagtgggagtgactgctgtgctcagcgtggcygggattctgaatgccgcgcagcccccggctgtgaaaactgtggaggtgcccatycatcagctgcctgcctcaatgaacaacctcaagatcgtgctcctctcagacattcacttgggccccacagtgggcaggaccaagatggaaatgtttgtgaggatggtgaatgtgctggaaccagacatcacggtgattgtgggtgacctctccgactcagaagcctcggtcctgcggacggctgtcgctcctctgggccagcttcattcacatctcggtgcctacttcgtcacaggcaatcatgagtactacacgtcagatgtcagcaactggtttgcacttctggaatccctgcatgtccagcctcttcataatgagaacgtgaagatttcccgccacacgggcccaacgtggtggtggtggcagtggcagtgggagtgaggatgaggactggatctgcttggctggggtggacgatattgaagcagacatcctgcactactctggccatggcatggatcttgacaaggccctggagggctgcagcccagaccacacaatcatcttgctagctcaccagcccctggctgccaagagagctctccaggctcggccagatattaacctgatcctttctgggcacacacatgctgggcagatcttccccttgaacgtagcagcctatctcctgaatcccttctttgctggtctctaccaggtggcccaggctacattcgtgtatgtcagcccaggcacagcctactaygggatacccatgaggctgggtagcagggccgagatcacagagctcatcctgcagcggtctccctgaactggccctgccctgtgcacctctgccctgcccttgtcctcgaccctccatcctgcttcagagtggtttgcctgcttttcccctccagccttgcccactcatccttgcctacacacccttggtcacaagcctgactcaaacagtgacttatggtgggcctgcctggcatgttcaggctggtttaactatttccttggccagttgctttttttgatgcacttgtgagatcactaaggtcacatatattagcactcccctctattttccagatgatgtggaatggggaccttctcctgcagagctcccagggatgaacctcccctcggggttgctagaaaggcatacctctagaaggtggggcggggaggagcaggagcatttttctcctggtgttttaaaattgtctttaggacttaagtggtttccagaatcattgatccagagcctttctggggaaggggtagtgttgccaggtaatttgggagaacaggcaagatggaagggccctctggctgctagagaagaatattttcttttcctctgattctatcaggatcacctctattgagggcatcagcaaaatctactggaatgcaaagctcctcctgttccaggccttgagggatgctatttaactgtctgtgctcctgggcctttgggggcaaggtcaggggagaagaacggtgggcgccatggtcggtgatggtgagaacatggctgcttaggaattcagagggctttgcctcccttgtctcattttatacaacccttcggggagctcactggggacaggctgcttttccctatttggagataaggaaaccaaggcaaagagagatagggcacaggcagtatgacaagatatgtaggagatttggggctagaaaccaggtcttgtacctcccagtaaaagcggtgcttttgcccttttgccagaagcaatagatcctttgatcctgagatggagataagcacccgtgttagaaaaggcctcactgagaagacagggctgggctggtttcctgctgggtgatttaggcttgtgatggaaagtcttcctccaatggggagtgaagacactcgctctgactggagaggctaaccctgctgctcactcatagggcagcgttgggtgggtgactttccctcactcagccttggtttccatcaaccctaaaatggggataattatcgtatctacctcaagattgttttgtcaggagggatccatcaagccttgtgcatgagttccacatggcacagcgtgcacagtaaacactcaatgttaatttttcaacgttccagtggagcttgctaaggaactctgttgggcacaggtgcccagaggattcatggagcagccagtcctggggaatgtgagtgggtagcgagctgcctgctgctggggcaggtgatgtgtcaaagcagcaactgctaggggtttgccttcctcccctcatgtgcattctggcaggcaaagggggtttcttcctttcctccttgtcctcctggtgtatagtggggttctgggggatctggagaccaccctttttgttcccaggcagccacggtattgacagtgggccataccatgcagtttaaaatgtatctttgagttgaaattttggtggtttccttattcttttttctctcttcactgtccttccaaactcacttttcttgtgtcccgaccgcattttgtgaatcatccttactccctttaagttctcgctttggatttcaccaggtgggctagatggtgccatttcacttccactgtttgatgcggctggtaatgtttgactcacctgttacgtgttatttcactggtttcttgattttacatctttctcatcagtgacctgggcttgatgaaattagctttcattaagtcctattttttttttaattttgcatccttacctcttttctttctcttgaatgccatcattgtgtggtcttatgtacccttcatccactctgaagtccttgcttgactgattgctttctattagcagaaagaaaacaggtccatcctatgtatctgagaaacaacatcaacaccctctcgtatgtggtttgtattccctgacgcggcggacatttttgcagcagaaatttctccatcactgtccagattctggccctggtgggcaggtctccatgacacctttagtccctctgttcaacattcttaaaccatggacctttttgtttgtttgtggccgggggaggtggtgagaaacgttacttgaagcttgatcattctttcaatttcatttgtttctttatttttaatctgttagatgcaaattgaaatgcaatgctttttgaaaatcagcaatagtgtctgtagtatatgatgctgtcacaaaatctcaataaattgatcctgctgccattccttccaaatacccatccatgcttttcttcccctcgtgttttgtttggtttgttttaaacttttcgtacatgtacctctctcccagctttaacaagcatgacgagaccactctgccatcctttctcagctacccctgccccacctgtactctttattttttggctggagtatattaaggtaaatcatagaaaacataatgttaccccaaaattacttcagtatgaatcctttttcaaaaagcatagctatagtgtcattatcatatccaatgaaattaacagtgattcttgaatatcatctaatagctagttaggagatttggggctagtagccagatttttgacctctttaaagaagtgttctttccactctctgagtattaagtagctgtatctgtcacaaatgagtacagaattcaaatgcagttaactgtgtgaagagttagtgtttagtttttcctgattatctcaactatattttttattgtggcaaaaaaattactatcttaaccattttttttgttctttttgttgttgttgatcttaaccatttttaagtgaatagttcaacagtgttaggtatattcacattgttgtgaaattgatctaattgatctgtagaactttttcatcttgcaaatctatatacccattgagcaacaaggctccatttcccccttcctccagcccctggtgaccacaattctactttctgtttctatgaatttgactgctttagatacctcgtataagtgaaatcatgcagtttttgtctttttgtggcgggcttatttcagttagtataatgaccttaaggttgtggcacgtgactggatttctgtcctttttaaggctggactacagtaatactcttgtattttcatgccacattttgtttatccatgttgagcatgttttcatgggcttgttggccacctgtataccttctttggagaaatgtctattcaagtcctttgcctatctttaaatcaggttatttaatttattgttgtggagatgtaggagttctttatatattctggacattaaccccttatcagatacgtaatttgcagatattttcttcagttctgtacattgccttttcactgattgtgacctttgatgcacagagttttaaagtttaatgcaggcccatttctctatttttgcttttattttggcatcatatccaagaaatcattgccaagttcaatatcatgtagcttttttccccatgttttcttctaggagtgttatagttttgggtcttacgtttaggtctttaacccatattgaattaatttttgtgtatggtataagataagggtccaacttcattctcttgcctgtgaatatccagttttcccagcactgttttctgaagaaattgtccttttctaacatcaagagatcttggcatctttgttgaaaatcatttgaccatatacacaagagtttgtttcttggtgttctatcctctcattgctctatgtctgtctttatgtcattaccatgctattctgattaccacagctttgcaatatgttttgaaatcaggaggtatgagtctttcaactttgctcttctttttcaagactttagtctatttggtgtctgttgagattccatatgaattttaggataaatttttctatttctgcaagaaatgctattgggatttttatagggattgtgttgaatctgtgaatcactttgggtagtatgaacatcttaacaatatgaaccttccactccatgaacataggatgttttttccatttgtttgtgtcttctttaatttctttttaacagtgttttgtagttttcagtgtagtctttcaccttagttaggcctatttctaagtattttattctttttgatgcttttatatatggaattttttgaaattccatttaggattgttcatttttagggtatagagaagcaactgattttggtatgttgctttttgtatcctgcaactttgctgaattcatttattagttctaacagtttgtgtgtgtgtgtgtgtgtgtgtgtgtgtgtgtgtgtgtagtctttagggtttcctacatctgagattatatcatctgtgaatcgatcattttacttctcctttctaatttgaatgccttttatttctttcttgcctagttgctctgactaggacttccaaaactatgttgagtagaagtggcaaaaacagacatcttgcctttttcctgatcttagaggaaaagcttgcagtctttcactattgaatatgatgttagctatgggctcttcacatgtgggctttatgatgtggaggtagttttcttctattttgcatttgttgagttgttggtttttttaatcatgaaagggtgttgaatgcttgtcatgctttctctgcctcaatttagattatcatgtggtttttgcccttcaatctgttaatttggtgtattatattgattgatttttatatgttaaaccattcttgcatcttaggaataaatcccacttgatcatagtatataacccttttaatgtactgttgaattcagtttgctagtattttgttgaggatttttgcatcaatattcaccaggaatattattgttctgtagttttcttgtagtgtatttgtctggctttggtattaggataatattggtctcatagaataaatttagaaatgttcctcctcttcaacttttgtaatagtttcaggaggattggtattaattcttctttaaatgtttggtagaattctccagtgaagccatctggttctaggtttttctttgagtgtgtgtgtgtgtgtgtgtgtgtgtgtgtgtgtgtgtgtgtgcgcgcgcatgctgacacatggtcttgctctgtccccggggctggagtgcagaggcatgatcttgggtcactgcaacctccacctcccaggttcaagcgattctccttcctcagcctcccaagtagccaggaccacaggcacgcgccaccacacccggctaatttttgtatttttagtagagacggggtttcaccatgttggccaggctggtctcaaactcttgacctcaagtgatctggccgcttccccctcccaaagtgctgggattacaggcgggagccaccgtacccggcctctttgaggtttttgatgactgattcaatctttttaatagctattggtctgtatagattttctgtttcttcatgattcggtcttggtgggctgggtgtgtctagaaatttatccatatcttctaggttatccaatttgttggcatacagttgttcatgctattctcttacaattctttatttctgtgtcatcagttataatgtcccctcttcatttctgatttatttatatcttcttttttttaaatctagttaagtttctcaattttgttgatttttttttcaaaaaccaactgtttttttttcctactatctttctattctcttttgtttatttctactctaatattttatttccttttgctagctttgggtttatttttttcttcttatggaattgtctttttatagttattttgtttgaaacaggatctaaaaataggtctatatt

SEQ ID NO: 96520 - DNA, 32550 bp, Homo sapiens
gtataggtggtggtagcacccaccaccacgcctggctaatttttatatttttagtagagacagggtttcaccacgttggtcaggctggtctcaaactcctaacctcaggtgatccacccgccttggcctcccaaagtgctgggattacaggcatgaagcactgcgcccggcctttttaattttttttggacagtcttgctctgttgcccaggctggagtgcaacggcacaatttcggctcactgcaacctccacctccctggttcaaacgattctcctgactcagcctcccaagcagctgggattacaggcacccaccaccatgtccaggtaatttttatgtttttattttatttatttatttttaattttattttttgagacagagtttcgctcttgttgcctaggctggagtgcaatggtacgatcttggctcatacaacctctgcctcccaggttcaagcgattttactgcctcagcctcttgagtagctgggattacagacattcgccaccatgcccagctaattttgtatttttagtagagaaggggtttctccacgttggttaggttggtcttgaagtcccaacctcaggtgatccgcccgcctcagcctcccaaagtgctgggattacaggtgtgagccactgtgcccagctccagggctggttatctttgtattttcaggtagccagttctccccacgccctctactgaaagatctcatgcatcacattttctccctttggggtaagaccagagaacctggcctgtcctgcaagtcttgtgttattctgatcccagtcttcatgaactccactcattcattcaacacacattatgggttgagcaccaaccaggcatcgggcttttggaggagctggagatagagcaggaccaagatagacaaaaagcaaaaacccctgccctgtaggaacttgcattctgatggtgggacacagccagtgaatgagaagtttgataaatggctaaattatttagcatattagaaagtgccaaagattaaagtggagagggatcaggggattaggaatgtatgtgtgtttaggggtgtgagttgttaatttttttttttaagacagagtttcactctgtcacccaggctggagtgtagtggcacgatcttggctcactgcgatgtctgcctcccgggttcaagggatgctcctgcctcagccccgctgagtagctggaaatacaggcgttcgccaccatgtctggctaatttttatatttttagtagagatggggtttcaccatgttggccagggtggtctcgaactcctgacttcaggcaatccgcctgcctcagcctcccagagttctgggattacaggcgtgagccattgtgcctggctttttttttttttttttttttttttgagactgagtctggctctattgcccagactggagtgcagtggcgcgatttcggctgactgcaaactctgcctcccaggctcaagtgattctcctgcctcagcctcctgagtggctgggattacaggtgcctgccaccacctggctaatttttttgtatttcaagaccaggctggtctcaaactcctaacctcaagtgatccacctgccttggcctcccaaagtactgggattacaggagtgagccaccatgcctggccttttttttgttttttgtttttttttgagacagtgtctcactttttcacccaggctgaagtgcagtggagtgcaatggcacgatctcaggtcactgcaacctccacctcccgggttcaagtaattctcctgcctcagtctcccgagtagctgggattacaggtgcatgccaccaggctcagctaatttttttgtatatttagtagagacagggtttcaccatgttggccatggctggtctcgaactcctgacctcaaatgatccacccgcctcagcctcccaaagtgctgggattacaggcatgagccactacgcccagcagtttcttccacttctaatagactctgctagtctaggaaatgtaccaaaaagacagcatggttaaaggtcagtatttcatgaccttttttatacttcctatttttattttatttaggtttcttggttgatacaaaacgtcaattgtagtggtagggaacctgcataaggaagcttcctaaacagaggcttcaagagagaacactaataggccgggcatgttggctcatgcctgtaatcccagcacttcggaagcccaaggcgggtggatcacctgaggccaggagttcaaagctggcctggccaacatggtgaaacccccctctactaaaaatacaaaaattagctgggcgtggtggcaggtgcctgtagtcctggctactcgggaggctgaggcgggagaatcgcttgaacccgggaggtagaggttgcagtgagccgagaacgtgccactacactctagcctgggccagagagtgagactctgtctcaaagaaaaaaaaaaggtcgggggaggcttgagagaatgggttcactttcttcctccatgtgaggacccataggtagtgccagcagtgaggcacaggccctttccagatacgcaacctacaggcgcctatatcgtggacctcccagcctccagaaccatgagaaagtaaatttctgttctttataaattacccagtttacttaaaaaaaaattttttttgagacagggtttccctctcttgcccaggctggagttaaggagcaccatctctgctcactgcagtctccgcctcccaggctcaagcaatcatcctaccttagcatcctgagtaactgggattgcaggcatatgccaccacgtctggctaatttttctattttttgtagagatgggatcttgctatattgcccaggctagtctcgaactcctgggctccagtgatcctcctgccctggcctcctaaagtgctgcgattgcaggcttgagccaccacacctgaccttgcttattccttttcacaatttctctgcctacattttaacgggatctctgaagggaggtgagtcaaaagtgtgatccagttttgttgtattgaatagaaggtctttaaatttttattgtatttaaaactcggtagcagctgggcaaggtggctcatgcttgtaatctcagcactttgagaagctcaggcagggaggattgtttcaggcacaagttcgagatcagcttggggtaacacagtgagaccccattctttttttaatttcttttcttttcttttcttttatcagacagagttttgctctgttgcccaggctggagtgcaatggtgccaccttggccaactgcaacctccacctcccaggttcaagcgattctcctgcctcagcctcctgagtagctgggactacaggcgcgcaccactacgcccagctaatttttgtatttttagtagagaggagatttcaccacgtaggccaggctagtctcgaactcctgacctcaagtgatacaccagcttcggcctcccaaagtgctgggattacaggtatgagccactgcgcccagccgagaccccattcttagacacacacacacacacacacacacacacacatgagagagagagacagtgagagagagaattagagaattagctggtcatggtggtgcatgcctgtaatcccagctactcaggacgctgaggaatgagaattgcttgaggcagaggctgcagtgagccaagatcgtgccactgcactccagcctgggcgacagagctagaccctgtctcaaaacaacaacaaaaaacaactactttgcactgtacagagactatatatccacaggccaacctccctcccattccggtcccacaccagccttttaataggttttttacaaggccgggcgcggtggctcacgcctgtaatcccagcactttgggaggccgaggcgggcggatcacaaggtcaggagatcgagaccatcctggctaacatggtgaaagcccgtctctactaaaaaaaaaaaaaaaaaaaaaaatacaaaaaattaaccgggcctggtggcaggcgccagtagtcccagctacttgggaggctgaggcaggagaacggcgtgaacccgggaggcggagcttacagtgagccgagatcgcaccactgcactccagcctgggcgacagagcaagactccgtctcaaaaaaaaaaataggctttttactatccggtttaaatagagaatttttttttgcttgttttttgttttctctctttttttttttttttttttgttttttgagacagagtctcactctgtcgcccaggctggagtgcaggggcccgatctcggctcactgcaacctcctcctcccggattcaagcgattctcctgcctcagcctcccgactagctaggatacaggcgcgcaccaccacgcccggctaatttttgtatttttggaagagacggggtgtcaccatgttggccaggatggtctcaaactcctgacctcaagtgatccgcccgcctcggcctccccccagagtgctgggagtacaggcgtgagccaccgcacccggcctgagaatgttcgtattctactcatgaagacttcgtaaatattggggtccagacctagatactacaacgttacaaatctgttctgatcactgctttgccagatccctggtaaatccacagctctggccgggggcgggggggccgcatgcaattcccttctttcctacagggggcgctgcagagaagggcagagcagagcgcgcagttcgcgggcaggggccgcttctccaggatagcgcgcgtccgagggggtgggtctgtgctagccctgcgcaacctcaggggcgggaacaactctggctctgcccccgccggctggagcgccttctcattggaggagggaacggtcacttggcagcgccgttgggattggaggaagagggtctcgggtggagtgacgctgaggcggcgagggggctggtggctggccgctgctgcccttcggtagctggtcccttaactcagtggtgaatggcgaccggatggagctctagggaagcgacagcagcggcgggtgggccgggttatgggcgccccgagtccgggcggcgtccccggtgtgccgctgacctgctgggtgggcgctgtcctcccggaggggggtccctttgctctcccggacccctttacccgtcacttcctcgccggtccctgaggcaggtccccggagccccgctgggcgtgaggtgcagggagcggccgcaggtggacccggggctggagggcgctcggccaccacccgagcgggtcttggccttgagcttccgagcgcctcaggttcagagctgcaccccacgagcccgggaggcggtggtccgcgccctgcctgggttgccccacggcgcccggcctccttcgaggggcctcggagcggcccggcccggcccggctgaggagtcagagctcgcgctccccttgcccgggagctgcagcccggctcctccgtgcgggcgctcgttcgctgatcgcgggcacctcgggccaaatccaccccctccgagacccgctccgctttctaggagtctctttcccagacctggtgccacctgttgctgggtctcccactaagccttcgagatctttggcatagcttcctttgaactcttcctccccgctgcggcttgagctgggcctgctaggagggttgctcagaattccaatgccagaaagaacgctccgtgccctgaaagctggagggaggagagaggacttcacctgggaaggaggagaaaagctttgaggggaggcacagttatttgtgtggtccttgaaaggcaagaagactggggcccgtggccctgaaaggggaggtggggctcccagcagaggggactgaggtcttcataaacaatgagggaccagagcagagggaaggaggacgagattccagactctagttccaaacaaggcacctgtgatttctcatcccctgggcagtgactgccaggcgcccttcagcggacacctgggacttgcagtgttatgtgcccagggattttcctggacgggattgtgaagtagcgggtaaggtcatcaggcaggttggggtcagatgcagatgttcgcttgtggtcattcctgaaatgagaatctggcagctcacgttatttcagaaggtgctaggatcacttttgacagtgataccaaaaaattgatggtattctggtgaccctgtgtgaaaaatgaaatgttcgtgcaatctggagacactactgggaccagattaatctgtttttgtttccttatttatttatttttgagacggagtttagctcttgttgcccaggctggagtacaatggcgcgatctcggctcactgcaacctccccctcctagattcaagcgattctcctgtcacaggctcccgagtacctgggattacaggcatgcaccaccacgcctggctaattttgtatttttagtagagacggggtttctccatgttggtcacgttggtcgtcaactcccaacctcaggtgatctgcctgcctcggcttcccaaagtgttgggattacaggtgtgagcctgcccgcccagccttttttttttgaggcggagtctcgctctgtctcccaggctgcagtgcagtagctcgatctcggctcactgcaagctccacctcctgggttcacaccattctcctgcctcagcctcccgagtagctgggattacaggcatgcacaccatgcccagctattttttttttttttttttagtagagacagggtttcaccatgttggctaggctggtctggaactcctgatctcaagtgacccasccacctcggcctttcaaagtgttgggattacaggcttgagccaccatgcctggcctatgccaattgtttcatagaatgtttacaatctagcttcctctgattttcttcattattagattcagattttttgttcagaatgccaccttcataggtgatgtacacttgtcagtggatcaccttaagagatgtcagtttatacctttgttgacaagtttgatcctttcgtgaagatggtgtctgtcagctctctccattgtaagggtacctgaaccctctcttaattaacagtcctatatggggtgatactttggaactgaatattctgttgactcttctggcttttagttcacttttatttcattaagaaaagattgagataagtggatttaggatgatagttttaatgtaccaaagtagaggatctgtatgcatgagaattgttttgatctcagaaattgttctgaaaattttaaactgcattgtgtacttaagtttaagattatttttatggatatataacttcaaggtgttggataccacggatcattcattcaatgtgtakacatttggccaagtgcaggctctgacctggaggtataagcagataggaggcgtggcccttgaccccaaatagatgagaatttggtggtaaatacataacctgtgtattagtccattttcatgctgctggtaaagacatccctaagactgggcaacttacaaaaraaagaggtttaattggacttacagttccatgcggctggggaagcctcacaatcttcatcgcggaaggcaaggaggagcaagtcctgtcttccgtggatggcagcaggcgaagagagaatgaggaaaatgcaaaatcagaaacccctgataaaaccatcagacctcttgagatgtactaccrcgagagcagtatgggggaggaaccgccgccatgattcaattatctcccaccaggtcccttgcacaacacatgggaattatgggaatagaattcaatatgagatttgtgtgcggacacagagccagaccatatcaacccgcatcccgtctttagctggaatgatggctgtattaggtacatgaggtctgatcttgtttgaggcaccaaagcctgctttcctgaagcatagttaatattttggccccacagaaaaggttatttgcagtttatgccaacttgttattgcaaaatcattgctctgaaatattcatttctaccaggaagctttggattgattttttttacccgcaatatctgmccaaccctccttattccagttgtttagatttcttttgtcatttttaatgaatctgaatgtcaaggaaggcagatctttttctggtatcaggattgattttattgtgtgataatacagatttcactaaactaaagtcctagarggtcttgtgataattaaagtacaacccaataatatttttcttgtgtcattgctggaatcaagactgggtcagatttggaccactcatttattcactcaacaaacatttactgagtgtcaattgtgtgccccccttttttttctctaggtaccaggtcaagatgccatggtgaacaaaacaaagccctttcccacatggagctttaattccaatggagggagggagaaaacaaccaacctgtgggctggaacagctggtcgtgagtgtcagggtgagggcagaaagtggtagggcctgtgtagctggggtggagtgccatttgtcgttgggtgatggggagaccctcgatggtgatgatattggagtcaaaatccgaaggaagtgaggaatgagccaacagctcttggggtaagagcaagtgttccagtccagggagcagccgattcagaggccctgaaacaggagcttacagaagaaacattgagggggccagggtgcctggagggactatgtgggcaagggggagaggaggaggggagggcaggtcctggagggctctactggggggttttgagcagagatgagatgattctgacttttatttttatttatttatttatttttttgagatggagtcttactctgtcgcccaggctagagtgcagwggcgcgatctcggctcactgcaagttctgcctcccgggttcacaccattctcctgcctcagcctcctgagtagctgggactacaggcgcccaccaccacgcccgcctaattttttgtatttttattagagatggggtttcacggtgttagccaggatggtctcaatctcctgacctcatgatccgccagtctcggcctcccaaagtcctgggattacaggtgtgagccactgcgcctggcctttttttttttttttttkgagatggagtctcactctgtcacccaggccggagtgcagtggcaggatctcagctcactgcagcctccgcctcctgggttccagcaattctctgcctcagcctcccgagtagctgggattataggcacccaccaccacacccgggtaatttttgtattattagtagagacagggtttcaccatcttggccaggctggtcttgaactcctgacctcatgatccacccaccttggcctcccaaagtgctgggattacagatgtgggccaccatgcccggccaatcctgactttttttaaagtacacagtccagtggtttttagtgtgttcagagagttgtataactgttgccacaatcaatttgagaatatttgcatcatcccgagaagaaatcccttacccagtggcattgacttactggctttgcgtggagaatagatggaaagcctgatcaggacaaagtctgctcaggctaggatccagagaccactgaggtaaggcaggccaggggcacacccacgaaccagggaggagcaggcaggcagtatccgagagaggtggttgactacagttggtagttcagtgggcatgtcctcttgttagagaggagtggaggggacagttggacctccaggcagggaggtggggtttggcaagagaggagtctcccattggacaatgggtagagttgcaggctgatgggcaatgattagtatcaaggcagctcagcacggagttgaaggaccacataagactcttaatccccaggaggacccatgtggtctgcctagaaccccagcttcagaggaactggctgtgttgacccagtcattcactggaacacaagatgaaagtggggccagctggaaggagggctgagtgctgagcctcatgctgcccacttggctcagtttctttgcattgctgccatttggggccagggtggtcttgaggccttggttgggagttaggtgactctgctgtggaggttagaggctagggagccagccattacagaccgcttgtgtttatgttctctatatctgttctctttcactgcaatatctctctgaaaatacatccttaaagaaataagctctttgagagcaggcatcttagacttttttcaccaatgttgccagcatatagaacgaactctgtaaatattcacagatggactgggcacagtggctcacgcctgtaatgccagcactttgggagggttaggtgggcagatcacctgaggtcaggagttcgagaccagcctggccaacatggcaaaaccccatygctactaaaaatgcaaaaaaaattagcttggcgtagtggcttgtgcctgtaatcccagctactcaggaggctgagacacgagaatctcttgcacccaggaggcggaggttgcagtgagctgagatcgygccactgcactccagcctgggtgacagagtgagactcataaataaataaataaatattcatggatgaatgaataaattcttaatgtttgtataagtttgctattgttactgtaatcaattccccaaattgagctacttaaaactatattgattttatcatcttatagttcttacttctggtggtcaaaagtccaaattggatgtctctgggctaaaaccaaggttcaacgggactatgttccttctagaggctctaggaagaatttgcttccttgactttaccagcttctagaggccacttgcattcctaggcccatggtcccctcctcttctccaaatccagcagtgtaacatcttcaaatctttctgactcaacctcctgtctcctcacaaagaaacttgtgattactttagacccatcttgaaaatttgcagtaaccccctactgcaagatctttaatcacagctgattaaatatccttaatttaatcacaggttttttaaaattattttcttcattttgttaaatagtctagcaaaccatttcttcagcaccttttgccttgtaacctattcacaggttttggggatgagaattttaacaccttttggggcccattctaccacagtgcttagtctcatttccccttatattcttttatttttttattaatttgagacaaggtcttactctgttgcccagcctggagtacagtggtgctatcatggctcactgtagcctccccctcctgggcgcaagtgattctcacacctcagcctcctgagtatctgggaccacaggtgtgagccaccgtgcccagctagttttttattttttattttttgtagagacaggttctccctatgtggcccagtctggtcttgaactcctgagctcacatgatcctcccacctcggcctcccaaagtgctaggattataggcrtgagccaccactcccagccgctttttgtttttgttttcgttttttattttttaaagacatggggtctygctctgttgtatagtgatttcgtgtcgtgtcatgcaatgatgtgatcatagctcactgtaaccttgagcttctgggctcacacaatcctcctgcctcagcctccccagtagctaggactacagagaagccaagacctcaggtacatgttcccacacatggccagtagctggagaccagccatggactgggcacagtggctcacgcctgtaatcccagcactttaggaggctgaggcgggcagatcacctgaggtcaggagtttgagaccagcctggccaacatggtgaaactccrtctctactaaaaatacaaaaaattagccggccgtggtggcacatgcctgtaatcccagctactcaggaggctgagacaggagartcgcttgaacccgggaggcggagsttgcagtgagccgagatggcgccactgcactacagcgtgggcaacaagagcgaaactctgtctcaaaaaaaaagaaaaaaaaaacagacattggctggccttgtggctcacacctgtaatgccagcactttgggaggccaaggtgggaggaytgcttgaggccaggagttcaagggtgcagtgagctatgattgaacactgcattccagcctgggcaacggagagggaccatgtctctaaaacacacacacacacacacacacacacacacacacacacacaattgtttcctcagttctggaggctggaagtctgagataagggtgccagcrtggttgggttctgactgggagttgggtgtcttctgtgtcctcacatagcagagagagagagatcaggagattgaaatctcttcctcttgtaaggccacagtcctatcatatttaacttgggaatctgtggtgcacacagttcagcccttagtagttggttggcacacctgtgtccagacccatttttctggaagtttccagcttcatgtgtttctggcagatcagggcgctgcctcctaggtcactgccctgatggttatgggacagtcagtaagaagctaggctccggcagtgccttgaattactgcaaaaagcagtgcttatcacagcttcagcagaagccttccacagcaggagtccggggtgtggtctcacatcggtgggggcagacagcagccagtggtgactaatctgagttctttgttttctgagacggagtctggctctgttgcccaggctggagggcagtggtgktgtgatcttggcttactgcaacctccgcctcccggattcaaccaattctccttcctcagcctcccaagtggctgggattacaggagtgtgccactgtgcccagataatttttgttgttggcttttttttggtggggaacagagtctcagtctgtcacccacgttccagtgcagtggcacaatctcagctcactgcaacctctgcctcccaggttccagtaattctcctgcctcagcctcccgagtaactgggattacagccatgcaccaccacacctagctaatttttattattattattaatagtagagatggggcttcaccatattggccaggctggtctcaaactcctgacctgaggtgatccacctgcctcrgcctcccaaagtgctgggattacaggtgtgagccaccatactggtcttaatctgagttcttggaggcaggtttgcatctcatttgttcacttggaccagtgaattcctgatgccatcatggaactttgtgcagactagatgttcgggtggtcagagggtcagattgatttgggagtggcaggtgaggacctgggatagaagatggtctttctgctttggaagagaagcatggtgctgtgtgggggcttggggatgagctggcggtgggtggtggacagggggcctcagctsggaggccaggcygctcttgactgagccaggggccacagtagctgcccaggcaggagggatytgtgtgggcaccagagctctggcaggtgcacatttgttagggaggagcagtatccagatacaggcactgctccctctggagttgctgccagccagggagggtgcgtctctgggcagcgaaaggcaggaatagctcctggcctaatggcagctggaaaagaagctgcargaggatatgggtttgttgtggaagaggtgggggctgaaaccctgaggaccaagaatcctgccctcaatttctgattgacactattgactaaaggtagcttttttcattggtggaggaagggcagtagttcatttgttcagcctcaatttatctatccatatcctgggcatgagagtagccaactctctcctgggatatatggagggatcacatgggacaatcaatagatataataattgtttcgaatcctgcatataccttataggtgtgaagtggttgtgtcctttgtgaattctcttggccaggcaccagtgggaggttagatagtgacctggagtttgtgttgaggaattagtagcctttgaatgcctgcctttgtagctgttgcacatacgttaggcttactttcaactaaatggaatwagctaattgatttcttcagaggtccaagtgataacagagccaaaccttgctagcccataggggtgagagtctagcttagtgacaggttgtttttgggagacacaccctttgtgtcttcacttctctgtcccctgtctccgtcctgctctccctctcacccattctgccagctctgctggccccatgggcacctagagcacatgcacttggtgaatctagatctttcttccctgagacattgctgcaccmcatcacctcatcacctcgcttccttcaggtctccaacaagtcaggtcatcctgaatattttctgtaaaactttctgttaaattctaccttcattattctttcattttagcctgccttgtttttctctgtggcactcatcactatttgatattgttgcatatttatgaatctattttctgtcttcttggtcgggaacataagctccattaggatggagactttgtctgttttgtttagattatattctcatcatctgaaatagtgcctgtagggcctcaaaaagttcatagcagattaatgagtgaatttaacaagtagacactattgatggtgctgagccacatctgggccctctctcagcgtggagcggaattatgcacacaggcgagtatacagactttgatgcctggtgctgccgttttgcaaaaagacttctccaacccactgtcttctttttgaatttttaaataaatctggccgggtgtcgtggctcacacctgtaatcccagcactttgrgaggccaaggcgggcggatcaygaggtcaggagttcgagaccagcctggccaacatggtgaaaccccatctctactaaatatacaaaaaaattagctrggcgaagtggcaggtgcctgtaatcccagctactcaggagactgaggcaggagaattgcttgaacccaggaggcggaggttgcagtgagctgagaccgtgccaccgcactccagcctgggcaacagagtgagactccggctcaaaaataaataaataagtaagtaagtctggatattttagtcctggaaaggataccacatttgaagtcaaagacctgatctgaaattctgtcttcaccattacttgctgtacctctgataaatgccctaacctccctcacccatgattttctcatctatgtaatgggaaaatacttgttctgcctacctggggcttaacatttattgtaaagatcaaatgaaatgagtttctccccacgccccacagtgtattggagtctggcagttgtctcctggccactgtcctctgttgcaagttgagaaatgtgatctttacttcctgtccaaccctaaagatccggaaggcgtggatccgtcacagagagttacacaacattgtctacccagatcccaattgaagaaaatccacaggaagacaaggcaggctcttttcatcctacccataatgactaatccatcattgcctcagtaacttgatcgtcagcccgggtagcagatatccctccccgaagctgatgaaacagggcagagaggaagtatccaagagaaaagggagggaggtttctctaaaacaagacctacaataaggacattattgtctaaaggaaataaataattgaaagtttctgaaaactgagatttcttcatctcaaatgactttattagcccaaaaaagtacaaaaattattttcctcacataatattaatggtgggaatcaaaatgaatcagtagatgggggatccagattggaatgctgctacaccatagtagaatccttctgggaacctacggtgggaaaggatcacttgtagcaaaaagatccagagttgtgcagagggaccacgtcagcagtgatcacttttcagtaaccgtctttttctgctgatcattttagggtcactatgaggtcagactggatggtgggagtggataccaattttttttttactgcctacatatgcttcatgagctataatttgtctttttttccaccacagatctctgtttcttttccttactttcatgcccataatttatcttacagatgtggtttaatgctttgctgatttgacatagctttcttttccatttcattgattgctacttaaagatgcacaaggctttcagggcctcacatgaatgatgagatgagatccaacrtcaagaatctgaagcaaagacacttgtggtttcagaacgtgtaaatagagcttggtgattttctgttgagtttgttgggggaatgcataatgattaggattaggtgtttttctattttaaaaagttgcttctagaggcatagaagacaattctgatacactatttaaattttccatacaaatccaggcatgtttatgcaaaagaaaaaaaaacaccagtacaaaacaaacaagatatgatctgactgggcatkgtggctcacccctgtaatcttagcactttgggaggccaaggcaggaggatcccttaaccacaggagttcaagaccagcctargcaacatagggagaacctctttaaaaaaaaawtttttttttaatttaaaaaaaaaaagatcaaatgagacaaatgctattcacatgtttcttgtcttgttatcgccacttcaarttcccatttattttgtccagtgaacatttgaaagactcagatatgaagttcaggggccatgcactttgtgcctctttccccagtattaatgcacttacacctgtctatttttctctttcttttagtgggggagataatgcctctttcttttgtgtacagcargacagtgggtcattgtgtatgtacagaagtgatgtggattcctcccagactcattagtgaccagggctgctgggcctgtttgggtttcctagactagagaagaagacaggaaccaggatgggaagacggacatgttacattttaagctggagcttcccctgcagtccacggagcacgttctcggtgtgcagctcatcctgactttctcctatcgattacacgtgagtcagtccgctgggaggctgtcctctcccttgtgtctttttagtagaccagagtccttcttctgatttctagaagacccgcactctagcgggccctcttccccatgtagtttgggatttaacttaggccaatggaatggttttcactagtcatattaactgacatgggctattaatagctcagaaggttctaggcagtgtttcctgcatggctacgctaggtatgtgagggcctcttaggtttcagccaagacaggtgactcttagcacccagagcccttcagatctgatggcggttggtattgttggtccttctaatgatttcagaggatggcgaccctcgtgatgcagagcatggcgtttctccagtcctcctttcctgtcccgggatcccagttatacgtgaacggagacctgaggctgcagcagaagcagccgctgagctgtggtggcctagatgcccgatacaaygtaagrgcgcttctcattgtccagctcctttgtttctgtgtgttactgttcgtcgagttctttgaagagggggataaaaagtagaaatatttctctgtgggtggctttcaagggaccttctgaggaattcttgccatgaagtcttttcagactatgaagatacacctgtatttacacctagagggagagagagaaaaaatctgtgtttgttgaataactaaattgtttattgcttttaggtacacatgtgcacgtgcacacacacgcacatacattctctcttccatacacatacttggagtatgtgtttccaagagatcatgtaaaatgttcatgtaaagtatttcagaaatactactagacagtttactgaacccataacatatgccagccttgagtgcaggggtttatacgtatcatctcctttaatcatcacagcaacctctgagctgcctgcactgtcctttcccagcactccagccagtggtcccattgctgtcccccttgctactttgcagcccccctggcctttttgctgttccttgaacccaagaagcagctgccacctsagggcttttgctcttgccatttcctctgccaggcatccatgtggcttatctaaccatgccattcaggtccctgttcagatatcgccaagcaccatccttccctgacctgcttctagagtagcagcccctccctccaccatctctcagccagactctccctcctgccccctggcctactcaggatatgtgtttgtgtgtttatttgttgtctccctcagccttgacagcagtggcatctcatacactatcatgtccatgcctagcacactgcctatcacttggtaagctcacagagaagcttgtttgaagaatgaactcattttggagaagacaaaactggggcttacagtgattaattttcccaaaggctcaaatcttgaaagtataacagagccaggaactttctgtgtccagaactcatgcatctaatcactcattcctcacctttattttatcacagtggggaccatagaagatgagctgctgtactttggaaaatgaaaaagggaaattatcagttataaggcatcctcccacctcagcctccaagggtactgggaatacagacatgagccactgcacctaaccttttttaaaacaatttcatttattattttatttattttttgtgacagagtttcactttgtcacccaggctgcagtgcagtggcgcaatcatggctcactgcagccttgacctccccaggctcagatgatcctcctacctcagccttctgagtagctagctgggactacaggtgcatgctaccacgcctggctaatttttacattttttgtagagacggggtttgccatgtttctcagggtggtgtcaaactcctggacccaagtgatccactcaccttggcctcccaacatgctgggattacaggtgtgagccactgtgcctgcccccgcaccccctttttaataaaaaaactagactctcactctggcccaggctggagtgcagtggcctacctatgactcattgtgcctcatactcctgggtacaagcagttcacccacctcaccctccctggaagctaggactggaggcaccacaatgcctagtttattgggattttttttttttttttttttttggtagagatgggatctttatgttgcccaggctggtcttgaacttstgtcctctcaagcagtcctcctgcctcagcctcccagattgctgggattacaggcatgagccatgacatccagctgagagagattttataaatagctttaaaatctatgaaacatggacactgaccacttattttcatccccacagaaggaaggacagagtaaatgaacttaaattgttgcaagagagtttattcatctttgaagaaaagattattgatactgcagtaggccaccaagaacaagagggtgctctgtgggaccagcctgggtgggcagaagggtagaaggaaaagrggaggagtctcccaggtgctcacaccacatcctcctcccgtgtcccaagtatctgtgaycaacgggaccagcccctttgcctatgactacgacctcacccatattgttgctgcctaccaggagaggaacggtgrgtcacaggtagagcccattcagccgctgctcaggactttcaaggttagtgggggcaacagagacaagcagaactggaacccttgtgatgaaaatgtcaaaacccgtgaatgctcaacgatgggagcaaatgtgctgcccaggatttgtctttttcgtsctgatcttcagacccgggaccacccgcacccctccagcatcccgtggtccagcaggctagtgatggttaaatgccatcattatcccaccactggcttggtgggtttctcttttaaaaaatataagcctaattgagttgttccccatagcacacctataacagatgccaaagacaaattgctgttcatgcttttcagagaaaaacagagaacgtgggtgastctccccacattagcagtccagcaggagaacaggagtgcccctgtttcctgccagaaggcacagtgtgctcattccttacagagctctaggccatggcatgtgttcactcggcatgtttggctggtccgtggctgaggwtgtctgtgaaggcatctagagtgttacttggcaaccagacatcatggagactatacacaaacatttcacaagggggaacgactgcaaatccagtattgctttctgattttatgtcatacattagcagcatttttataatagtaaagggaattctaaaacaaaactaaaaagcacggcccaagaaatcgatgttttttctttacttttttcactctttattcttatgtggattttaaaaatatacctattatgatagtgttgaaacactttggcatccaaattatttgtatttccatgtaataaaagtatttccccacactgctacaaagttctaatttttttttttyttgaagagacacagggtcttgctctgatgatcaggctggagtgcagtgctgtaatcatagctgattgtaaccttgaactcctgtgggctccgtgatcctctcacctcagcctcctgggccgctaggactacaggcacgtgccaccatgcccagctaatttttttttattttttagtagagagagggtctcaatatgttagccaagctgctctcaaactcctggcctcaagtgaccctcccaccttggcctcccagatccttgggattacaagaatgcgcgactttgtccagacaaacatattatttagagtggcaacatgttattctttcagttagccattcagcaattgtagatgatcacatgaccatttccaagtttttgacgtattttaatataaatatcgkattagtcctttctcacacagctgtaaagacatacctgagactgggtaatttataaagaaaagaggtttaactgacttagagttctgcatggctgggtaggcctcacaatcatggcagaaggcacctcttcacagggcggcagaagagagaatgagagcagagctaagtaagcagatctgataaaaccatcagatctggtgagaactcactatcatgagaatggcatggggaaactgcccccatgattcaattatctccacctggtcctgcccttgatccgtggggattgttacaattcaaggtgagatttgggtcatagagccaaaccatatcaaatgcttttttgacaagtatcttaacaaattatttgttaatctactttgtacatgcaatttttaatgctttcgaatgatttcttttagttctgaagtacagaatatcccacaggaataaaataatacttttatagccgagcgtggtggctcatgcctataatcccagcactttgggaggctgaggcaagcagatcacctgaggtcgggagttcaagaccagcctgaccaacatggagaaaccccatctctactaaaaatacaaatttagctgggcatggtggcacctgcctgtaatcccagctacttaggaagctgaggcaggacaattgcttgaacccgggaggcagaggttgcagtgagccaagatcackccattgcactccagcctgggcaacaagagcgaaactccatcycaaaaacaataataatatttttatagccctaatatattttgccaataggctgccccatcatggattaatggttaatgattgtattgcagttgccaccatcctgaatgaccccaacttcatctggctggtaggcagagccatgaaactccatttgtgattaatgttgtcatccagtaccctgtggaaaccatatcatatcctttctgttacagaggcagtggtaactcaacttccaaaaaggaaagattccaaagttgtccccagcagaaacacatgtgggagcctttgattggaaattgctacagcactgtatctccacataaatgactatgtctgctctttatacaggggggargatcatttcctgttcgtatttctttctgagccattcttctaagtcagaatcatccatatttattttttaataatcttttattattcctttcatcttaagagtatttgaaatattcttgccatatcctgtctggcctaaaccttagtttactttgacttataccatgtggtccccaactctttaactgtctgtccttatcagccaggattctgggmgatggtaaagttcgcctgggtgcagtatgtcagcatcctgcttatcttcctctgggtgtttgaaagaatcaagatcttcgtgtttcagaatcaggtggtgaccaccatccctgtgacagtgatgccccagggagaagtgtgtaaggagcacttatcctagaaaggccgtttctgaagactcagcaggaccatggctgcctcattgtcatcttctgggaacrtcttaggaccttttgaaagagcccagcggacacmtgcgggcttgtgtgcttttccctcagagacaacggttctttccrgttttgctctacacagttccgtatcttcagagctcctgcagaattgtcagggactagtttgtggaaaggtctgagagttcctggaggctataattagctttttgggtttttcttctttgccttagcgttgaatttcaggagaaaattgcagtcagttcagacatcttggaaagagtcccatctctggtcaagcagagacttttcctctgttgaactgaggaacacactgtgcatttcttccttctgttgtgagccactcttactcttttcagggctctcttgtgacaaacatgccaatcactagcactttgcacccctgggcttctccatttcccattcacagctttgatttccagagctgaggcctttaactggagacctggaggggcagggcccaagggcaagggccgcattagcacaggcaatcagggagggccgctgaaggacacttggaccgtccacctgccccagcccaacagtcagtcatctgtcatcagctcagctgagcagccctggatcyctgcccgactgtggctggctctttgccckrtttttccctctgtctgtgcccctggatggcaggctgaagtcagaggggctgtttcattctcagccccctcagcagcactgggggaagaaagcattgtcacaacaggttctttctggccctcacccaacagcctgggcacttggccctcctcctccttgacagccctcccccttcctgcaaaggacaggggcgacaggggttggtgttgggattggctcccgctgcctgacaaccacaagtttatttggaaggctagcgggaagcccagcggctggcgtttcccttgactaaggaaaagggtgcccatcagagtggggcgggcagctttgggaaggacacaagaagcagtgagggtgtaaagaggatgctggcctgggcaggccagtccagcctggccactagcagaataccaagcagtccagtggattaycctcgtggctaagcaagtgtctgcaggagcagagatggctggaaggggcctctgcacacggaagatggcttgttcagccgattcacctcctgaggatgcgtgcagtctcctccaagaacacatggagctgcttcctgatcccaagcaggtcgttgcccctggaaggacatggctccggtgatccatgcttcatgcccacccagaaacacacccctcagtgtgtgcctcagtttaccttggagatcatttttcatctccagcatccgtttcctttaggctgactaaaaacagttttggaaacaaagctattttgaagtattcaagcagaggaattctctaacactgtcccccttgtctttttttaatattctggctattttagatgcctaaatttttttcttgagatttatttatttttatagatggggttttcactatgttgcccaggctggtcttgarctcccaacctcaggaaatcctcctgtctcagccccmcaaagtgccaggaatataggcatgrgccagtgtgccccgtctcttgagactgaaatgaaaaattgcttgtggtttaaatccccagaatttaatgaaacatgggaagatggctaaagatacgtataaactttggtttgcattttrttaaattatttgaatgcaaaacttgtataaagaatccattatgttctgtagctttctaattaaaatgttcaacatggaaggttgtattagctatttttgaagcaaggctttggagggaggaagaatagggagggctgaagttgagcacacttctcygagttactcaccagtagccttgctttgccacggctctgcccaaagaccttggagcttttgttagctctttggcaaaagtttcctggtccaaccccaagtatattagtttttagtggaatccacatggcatatgggagctgcgggttggaaaattacaactgtgtctggtgaatatcaaattatttacggatcatttattggtagtttctgaaactgaaccacacagcatagttgcaggaggaagaaaggtaagaaatayacaggattttatcaactgagctgaagccatagrtaagtcatatttgagataattattgaatttgttttgtgggagagaaatctctaattcttccaaatgattagtccagtttctgccaaagcaggtgaggtgtctaatgccccactgagtgcccatcttgaagcttattaaagcaattctctctctttgcgtccctcttaccttatcctccacatccttgccccctctccttattcatgctttgtaaagaggttttggagctttctggccagataacttctaaatactgattaaggaaatgtaaattacatgatcctaaggaaaataatgattgccggccaatcccctacccagagttatggttggccttctggcacacatctttctatcccatacactatttctaactttttaaaaatcatgaacaggccgggcacggtggctcatgcctgtaatccgagcactttgggagacagaggcgggcagatcacatctgagctcaggagttcgagaccagcctggrcaacatggtgaaaccctgtctctactaaaagtacaaaaattagcctggcgtggtggtgggcacctgtaatcccagctattcaggaggctgaggcaagagaatcacttgaactcgagaggcggaggttgcagtgagcctagatcytgccattgcactccagcctgggctacaaaagtgagactccatctgaaaaaaaaatcagtatcaaaatcatgaacaacacttatatgaaccctgtacataaatccttgtttctggtttatttccttaagatagctcctagaaaggaattaccaatccgaaaagcttacgaccattgtcaagaatcttaattcatcttgccaaaccacaaccaggaaggactgcttatttcttctcccagcagcagggagttcttgattaagatcccatcactaatttgacaagacctagaaatgcttcatccttttcaggtgcctgggctctgccctgttatttgtaaaggggattttttttttttttttttttgaaacagtttcgctctgtcgcccaggctggagtgcagtggtgcaatctcagctyactgcaacctccgcytcctgggytcaagcagttctcctgccttagcctcctgagtagctaggattacaggtgcctgcyaccacgcccrgctaatttttgtatttttagtagagacggggtttcaccctgttggccaggctggtctcgaactcctgacctcgtgatccacccactacggccccccaaagtgctgggattacaggcgtgagacaccgcgcctggccggattttttttttttttttttgcgagggagtctcgctttgtygcccaggctggagtgcagtggtgcgatctcggctcactgcaagctccgcctcccgggttcacgccattctcctgcctcagcctcccgagtagctgggactacaggtgcccgccaccaggcctggctaatttttttgtatttttagtagagacggggtttcactgtgttagccaggatgatttcgatctcctgacctcgtgatccgcccgcctcggcctcccaaagtgctgggattacaggcgtgagccaccgcgcccagccctggccggaaatatcttatttattgaaacgtatcatgtctttatctggacctgctatgaacctgcgcctctgggcctaggctagggcagggaatgcgcaggaggaggggaaaagctgcggacccagctcctaaggccacctggtctctccgctcttcccagttgggacactgcaccggrtccatgtgtcatccaggtgccgtggccttgggaagggtttggattccaagtcacctcgccgcaaggatgcccccgagagtgaggagggtcaagattaagattcgacttccttcactagggcctttgtcctcccaggagccccccttctctggggatttggggtggggtggggtacaacgttcctctgtagtcagatgagaggtgactctgccagcgccctttgacattctgggctaaaagttgagcctctcagagccccagcccacctgggccctcctgccccgccctcggccggcgcccctcccccgaggcgtggcccctcggtcgggggtgggccaaccggctccttccttcccccacggcgctagctcccgctggccacctcgggaccgcagccacgtctgaaagcgcctcattgtgtgcgctcgggcgggctgcaccgggcagcgccgagggttgccggccggcgcgcggggagtagagggcgcgggccgcagtgccgggttccagagggagctctgcgccgggtccttccctgtggtagccccaggacacccccagcctcaacatcccattctgggactcctgccctgttcccacattcgttctacctcgagtctccaggagcttccagtggcttggtcaccgccaactctcgtccatgcctcttagagcccctttcccggcctcaccgggtgtcgcttaatagtcttgggaccttaaggagcaagtcagcccctgcggaccctcccagtgaagagaaagagctggctgtgcggtggaatttggaagagacgacgtttgggagcctttgctgagtccagggagagaggcgtcccccaccgtgccgctgcagctcgggcagagccgccaagctttggggtacgttggttcttcattctccgcgggggatgtccccacactcgggtcggctgggggccgggctggtggcacagctggggacgctcctctgtcctgcaccggggacctggggtggcgggaagagctgggagtggcttttccatcagcaacgtggaaagggcatcgccgctgttggcgccggtttggaagtgtcttgctggggcttcggctgcgcaggagaatcctcactgcgaggggagaaccccttttgtctcgatacttgagtttcaaaggacatgactttcaaaagctctccaagggctttttccatagaattattgagagacggtagcttggcgggttgatttggaaccagacccaggggaattggagtcctgcgtcactgcttctgacggcttcatcttgggcttcaggacaggccctctgggcctcaggacaggtgcctagcaaatgttgactttcctttctcctccctttttcacagaggcaaggcagtcaagtttcccatttttgaggatgggaaaactgaggcctgaagagcagaaaggagttggctgacttaaacccacaagcgagtaggccaagtaccagggcctctgagggtgctatgctgctccgggagctggggctgggctcctctccagcctgagaggccggaacttttctggctttgttctacaaacagagtcaactggagtatagagagccagagagtgacttgctctaagtcacacccctcactggtagtagagacaggatttgaacccaatccggcttcagaagccaagcttctaaggccagtcgcagtggttcacgcctgtaatcccagcactttgggaggccgaggcaggtggatcacctgaggtcaggagttcaagaccagcctggccaacatggtgaaaccccatctctactaaaaatacaaaaataagctgggcatggtggtgagtgcctgtaatcccagctacttgggaggctgaggcagaagaatcacttgaacccaggaggcggaggttgcagtgagctgagattgcggtacttcactccagtctggacaacagcgagactccatctcagaaaaaacacaagccaggcctctagccatgactttccagcgtcttctgttttgtttgcccttgtggggaccctgtctgtgcctgccacattctgttgctggggcactggggcacctgaatctggtagagccattgtccttgggttttcctcattcaaagactttcccttggattcatagaatataagtgtggcccaggaaggaagattgctaagcaaatactcataagtgcactatgcgccagactttgttctgctttacaaatatccactcactcactctttcaatcaagcccatgagttgggttatattgtttcccccactttacagatttttttttttttttttgatacggagtctcgctctgtcaccgaggctggagtgcagtgaaagtgacataatctcggctcactgcaacctctccgcatcccaggttcaagcgattctcctgcctcaaattcctgagtagctgggattacaggcacccgccaccacgcccggctaatttttgtatttttagtaaagatggggtttcactatgttggtcaggctggtctcaaactcctgacctcgtgatccgccctcctcagcctcgcaaagtgctgggattacaggtgtgagccaccgcacctgaccttccagatttttttttaaccaagcaggcacagaaggaagtaacttgcacaagatcgctcagtaaatggtcaagtgggattcacactcttaacctcagtgctctatacctactgtctttaatgagacagacaccattctgcttctagtgtcttgggcggggaaatgggtccagaaatacatgaacaagattgttctgggtagtgataatagtattaataataatttctcactatcacctattagtcaatattgaaatatatctgattacctctagggtatctcctggcagatgtttttttcaaatcagaatccacacaaggtccacatgttgcatttgactatgtgttttttggttttggtttttgtttttgtttttgtttgagatggagtctctctctgtcgcccagactggagtgcagtggcgtgatctcagctcactgcagcttcggactcctggctccagtgattctcctgcctcagcctcctgggtagctaggattacaagcacgtgccaccacacctggctactttttgtgtatttagtaaagacagggtttcaccatgtttggccaggctggtctccaactcctgacctaaggtgatctgcctgtcttggcctcccagagtgctgggattacaggcgtgagccaccgcgcccggccctgagttattttcctataaaatagtctcttcctttttctgtcatagatttggaagtatgatttacttttaaaaaataaggtaattaaaataaatggttaataaaccagggaacattccagattatctctgtaatgagagggctctgtcaatacttagggaaacaggcaaatgtgctaaaagcacagtcccactccgtaccctgtgtgtgttgctgcacagaagaagtggggaaccctcagactttatggcctccagctgtaaggtactacaatttagaccaaggcaggtgctgtttgaagtgccctgtgagaatccctaaagctcccagccaaggaaaagggtttgtgtgttgctatctgcttatctgctctgaaatgccccagggcagtggctctgagccagggaggcttgaggctcctttcccaggctaattagaattcatttcccagtagattttgaaggcagatctgttttctccatcagcatctgggccttgcagtcccagccccctgcctctgggggatgccatgcagctgcatcaccaggactggcagagttggcagatgtggccagggcttgggggccaggcacagcttcagccacagcctggcccagcccacagtcctggtgttgagagtgtgcatgggagctctgacaccttttagtgcagagcgggtaattcatgcccctggacttctctggctaactgggtactcaggtcagctgggagatggttttgcaggcacctgtctctctgcagtgatagctggacaaagacaaactccacctaagcctcctttaaccaactagaaatttctgattttatcattgtagtaaaagtctgatgtagactatctggaaaatgcagcaaagcactaataagaaaataaattaccagccgggcacggtggctcacgcctgtaatcccagcactttgggagactgaggcaggcggatcacgaggtcaggagatcgagaccatcctggctaacacggtgaaacccggtctctactaaaaaatacaaaaaattagccaggcgtggcgtcgggcacctgtagtcccagctactcaggaggctgaggcaggagaatggcatgaacctgggaggcagagtttgcagtaagccgagatcgtgccactgcactccagcctaggcgacagagcaagactccgtctcaaaaaataaaaataaaaaaaaattacctgtaaactggccatagaaaaataaacaccaaacttcagtgtgcatctcccatactttgtatttttttaaataatggctttattgagatagaattcatgtatgttaaagtttatatatattatatataagtatattatattttatatatatatatatatatatatatatattttttttttttttttttttttttttaagacggagtttcactcttgtcacccaagctggagtgcagtggcttgatttcagctcactgcaaactctgccttcctgacctcaggtgatccacccatttaatccaaagtgctgggattacatgcgtgagccactgcgtccggcccaaagtttatattttaaaagtgtacagttcactggcttatagtatattcagtgttttcacattgaactttgtatatatcagtactttattcttttttattgcagataattgtctactgtgtggttacaccacattttgtttatctattcatcagctgatagacattagggatgtctccactttttggctattacgaataatgctgctgtgcaaattcatgagcaggttttcatgtgggcttgtatgttcagttctctagggtgtgtacccaggagtggatctgctgtatcatatggtcactctattcaacctttcgagaaaccaccaaattgtttcttcaggaaatgcaccatctgacatccccattttatgaggatccccacgtctctgtcatctcaccaacacttgtaattatatattatttattataattacctttttaagattgtaaccttcttggtggatggaaagtgacttgtcactgtggtttaatttgcatttccccgctgcctaaaaatgttaagcatctttcctttttttttgagacggagtttcactcttgttgcccaggctggagtgcaatggtgcgatctcggctcaccacaacctctgcctcccaggttcaagtgattctcctgcctcagcctcccgagtagctgggtttacaggcatgcgccaccatgcctggctaattttgtattcttagtagagacggaatttctccatgttggtcaggctggtctcgaactcccgacctcaggtgatccaccagccttggcctcccaaagtgctgggattacaggcgtgagccactgtgcccggcctttttttttttttttttttttttgaggcaaagtctcgctcttgttccccaggctagaatgcaatggcacaaccttggctcactgcaacctctgcctcccgggttcaagcgattctccctccccgccgagtagctgggattacaggtgcctgccaccacgcctggctagtttttggtatttttagtagagacggggtttcaccatgttggccaggctggtctcgaactcctgacctcaggtgatccacacacctcggcctcccaaagtgctgggattacaggcatgggccactgcgcctggttgagcatctttccatttgtgtatcttcttcagagaaacttctcccaaatcctttactcattttaatttttttctttattcattcttaaatttatttattcttatatttcttaaatatgcttattcttaaaaaactaaataggatatttgcctattttgtgttgagttgta

SEQ ID NO: 96521 - DNA, 49296 bp, Homo sapiens
aatgtttctcattcaagataatccacattttgaagatctcattttacacaaaaaagggtaattagaactataaacaggtcttcattttataataagcacttaatataactaatgtgcagttatgatttttaaaattggcaaacatgcaaaattgcattaaataagttatgtcagataattatcctttgtttaatgtttatttacagcttgtaattaatgtttaatcattttgttgtcagtggtgggaatccaaattacacagcaccaaaatatgttgtcagcggcaaatccatacgggtctgcaacaacaattcttgtgtcctcaggagagaatctgactaaggggcataaggcagaagagaccaagacaagttttagagcaggagtgaaggtttgttgaaaaacttgagaggaggaatgaaaagaaagtaaagtacacttggaagagggccaagcgggcatcttggaggacaagtgccccatttgaccttggacgtagggttttacatgttggcatacttctggcatcttgcatcccttttcccttgattcctcccttggagtgagaggcctgttagcactttggaggtaagcatgcgcaatgtgtttactggagttgtacgcatgctcactagaagtgttcttcccttaccagctgaatgtccttaggaggtcagataccagttaaactcctccattttgcctcttaatatgcatgcttgagcccactttcccaactccttggatcttatcgggaagctgccgatcaccagttttaggtgtttctatctactgggaaactgccttttcctggcactggctgcaatcaattattttagagagagagtttaacaaccgcctgacattcctggttggggtagggggcaccttctcttgctctgtttatgcctgaatagctacctactgtaaccatttatttttcaacatacatttaattgaaaaataatggaaatacaaaataggaaaagttatggtccctggcctcaagaaaatccatctagtggggctgaaaagaaaacttacaaaacaagtatcttacagcaaagtgaggtgaagagataagacgaatcagagttggcatggctggggcaggtttacatgacagaaagaggcttgagctgctacttgaaagaaacacaagactttgcaaattggggtggaaagctaagggatgctaggcagagggttgatgtgagcaagaaatacaatgtgaagagctgttcacaagagaatgagggttttcaacagggaataatgagagaattgattggagcaaaaggttaggatgaggaggtgaaggaaatttttctttttggaggggggtgggcagggaacagggtccagctctgtggcctaggctggagttcagtaacaggatcatggctcactgcagcatggaactcctgggctcaagtgatcctcccgcctcagcctcctgagtagctgggactaaaaggtacatgccaccccaccctgggattttatttttgaagccaaggatctcagttaccccagggtgaaagtagggtaacaatgtgtattgcctttaggggttcctatggaagtctcttaaagagatgcttctaccctcccaccatgagagattctgattttttccttctttgctgtccaggtgacaatgtataatgaaggatgttactaaatgacatgtgctgcacacctgagtcttgtggaggctgaagaaaaggaggcttctgtagaaaataggaactcagtgagtgttttcagacagctgggtaatgtgtatgaagaagaaagctttgggccaggcacggtggctcatgcctgtaatcccaacactttgggaggccaaatctgacagatcacttgaggtcaggagttcgagaccagcctggccaacgtggcaaaaccctgtctctactaaaaatacaaaaagtagccgggtgtggcggtgtacacctgtaatcccagctactcgggagcctgaggcaggagaatttcttgaacacgggaggcagatgttgcagtaacctgagatcgctccactgtactccagcctggatgacagagtgagactccgtctcaaaaaaaaaaaaaaaaaagaaagttttggctactggtgtgttaggcttggtgggagaaactgaaggcagggagatgtaaggagttgactgcaattgtataggaattgaagaggcagaaagaatatctgaatgtttgatggtagagaaggtgaatgtcagaaaaaacaaagcggagcagacactgtactaagaataaccatttttcaaagtaggtattgtttctattttacaaacaatataatctagaaatcaaatacaaatccaagttatataggttttagtgagagagttgggctctgaattgaggttcgtctgactctaaattctgctaatgcactatgaattcaattttgagtttctaagagatggaaagaaaaagacaaaagatgagcttgcttttgaggtttgatgtacgggtaggttgtccagcaagcatctggaaaagtggcatttggctttagagatgttgggtatagattattaaaaattatttgcacagggtgacaatgataaggattccaagggagaccactaagagttgaaaaagaaaggagagagcaaaggcttgaacatcaataatattcccaggttagaaaaaaaatgggatcaattattgaaaaaccagaaaaggagtaggaagttatgagaaataggaagtgtagcatcaccaaaaataaagaaaacacttgtacttaggaaaagattgtcaaagctgttggatactgcagatgtcaaggaggcaggtctaatttggcaattagaaaaaaaaaatagttggggtcagtagttttatttcggaagagcattacacaggagccaatctgtaattaattaaaaatcaaaatagtaaagatagggaaacagataatttactaaaatctatagacacttcttttgagattttgaaaaaatgaaatgagagagaaattagcacatggtaggtaggtggaggagcaaggcctagggagggtttcaattctgggcttctttatagcttggtaaggaaagagcctgttgaaagggtaaaagattgaaatgcaggtaaagaaaagaaaataaatgtcttaatggaaaaaagtttttaatttaaaaagtaaagaaaatagggctgggcgcggtggctcacacctgtaatcccagctctttgggaggctgaggcaggtggatcatgaggtcaggagatcgagaccatcctggccaacatggtaaaaccctgtctgtactaaaattcaaaaaaaaaaattagttgggtgtggtggcatgcgcctgtactcccagctactcgggagactgaggcaggggaatcagtggaggttgcagtggagtgccagagctgagatcgtgtcactgcactccagcctggtgacagagcgagactacatctcaaaataaataaataaataaataaaatagcaataacacctgtcatcaaccacaaaattgtataaaataagttaaaggccattctttttattattattattattatatttaaactttaagttctagggtacatgtgcacaacgtgcaggtttgttacatatgtatacatgtgtaaaggccattcttaaatcctccaatttacaaacccttttctactttactgttaatagtttggtgcaaatctttttctttttcttttcttttttttttttggagacagagtctcgctctgtcgccaggctggagtgcagtggcatggtcttggctcactgcaacctccacctcctgggttcaagcgattctcctgcctcagcctcccaagtagctgggattacaggcatgtgccaccatgcccggataatttttgtattttttagtagagatggggtttcaccatgttggccaggctggtctggaactcctgacctcgtgatccgcccgccttggcctcccaaagtgctgggattacaggcatgagccaccatgcccggctggtgcaaatctttttcaacatcttcttttatttaaagaagtatcactcttttctctttctctgcatctgttcctaaataaacccgttattaaataaaaatggtgccgtatatgcatgcatgttttcaaattactttttttcattatatctatcacagaggtctttctaggttaatatttacactcatatcaaatccatctaattcattttagttgttgtatagtgttcttttgtttggctagatcataatttgtatagaaatttcttttttattttgtagagaagtggggtctcactatctcaaactcctggactcaagtgatcaacccctcagcctcccaaggtgctgggattgcaggtgtgagccaccacatctagcctcaatgtgtgtagaaatttatacattgatatacctttcttggtagcttaattctaaaaagtggattgccctgtgttgtgggctgactactccccaaagatatccatacactaagctttagaatctgtgaatgttaccttatatggcaaaaggtattttgaagatgtgattattaacttaatcacctctactgaatattgaaatagtaagattatcctggattacctgggtgggtcctaaatgtcatcacaaggctatgtgatggcagaagctgaacaaagcagtgtcagacagaccaaagatgctacatcgttggctttgaaaaagcaggaaggtggcacaagctaagaaatataagtggcttctagaagcttgaaaaagcaaggtaatagattctcccctggagcctccagaagaaaatagtccttctggtactttgattttagccctacaatactcattttggatttttggcctccagaactgtaagagatacatttgtgctggtttagttaaccgagcttgtggtactccaatgtgactttatctgaactttattacatctgcaaagacccgatttccaaataaggtcatattcataagtatgagggttaggacttgaacataaatttttgagggacacaattcaattcacacacccattttcaaaaagtcaattcgatctgtgagtggttttaaaatttgatttctgtgaacctaccatttaattctggaattgttactgcctcattccaaagacaaaattcttcctccatttgagattttaggaagtcctagaagaaatagctgagcatgggtggatattttggaaataatcctcatggtatggagcagagaacgtccccagttatacatatgtagcacattattttataaagttagtatttgagcaaaactaaacaatatatttttacacacacatatgcagaatatgtgtatgtgatttacgtatgactatgccctaaagaaaagcagcaaagtgaggggaggtggacggcagggatggcacatgcagaagcacgcaagattccgcggtgtggagggttcgtgggtgcgtataattatcttccattatttacatgtgtactttatgcgttcgttagctatatttttgtatgttttaatatgcaacaaaacagcgtatgagttacgctttaatgtaaaattgtctacataacacaaaatttaaaagaaatggcatacggatagtagaaaacatgctttgaggaaaaagcgtcatgtactaagtccagaaatcgacattgcaaagaggcaccaactgttttcatcaagctgacttttccaggtgctactcagaaaagctgaccgatgatagagcactgggtcaactcacgctaattatgaaaccgtgagtaaaataatctgtgcttctatgtaatttaagtacccacaaatcaggaagcattcccggatgaaaagcattcacagaaccatacgctggttcgccaccttcccggtggaaaaaccctttcctcggaaattctcagcgcaaagactttgccctattccaaaatggctccggcgcctacaacttaagcatagcgcaggtccggaagttacgcaaccccataaggtagcacgccgttacccgtggggagcgtttccgccatttttgaaaattaattgggaaggtactggttttaagtgtagttgccgacgcaatggcagcctttgcagtggaacctcaggggcccgcgttaggtgagtgaaatattgcttttccttgctggcactgccatccatgctctgggcctggaggcgggcaagactgaaaggcagtmgtcaggctctcgtctgctggtttcagtcgcggagagggaatccttgggtgcccccaagttcatagtcggtcccctactcgacgcgtcgcctccatactgctacaaaggtggcgccgggaagctgagggccctgggagggtgaagaaaaggccgtctggcggtgactgagctgtgtttgtgcccccacacgccagccacgttagactggcccataccttaacctccttctgatacccgagacgcgatgctggttgctggattcccagctggttgctggtccccagaagcatccctgggaggaactgaccgcggtacacgtgggtgggcggtgycctgaagtgtgtgggtgcagtccactgcttcttgatcacckgtgcttccagttcctgttttgactcctctctcccgggctttgccaaaggaatcttgttattaatggaagcttgaatcgtgcaacatttaatcaaccgtgtggttggtaatcattgagatattgaccttaacagcaagctaggagttcgcacgatatttcccgcctttatttggggaaagtgactyttaagtattgtaggaggtatttttctctagtaagtcacgatctgaatttttttaaagattcattcccattattcattgcggagcctcgttgaaatatgtcgtctttgaaaaaaatctaccactttaacagcacgcggatttctttttttcctgctgagttttgcgacttgtgagaatcgtcgaaaattttagaacggaaaataaaccgtcttactgtcatagagacttacctgaaaagttaggttataactttctgagcttggaaaagagagcaaatgtaatatatatggtgtrgaaagagtctttagatttgaagggtatgtaatgcttgccatgtttggtgtaaaataagttctttttgagaatagagtaacttgaactactttagtctgtcataaaaaaactaaatgcataatgtcaataaygcagatactctgcattaaaatttatatatagatgtcgtcttggtatttatttttaatgtattttagagatcaaaaactcttcatttccagttccaaatttttctattcaacaaaaacattttggagtgcatatttattggggttacaaatgtgagtaaaccaatccctgtatattgccttgccagaaatctgacattagccagtattaatgtttaagtccacattttgcagatattccaggtgcccactggtgtagtaaaactaagggttgacttcaacaaactgctagctgagtacgtatcttttgggagcacagaatatgaaatggaattgaggacatgcagcatcttttccttaagtttgctttaagtgaaatttagcctgaggggtggttggtgacagtcctgattaagagcccattgtgccctccttcctgtctggtgctttcttttttcttttccttccttcttccctctctccctccctcscttcctcttttttgacacagccrtgtcacctgggctggagtgcagtcgtgcartctcagctcactgcaacctccscctscgggctcaagcaatcctcccacctcagcctcccaggggctgggaccacagtgtgccgccactcccagctacttattgtatttttggtagagacaaggtttcgccattttgtccagactggtctcgaactgagctcgagcgatccacctgcctcggcctcccaaaatcctgggattagaggcttgmgccttctrctgtgtctgtatgtatccagatacatcagaacttttcttaagccaattcttactttattttgctataatttttttttcttttagggagggggagtgaatgtagtgaatgttaccaaaaactttgcgtttaatatggtattytgaatatctgttaagaatatgcttttgttyagacttttggtttgattttagtggatcttcttacgaaatatttctayagtgccatgtaacatagtaactagcactttataaaataattacaatgtaattagagtttttcacaccttgttttagcatttgctttatccatttattgaatttgtttttttttttgtcttttatacacttgtattgttaatatctaggcctaatataatgggaaataagaggaagactaaatagttggcagctttcggatattaagaaacagattgttaaggccatctagaagttaagtaatagttaataaaaaaccatacaaataacatagcaaacatttgacccttctgagtgcaatgagtcacactcaggcttgtcacctagttgaaaattattttcataagcagagattgcaaattctacatttatactttactcagtttttgctattataaaatatttgtagaaaataataattcgtatttattgagcacctgtgtatcaggtaccaggtcaagctatacttgctataattctaacaaaagctctgttagtggatgctagctatgcttattcccttttactgagagaacttgaacccacatctttgactccatagcccattgttttccttattctgctattttgctctgaaattagaattatatagctcactcatcttcataagggaaataatatctactctatagattgtgaggatttattttgtatcaattgtgasgtttcagttctctaagttggctttatattagggggatatttaatgatgattctttaatttttttttttttttaaataaaaaagatgagatctcagtgtgttgcccaggctggtcttgaactcctgagctcaagtgatcctcctgccttggcctcccaaagtgctaggattgcaggcgtgagtcaccatgcccagctgtgattattcttgacttaaactaatgattaagaaaaaagatacaaaaataagttttcgactcttttcaacatgtttctgagttagggtgctagttatcactgttattttgtaagtgctctaatatatgcatggttacggttttatcacaataatgatgaactttttatggggaagaaaaagaaacaatttagcaagcttaacccattgtgtttgatatgctaagctttgtatgtataagtagtgcagcctgtccttgtttttggttgttacatagtccaaactgattcggaaatggaaagaagttattagtgtgatttttaaacccctgaaataatgtaaacaaaaatagctgtcacagataaatattgtgctgccaggtgtactggcttcacacctttaatctcagcactttgggaggccaaggctggtggatcacctgagctcaggagctccagagcagtctgggcagcatggtgaaaccccatttctgcaaaaaaatacaaaaattagytgggcgtggtggtgcaggcctgtagacttagctactgagaggctgaggagggaggatcgcttgagcctaggaggtgaaggttgcagtgagctgagattgcgccactgcactccagcctggtgacagagtgagactcggactcagaaaaaaaaaaaaagtgaatacaagataactttacatttttctagaaatattttttgttggcttttaaaataataaattcaactatggttctattatatctaaaagttttgattaaatttgcaaaattatgttagattcttgcatgtttttgtcatcaacatgtaacagaaactgtaacagaaaagtccttaatttattttttgattcatgtaggatctgaaccaatgatgctgggttcacccacatctccaaagccaggagttaatgcccagttcttacctggrtttttaatgggggatttgccagctccggtgactccacaacctcgatcaattagtggcccttcagtaggagtaatggaaatgagatcacctttacttgcaggtaggtgaattgcttaaaataattttatagacatgctagatacagggrtgtccaattttttggcttccctgaaccacattggaagaagaattgacttgggccayacataaaatacagtaactctaataatagctgatgagctaaaaaaaaaaaaaaatgcaaaaaaaatcttaaaatgttttaagaaagtttaccaatttgtgttgggcaacattcaaagccatcctgggcttcatgcggtgttcaagccatgggtgggacaagcttgtgctagaattttwaaaagtgtagtggtgcagcattcaccctcatcaatacattaattaaaaaaaattaagcaatgtgtctattataaagcaaagcttttaaggctcttggaatagaggtgtaagaagtataagctataatttctagagccactaaaatgtattctatgtttttttcattctaagatgcctttgaattggcttttaagtaccrctaggaaagataaccctaaatatgacacaatgctaagatgccattttttgtaaaatttctgtgtcggagatgtcagagtgtggtgggggaagagtgcctcacagagttgatgaaataccatcatttagcttcaactgaattcatttaaagtaattcatcttaagatacaagaataggaaataatcggtcaaaagaagtgtaacttgaagatgtagatacgaattctgcctttagtcttagtgaattgagattctcacatatagcgtgtttaaggaaacttgggggggaggttttatacacagaatttgtgattgtcagggcaaagtattgtaaatgcagcctgtrtttattacagaactcctttagcaaagaaatactttaaaaaatgacttcgaagttttaactgagtagtgagaattagatacagaagtgttgaattctaattgtgagctaatatcctttagtagtagttcaagtgaaaactctttttaccttaattgccctttaaagtatttttgctttaaaatggtttattatttaggatttatcagggagaattataaattatatttgaagtaattcatttaacattaaacattaaatttcaaatgtgttattttattatggtagccaacgtatattgattgcttatgagcctggcagtatgctaatcattattttgtcaatcttaaagggtaggtaatagtatccccatctttaaaaagagaaaactgaggctaaatgcaataagtaatttgctgaagctcacttgctagtaagtgagcgagygctataaacctcaggttagtcttattccatagactgtgctctaaatagcttaagctgtacagtccaggctcagacattagtcttaccgatggcctgggctgcatcactatttgacattgcatgttctctgatcgataaagacatctttatgtcacagaacttggtccttttactacatctttattatgtacttaaatatatttctactgtgagaaacatgaatgggatctacttaatctagatagtcaaactctacatagggaattgtatttattcaggaatctacagactggagctgtttagtacctactttcaagtgagaaatgggatcaagttttgtatttaaatgttaagcgttttgtagagtgagcaaaagttacatgtgttttctgaaaactaagattttcattaactacttactctgaatccttttattcagagtgcagtctatggatcagcagcattggcatyacctgggagcttattagaastgtataatctcaggcttcaccctacaccttctgaatcagagtctgaattttaacaaggtccccaggtgactgttcagcatattaaagtttgaaaagaacyaacagacaagattttaagtcagtatttcaaaaatataaatttaaaaaatcttaccaaaaagaagaatccctttwttttttttttttttgtacactgtaggtgggtcaccaccacaaccagttgtaccagctcataaagataaaagtggcgctccaccagttagaagtatatatgatgacatttctagcccaggacttggatcaacacctttaacttcaagaagacaggtaatataaatacccttttgatccccaatgaacaacatcatggttttatgtgtctgttcagtgagagtcaatactttgaaatgtttccctgaagtctgttttaatgtaactgtgttgcacagaataaacattaaacacatcatagaatctacttaaattgtgttgatgatgaactgtacttaacagtgtagaactctagattttctctcataggtaattctcaggtgtttataggtatgccttatccacctgcccatagctcyaacctacttaatatacatgtagaatgtgactatggtttaaatcattctgattgtttaagaagtttaatatttaatatttaaaaattatgtgaaagaacaaatgaaaatttagagtttcatctagatctagggcactcgtcagctgagaagtagtatggacttgtctttattttcttctttttttagggtccccaacagggtcctgmtcagttgcccaggctagagtgcagcggcacagtcataactctgcagccttgaactcctgggttcaaccaatcctcctgcctcaactgtcctattgggatataggcacgtgctgctatgcctggctaattgtatttttttttgtagagatgaggtcttgccggattcaggtgatccttgcaccttgacctctcaaagcgctagattataaatgtgagccactgtgcctggccgacttttcttttaagtagaaaatttagtagcttcatagacacaagtgttgtttcctattattattgtgcttagtaggacatataaacaaagtttatcagttaagttgrtaagttctttatataaagatatgtctgctgtttgctttagatatatgttttatgcctttccctaaattgtatttagtgaagttgagagttcaagaatattagaaagcatttttcagtggattcgtgctatttataggcttgatatgtctggcatactaggcttacttgtcaagtaaagcaaaattcattcactgtggtaaacagattactgtttcttcccaacacttctagacctgccttcctgtccaacaggagccactagctaagtgtggctattgatactaaagatatagctagtctttattgagatacactttaagtataaaatacacaccagagtttgaagacttagaaagaatgtaaggtatcttatttttttatgttgattacatattgaaatgataatgttttggrtgtgtttggctaaatattactaaatttcacctgtttgtacttttaaaatgtgcctactagaaatggtaaaattacacgtatggaatttattgttcctaatggatagatatcctggtctgggatggttttctaaaggttgataagtaaagcttatgattagtttggtatgaaggctgggcgtgttggtgcatgcctgtaatcccagcactttgggaggccgaggtgggcggattgcttgatttttatgtatttttatttattattattattttttgagacagggtcttgctctatcacccagactagagtgcagtgaaatggtcatgccccactgtagcctcgacatcctgggctcaagtgatcctcccacctcttctccctagtagcagggactacagatgtggaccaccatgcctggctaacttttgtattttttgtagagatgggatttgtcctgttgcccagggtggtcttgaactcctgagctcaagtaatccaccttccttggccttcaaaagtgctgggattacaggtgtgacccactgtgctgggctttgggcagattgcttgaacccatgagtttgagatcagcttgggctacatggcgaaactcttgtctctactgaaaatacaaaaaaaaaaaggctagatgtggtggtgtgtacctatagtcccaggtactcagaaggctgaggtgggacgattgcttgagcctgggaagctcaggctacagtgggctgtgatcgtgttactgcactcagcctgggtgacagagtgagaccctgtctcaaaaataaaataataaaaactaaaaaattaaaaaattgtttgttgcaagaaccactggcttctaaatttgtgcaaggttttattacttctctgatgatacagacaaaggcttacagatattgctgtattcaaaatgtttgaaagactcgtgggtcataatttatagagaatgtttttgatttgaaagttggtaagaatattattgctagattagagcccaaattagttatgccccctggaatttgctcagtttgctttctaatcatgaaagaattggcattaataattgaggaataaattttatatctctcccaacattctctcagcatttagttctggttgctaaatgaagctatttgagatttccttagtttaattagaatctgttttaaaaaatctttattgagttctagagagattctgttctcatttattgattggatattgtctttgttttagaaggattttaaactattttaatccttaattttcttatatttaaaggaactaaaatggataatttaccagttttggaactttctactggtagtggtagggatatgctgtcttttattgtttagactgatttgaatctatagtgtttcrtggtttctaagtatctgttgaaaatcaaattttgtcacccttctgtttttctgtatgaacctggtcattttaaaaattaccattatctctgttatttcaaatattgtacattagaaactaaaaacaaatagttaacatgtcaccttttacagaagatagtcttttttttttttttaacataatatgacttttcttattttaaacaaatactaagggatctagtaaattttaggttaatactgtttaacttatggggaaaaaagagtgcctttgtactttgagctaattagaggcatctctagcacatgataaaaattcagttatccattgaatgaagccttttaayacttactgtatttatgttttgcatttttaccataacactttcttctgtttgtgtagccaaacatttcagtaatgcagagtcctcttgttggagttacatctactcctggaacaggtaagtgattctttcttttttttttttttttwaaagacagggtctggctctgctacccacgctggagtgcagtggtgtgatcacggagtaaacaactctgacaccaaatacttctctattcttygaatgaatttaatataaaatgtttgttggtaactgccaaaattttttattttatatttcaaacttggagattttccaaaatctataacttctttcaggaaggaaatactttgtatattgattattttctgaatcaaatcaccctaaaggtatggtrgggtgaatattcagaatgtctttttaagaaattgtatacttaatagatgtttgaagtatctccttagttattaaaacttgtcaataaaaaagccattggaattgggatgaaaaggaatagttaagacactgaataataaaggtgttttgagagatgttaatgcatagttataaatctaaatgccrttgaatagaagcaaccactgattatatacctagtttttctttaagattaatggctttttaataatcatcattatgcttagcacagttcttcatatgtcgtcatatgtgtataatcccatcaaatgtttattcagcaaatatttgagcacctaactgtgtactctgggaaatagtaaacaaaatagatattccctgcctttatggaacttacatttatttgcagaatttacatttataaacaaaacaagtaaattataacatttgttagaaggtattacattttgtggaggaaaaaattaagcagcaaagsgggggagggggtagagacttagagttttaaatagggtaatgtattagttttctgttgctgccataacaaactaccacaaacataaaagtggcttaaacaatacacattcattatctttcatttctggaggtcggaagtttgaaatgggtcttgrtgggctaaaatctagacattggtagggctgtgttcatttatggaggttctagacaaaaatctatttttctttttttttttgagatggagtcttggtctgtcgcccaggttagagtgcagtggcaccatctcggctcactgcaacctccacctcctgggttcaagtgattstcctgcctcagcctcccgggtagctgggattacaggtgctcgccactgcgcctggctaatttttttttttttttgtatttttggtagagatggggtgtcaccgtcttggccaggctggtctcgaactcctgaccttgtgatctacccacctcggcctcccaaagtgctgggattaaaggcttgagccaccgcrcccagctggcaataatctattttcttgccttttccatttctagaggctacttaatgtttcttggcttatggttcccttcctccatcttcacagtcagcaactttgtaactctttgaccattcttctgtagtcatatctccctctctcttttaaagacccttgtgaatacattgggcccttctagataatctaggataatctttgtattttaaggtcagttgattagcagsgttaattccacctgcaaccttaattccctttgccatgtaatgtaacattcacaggttccagggattaggtcatggacatcatttggggacctacccagcttattccacctaccactgatagttagggggcaagtaaactttactcaaaagtctgtaagtgagggaggtagggaatagtattctagacggagggaacagtgtgtctggggtgttcaaggaagaataaggggatggtgactgaaatggagtaagtgagggggagaatagtrgaaaatgaggtcagagaggagagrtaatgggggcagatgtattacatggccctgtaggttattgtcacaattggtctttacccagaaaaggtggaagacaataaggatgagactgttgctgggttcaactagtttgggagtaaaagttagcttagaagcaaggagacaagttaggaggctacttgtagcaatctaggtgagagatgatagtgatagaaaaagtaggcaggcaagaagggaaataatacaataacagggaaagatggaacataagaaacaatagcaagacagtagattttaaactaagcaaatcaggcatgtgcctgtagttccagctactcggaaggctgaggcaggaggattgcttgagcccaggaattcgaggttgcaagggagctgattttgtcactgcactccagcttgggtgacagaacaagaccctatctcaagaaaaaagtaaataaaaattwaaaaaaaaaagcacgcaaaaaaactaaccaaattaacaatgatgtaaaatgtattaaacactctggttaaggcaggtattgtcagaatggataacaaaaggaacacccaatacaaattggatcctttgaatcctccaagtctgaatttcttgaggcagtctgtgagcactcattggccgtgtctttaaagtctacatttctagtaaaatgttcttcaaggaaacttagtcattttctatcacgatgctcagaattcttccagcctctacccactgcctgatttctaaagccatttccacatttttacttgggtgttaacagcagcacctgacttgttccaaaatctgtactagttttctgtagttgccataacaaattacgacaaacttagtggtttaaaacaatacacgtattatcttctggtttctagaggtcagatatctgggctgttggttagagctcagatgycaacagggctgtgtttctgtctggaggctttgggtatgaatctgcttccaagctccttcaagttgttggcagaatttagttctgtgtggttataggaatgaatgaggtccctctccttgctggctgttaccttaagatgttaacttctagaggctgccctcactccttggctcatggctctccatcttccatcttcagatatagcaatggcagatcaagtcctttgttatgcttcatatatctctaactttacttttctgccttctgctggtgrttagagctcattcgattttatcaggcccatgaggataatctgagatagttccttattctaaagtcagctgagtagtraccctaagttcatctgccaagttccttcacggcagtacctggattggttgattggattaccaatcagtcaaaccaggggacagaaatcttggaggcctctttaggctgggcrcagtggttcatgccagtaatcccagcactttaggaggctgaggagtgcagctcacttgaggccaggagtttgagaccaggctggccaatatggggaaaccctgtctctagtaaaaatataaaaattagccaggcatggtggtgcacgcttgtaatcccagctacttgggagrctgaggtgggaggatcacttgaacctgggaggcagaggttggagtgagctgagatcgagccactgcactccagcctgggtgayagagcgagactttgtctccaaaaaaaagaaatcttggaggcctttttagaagtcygtctactgtgtatgtcatgatcaaacatctagaatgtcaccctagtcttttcagccatgtaactgaggttgaatgtctaggaaaattagtkctgaacagccttaagctgatcaaactgtaacaaataggtggatgatgatgctttgttacacrcagaaatagtgattattcagttatttgagtcatgccaggtgccactggctcatgcctgtaatcccgaggcaggtggatcacttgagtccaggagttttgagaccagcctgggcaacatagtgagatgcctgtctgtacaaaaaaaaattttttaaattagcctggcatggtggcacacacctgtagtcccagccacctcggatgctggggttaggaggatcacttgagcctgggaagtcaaggctgtagtgaacagtgatcacaccactgcattccaacctgggtgacagagtgagaccttgtttcaaagaaataattgagtcagtaagtgatcccagggacattgaaaatccaaaaacagggctgagtgtggcatggtggcacatgcctataattccagcgctatgggaggtcaaggtgggaagaccgcttgagccggggagtttaaggctgtaggcarctatgattgcaccactgcacgcgagcctgggtgacagggagacctcaaagaaaaaaaaaaaggcaaaaacacataatgttaagtaatgttttacattttagyggctctcttagttgactgraaagcatacattttaattttcctacygttgtcaagtagaaaagcgcatgattaatgttaataaatatctttttgttaacttatttttttctaatatagtaacttctgtgaggttttgtaattgtagaaactatatatgaaaatacaagagctgtgataggaaaaatacctatcatgaattggccactgggagccactgctgcttctactttgactttaaggaatttacacatagaaagtcttaatggggtataagtgacaaagaatatttttgaaaagatgacaasgtgtggagacctatcatgcatggccaatgataggcaagaaatagaaaaagagaattgacaggaaaattgaggggaaaacctagatttttcatttagagctatatatatatatatatatatttttttttttttttttagctcctgtatttagtgttaagtgaagtttttttggatgattagtaaatcttagctttctgagattggcaasttttataaagagatgtcatgggatataatggcatgactgccactttatgcttaggttgttttttgcatccaataaagaggttggtgggtttattttattttgtaaacattctgtaactgatgttaagatcttttttagaatattatttctggtgcaggaaaacattggtcataagtcaaaataggaaatctggattaaagaatataagaaactcttagtcatggtatattactgcccctggtaaagaacattgaatgtgttttttctactttccccatcctcatccctgaatatttttttctgctgcaatttaagttttcttctgcttttcttcttcctttatattttttattactttttttcttgagaagttctttcacttatatattagctctcttccaaaatggtaggtcactcgttaattaactagaatcwtttgtgttagcatattgttaacaggttaagcgtgatattaagtgatagtagcactttatggctgcttttgttgatgcaaggacctcagagttttgatartgttcctggaagtgggggccaaaagggactcttctttttctggtttgggttaggtactccttacatgtgttccttttaaagctctctgtttggctctcatctgtctttattacctgattatgaactccttcaagacagagatttttcctgtgtcttcagtgtttacccatctcagagctgggtacaaaggacctaacattaatcctgtgcttttccacttgacaacaataagaaaattaaaatgtatgcttttcagtagactaagagagccgctaaagtgtaaaactttacttaacattatggttttgcatttctttctttttttttttttttttgagaaaagatctcgctgtcacccaggctggagtgcagtggtgcagtcatagctccctgcagccttaaactcccaggctcaagcagtcctcccacctcgacctcccatagtgctggaattataggcatgtgccaccatgccatacccagccctttgtaaatgtttgttgactgaatatattgatggatataagctgtagagagttgaatggtggcctccatacaatatgtccacatcctaatcactggaacctgtgactgttaacttacatatgattgagttaaggattttcagaggggagactctgaaggagagtttaaagagttaaggagggaaggggacagaatcctggattgcctggatggtgcctaaatccagtcacaagggtccttgtaggtaagaggcagaaagaaatttgaaactgaagaggaagagaaacatatagaggagagagaaggtgatgttcagaagggggcagagattagagtgttgtttccaaagcatgccataagtcaccaaaaggtggaggaggcaagcggcaagcagtggatccttccttagagtctgcagcaggcatgccaccttgccaacaacataattttggacttygggcctccakaatttgtgagagaataaatttctgttttaagccatccagtttgtggtaatttgttacagcagccacaggtaactaatatatgtaaatattgttttgagacaatgacattccaacaccagtatccactaccaaataagaggattggtgtatttgcatccaacttggcaaggcatgatttttctttaataatactgaataaaaactatccttattctagactatgtagcttcttattgctgctgaaccatattatcacaaattaatatcttaaaacaacacaaatttattgtgttacagttatggaggtcagaagtctgaagtaggcctcagtggactaaaatcaagatgttagcaggactgcattcctttctggaggccctagaggagaattttttttttcttttctaagttgtagaggctgtccacattctttggtttatgtccccctaccatcttcagaacccccagtgtccagtgagtgtttctacattattattttcctttcctcttccccttttaaggaccttattggttatattgggcctatttggataatctaggataatcttatttttaattagtcaccaaaattttatttactctcatrtcagattaactatgctaccattgagtggtctctagttatggtggtggcaatgtttatgttttagtcaaaataataaattcrgatggttttagaaaattaaatagaacttactgtaatcccagcaatttgggaggccaaggcrggtagatcacctgaggtcaggagttcaagatcatcytggccaacatggtgaaaccccatctctacaaaaactacaagaaattagccaagcatggtggtggacacctgtaatcccagctactcaggaggctgaggcaggagaatcagttgaactggggaggtggaagtggcagtgagccgagatcgcaccactgcactccagcctgggcaacgagagcaaaactccattcaaaaaaaaaaaaaaaaaaaggaaaattaaatagaactttaatacaacaaaatgcaatratctttaaccttattatgaactagccagtccagatcttagagctattctttttggaatttactatgtccaaattagatgctatattagtttactcttgccattgtaacaaattaccacaaatgtattggcttaaaacactttacatttattctcatttatcccaaagtcagtttcactgggctaaagtcaaggggttgataggattacctctggagattctatggacaatcagcttccttgtttttttttttwtcctcagcatctagctggattctcctttatgcctttttcctccatcttcaaagcatatcattccattccctgcttccataatcacatagccttccctgaagtaaaatctcctacttccctcttgtaaggatacttgtggttacatatagggcccacctggataatctycccatctgaggatctgtaatcacatctgcaagatcccttttgccacatagatagcatttgcagatttcagggattagaatgttgttatcttggagggctgtcatttagccagccacgtcatcatattgctaattcttaattttcagtttttaattttgctatatttctcttaaagtaattgaagatattgtattttcccctcatattatctgaatatagttacatctaactttattcctttgtcagtgtttgtactgtgactatgtaaatactgctcagtgctgaaccaattaatatgattattctttctgtaaaactcttgattctccaatagttaataattgttttttttctattaagtctaattttctatgtgccgtttgttccctttattttaagcaaacattctgctgctatggtacatacctattttagtatactcacttttcaagcacatttttctttgttttaaattgagaatttctctctcttagcctctgtcttgatttcttgttttggcatggtgtatgacaatcatcctaggacttgcatgtttgtagtgttgagttctttttcctagaaagcatgcctccctctttatgtcctgattttggtgaagaacatatttaagtagctttctaaaaaagcttgcttaagaagtaaaaatttaaaacctcatgtcagaaatgctttttttagtcttcacacttgattgatagtgtaggtgggtaggttggaattttggaggcatcattccattgtcttctgccttccagtgttctgtggaagccatttgtgatgatgattcctgagtatytttacgtgacctgttttccagaatttatgatatttctatggttggtattctcaattttgcaaatgtgtcttggtgtggaactttttcatttgttttgctggggaattgatggatcctttgcatcaagatgcttatatttattcttcagttctgggaaacttccctgtattatttgtttgataattgctttctctctgctttctcttttccgttttttggaattgcttgtttgtgtgttgcattactgcagagatttctaattattgtttcccttttatgttatcatttatatctgtatgctactttctgagagattttctcaaattttgtgtgttttctttttttttttggtggggggtggtgggcacttttgtttttgttttgagatggagttttgctttgttgcccaggctggagtgtagtggcacaatctyggctcactgcaacctgcctccccaggttcaagtgattcttctgcctcagcctcccaagtagctgggactacagatgtgcaccacatgctgggctactttttgtatttttagtagagacagggtttcaccatgttggccaggctggtcttgaactcctgacctcaagtgatccacctgcatcagcctcccaaagtgctgggactacaggtgtgagccaccatgccccaccatctcagttttttattttctctgtcattttaattccaggaacctttttgttgttgtcctttgaatgtacttagaaatatagcattctcttctctcagctgggcacggtggctcacgcctgtaatcccagcactttgggaggccgaggtgggtgggtcacgagatcaggagatcgagaccgtcctagctaacaaggtgaaacaccgtctctactaaaaatacaaaaaattagctgggcgtggttgcaggcgcctgtagtcccagctactcgggaggctgaggcaggagaatggcctgaacccgggaggcggagcttgcagtgagctgagatcgagccactgcactccagcctgggygacagagcgagactccatctcaaaaaaaaaaaaaaagaaaagaaatacagcattctgttctttcataggtaaaatgtcctagcagtgaggttaatagcagtcttttttattcttgctcttattgtctcgtctcttctagttcttggtattttttttttyacccctctatcattgctggtgagcaaatatttatcaaatgaggcactaaaagctatttggaataagtgtgtgcataggattcggtattggcagcagggtagaattgatggagaggagctgttttatatcttactgggcttcacttttaagtgttcccaaagaagaatcttttaatactcagccttatgcctaagctggtgttctgaatatgggcaggggcaaatctccttttcaatgtgcagattttcacttaatctccttacagttgtcttctgctgtcagactcattgagttttgagctgtttaggttccttttctccagagacaaaatctttggtcttttgagggtggattgggaaagtgagagttatctagctgcctgggataaggagaggcctggtctgtaagcccttattatatactttacactagttttccttaagttcagtcaggagtttctcacagtatcattggtccccaaaacctgacacttttttagagtgtctgtcagtaggggtttgcaagggattataagtgaatacagggttcagttcaccatgcttgattggacattgtaccattcaatatgctttttcggtataatgtgtgtgccatactgcaaagtctgattaaatagtccttataagattatccttacttcagatactagctgttaagtttgggatgatcactttagaccagctgtctrtaaattaagaggttaccaaggctgcttgtaatgtttggtagtttactagaaagactcacaacctcactgaaagtgctgtgctcatggttacagttttattacagcaaaaagaaacaaattagagccagccaaaggaagacacatagggtgacgttggaaagggttccaaatgtgaagcttcctttccattgtcttcagggagatgtgttatcctcccagcgtcaatgtatggcaatatacatggagtactaccaactagggaagctcactggagcatctatgtccacagtttttattggagtttcattacataggcatgattgaattaccaatcaggtgkttgagttcagtctccagtcttcctcctcttgttgagcagagaccaaatcccttattacatattgtgctactttgtttcatgataagaagttaacaccgccaggracctcttttttccaagtttcatttggctcgtatctatttaaaatttactagtcttttaatctcttttgttttcatttaggttagtggtctattttgaaataattgaatctttcttttaattgaagacattttcataaagggtaataaggtcttttgccctctgctttaatccagtcttaggaagaatgtttgaatagtgatttactcagggagacacattgcagtccgatttgatgtggtttgataggcacactttattttcatcttacaaagcatggcatgtgggcatcagaagtctgattgaaaggaagtaaaattagtggagcaattaaacattaactaggtggggggcaattakgctaaagttatgtaaatagttttagattatgtataagtaattatatttttcagagtagttgacagggcaaaaattagattgcttattcgtttgagacttatttttgatttgttttatttttaaaggttgtaacggttgtcacarttcgaaccttcatttaatttcttgcttgaagattattacatgatgtagcataactaaattttatcttcttaatggtaatacttgtagactgtagaaaatttggattggcttcagattaaatgccttttactgtcttcagtttgttaatggaatgtctttgtagtaactaaaattagttaagagtatcttttgtataaatatatgcttccacttactaaagcaatagttggtaacttagttgataagtagattcttaaaaatataacagcacttgtcaaagtgggatgtttcattytaaatcagacttattttagaaatgtattgaacaggttgaatatcccttagcagaactgcttagsaccagaagagtttcagattttggaatatttgcattatacttatcagttgagcattgaaaatctgaaatttcctttgagtgttatgctggtgctccaaaagttacacgttttggaacattttggattttgtatttacagatttgggatactcagcctatacctattaaatgcttctgtggtgatgagggaagtaaattgttaaatgtattataggatgatgtactttagtattcctccacatgtaccccatacatttgtacaaataaaaagctatccagtatagttgaagattacctgaaagagaatttttaaaagtttaataaatattacttagttattacatctataatgaaccttaacacaagacttaggtgttactccaacaataaaatgggacaatagacaagaactttaaaaagttaactgttgttagtaatacataacttcaattacagcmcaaatattaatttataaagtcaagtctaacagacttctaggaatgatgtccatgtcttgcctccaaatgatatcaaaacaaaactacagcctggacaggatcaaaagagttatcaagtaaaaactacaatgcaataatatcattctaactgaaaagaaaaaatataatcacttaagaatttcaaaaatctgctgtgcatggtagctcacgcttggaattgcagcactttgggaggccaaggcaggtggatcacctgaggtcaggagttcgagaccagcctggccaacctggtgaaacctcgtctctattaaaaatacaaaaattaactgggtgtggtggcacacacctgtaatcccaactactccagaagctgagacaggagaaacgcttgaacccaggaggcggaggttgcagtgggctgagatcgtgccactgcactccagcctgggcaatagagtgagactctgtctcaaaaaaaaaagtatttcaaaaatcttacttctttagggttgctaaacaatttgagttcctagactcctttgaattcaaatttagaaactagaactaatctaatttaacctattaatgtacactttcctttaggaaaaatatttttcagatcacctcacatctattaagcttattgaagaatatattttatccagaacactattctagaccttactagacaacaagatgttcaaatagtactgctattttgagttctacaaatctccaaaccgctttctgttgaggctgaactaatttacactcccaccaacagcatataagggttccctctgcagccttatcaacattcttacattcttattttttgacctttttttttttaagttggagtctcactgtcacccaggctggagtgaaktggcacratgttggctcactgcaacytctactccccgggtttgagcgattctcttgtctcagcttcccgagtagctgggactacaggcacccgccaccatgcccggctagtttttgtatttttagtagagatggggtttcgccatgttgtccaggcttgtctcgaactcgtgacctcaggtgatccaaacgccttggcctcccaaagtgctaggattcagatgtgagccactgcgcttggcctattttttgactttttaatagtagccattttgattggtgtgaaatggaatcacattgtggttttgaattgcagtctctctgttgattagtgacattgaacattttttcatgtttgttggtcacctgcatgtcttcttttgagaagtgcctgttcatgtcctttgcccactttttaatgttttttttcttgttaagttctttacagatgcctttgttggatgcatactttgcacatgttttctcctattctgtaggttgtcgatttattcttttgatagtttcttttgtgtgcaggaagtcattagtttaattaggtccaacttgtcaatctttgtttttgttgtatttgcttttgygatatgagtygtaaagtctttgcctaggccaatgtccagaagaggtttttcaaggttttcttttagaayttttgtagtttgaggtcttacatttaagtcttcaattcatcttggttaattttttttatatggtgagaggcaggctgcatatggttagctagttttccttgcaccatctattgagtaaggcatcctttatccattttttatttttgccaactttgtcaaagatccattgtttgtaggtgtgtgactttgtttctgggttctccattctgtttcattggtctgtgtacctatttttgtaccagtaccatactgttttggttacygtagtcccatagtttgaagtcaggtaatatgatgctgctggctttgttctttttgcttaggattgctttggctatttgggctcytcttgcttccctgtgaattttagaatagttttttataattctgtgaaaaatgatgttggttatttgataggaattgtgttgaattcctttgggcaatayggtcattttaatgatgctgattcttctaatctatgagcgtggaatgtttttccatttgtgtcatctgcgatttctttcatcagtgctttgtagttctccttgtagagatttttcacctcctgggttagatgtattcctaggtattttaatttttttttttttgatatgtggctattgtaaatgggattacatttttgatttggttctcagcttgaatgttattggtgtatagaaatgctactgatttttgtgaatacttttttaagcactcgcttatgagtgagcatatgtgatgtttgtctttctgtgcctgggttgtttcactgaagatactgacttccagttccatccatgttgctgcaaaattgattcctttcctttaaatggctgaataatattccgttgtatatatacaccacattttctttattcattcasccattgttgaacccttagttgattccatatctttgctattgtgaatagtgctgtgataaacttatgagtccagctatctttttgttatattatttcttttcgtttggttagatacccagtaagagaaattgttggattgaatggtagttctatttttagttctttgagaaatctccatatggctttctatagaggttktactaatttacgttctcaccaacagtgtatgagttctcttttctctgcatcctcgccagcatctgtttgtttttttgtttaacaatagccattctgactagggtaaggtgatgatgtagttttgaattgcatttctctgatgatttgtgatgttgagcatwttttcatatacctcttagccatttgtatgtcttttgaaaaatgtctattcatgttctttgcccacttcttkaacaggttatttttatcaaatatatctatagatatatttcgagatggagtcttaaactctgtcatttaggttggagtgcagtggcatgatcttggctcactgtaacctccacctcccaggctccagtgatccttccatctcagcctctcaaatagctgggaccacaggcacacaccactacgcccagctaattttttgtatttttagtagagataaggttttgccatgttgcccaggctggtcctgaactcctaayttggcctcccaaagcgctgggattacagtcaygagccacagtgcaaagccaagctttttatcacagtagcttttccccccaccttctrtagataatcttttttgtttcttaagaacatacttggagaaatccatgtgactataaacactttggaatgagttaggatggttttcaactcatttgggaattaaggataaatggcaagtcaggagatacatacaatagttagaatatgttaagtagcctctagaaaatcaataaaaatggagcatgactcatgcgcattgacctgtagaacagtgrttctcaaatgtcttagttttgtagtttttaccttgtttatactcttaaaaattaaagagcttttgtttatatagattatagctatcaatatttactgcattcaaaattaaaacaaaatttaaaatttaagtattaactcatttaaaaataaagctatttcatataaacataatcttttttgaagtgaacagtaactattttctaaagaaaaaaagatttgcaggaagagtgacattgtttttgtttttaaaaatctttttagtgtctggcttaataaaatacctgtgaattctcatgaatctgcttctcttttcaacstgagtctgttgaatcacatgaagttgcctctggaaaactccactgtacactaataagagactgagaaaaaggcaaatgaaacttcatgtttttgtgaaaataattttgagttggctgatctcatgagagagtcctgggggagccaagaatctccagaccacacttgtagtactgccacaggaaataaacatgttaactagattactgcctcagagctcatgctttggattccgattgcctggattggaattccaactaaccttctggatgttatttaatattatcctgtttcctaatttgttaaatggactaattggaccttttgtaggattgttagaattaaataaaattacactcgtaaagtgtaataatcacttaataaaatgctaccttttttttaatttttttatttttttgagacagagtctctctgtcacccagggtgtaatgcagtggtgctatctcagctcactgcaacctccrcctcccgggttcaagcgattctcctgcctcagccttgagaggagctgggattacaggcatgcaccaccacacctggctaatttttgtgtttttagtagagatggggtttcaccatgttggccaagccagtcacaaactcctgacgtcatgatccgctcgccttggcctcccaaagtgttgggatgacaggtgtgagccactggcctggcccttaaaatgctaccttttactatcaaagttttagtcctgttatgtcacgcttgctcagatttttctgttggttttctacctcgcttagagctttagcttttacagtggctttataaggtttttcttcatgatccggcatattgctgcctctctgctckcatctccttgttctcatctcacatccccctcactgtgcaaacagtggccttcttgcrttcatctaagaccaatcatgtctttcctcatggcctttgttttattattttctccacaaaatgttcacttcttcaaatattgttttgcttcccttgtccttcaggtttttgctttaatgcacctcagtgaaatcctttttcatttaacccacccacacaaattggccctgtctcccttctctgctttatttttttttctctgtaggatttttagttttgtagcacattaagtatttacttatttgtctctctttcgctagaatgtaggctccaatagggatggattttttgtttttatttgtctaatgtgtttactgctataccttcaatacctaggttgatgcttggtgcatatttaagtgctgataaaatatgttttgaatgagtaaatcattattgctactgtgaagatgaaagggaaatagtctttgcttctctcaaatgtatagccttaattggacattgcttctgatataaaatgaactttataaagtgtttagcatggcatgttggacacacagaagtactcaattggtggctgttactgaagaataagaaataaaaggataagacattttagaaagaaatgacctgaataaaagaaaattgcattcacattttaaggggtaaggtagatattgtttagtgcatactggaaaagtaaggttgcaactgtatagctgaggccaaggcattcggattttgttctgtgggtaatacatttttacatgttcttaaggcagaggtgctgtgatgaaagtggtaggtttggaagatgaaaccaacagaagtctttgaggttgcctgggatatccttctggtgtcagcttaaccagacatgcttaataaaacatttagataatttatcatacataataaaacatttgcagaattataaactatgcccaattattacttcctctaattgtatggtagcatgaaattgctatttgaccacagttgtatgttttgaactgtttatgtaattgccaactttaytagactttatcatttaaaactaagatttttgatttagaatcaatcgaggtgtttacactggcaactaacttgctaaatatactaatatagggcaaagtatgtttagtccagcaagtatcggtcagccacgaaagacgacattatctcctgcccagttggatcctttttatactcaaggagattctttgacttcagaagatcacctcgatgactcttgggtgactgtatttgggtaaggtttgcagaycatttgccttttaaaaaccccaccctaacattttataatgaatataatcaaacatacagtaaaatggaaagaagtgcatagcaaacacccatattactaccacctaggttctatggttaacagtttgctacatttgctttgtcatttatccatctatcaattcattctttttgttggtacatttcataataagttgtagacatcaatacatattaccctgacacttgagcatgcrtgtcattaactagagtttgatatttgtttgtagtttttttaatcatttgtctgtttatttcttcccaaattattttctctcaagcatatttactagatggaacacagttgtccctttagacttagggaactccttcccctttttctagtgactggttctctacatctagtggaattcaccagttttgaattaacagaatgaacatttacaaacacacacacacacacacacacacaatgtcacagggttgatactttctggtccacaaaatattgamtattaatagaaacagagtatgacagtccttgttacatttttgaatagatttttaggtccaaaaaaaactttaaaatgsctttttttaaaaaaaatgcttttttatttccataggtttttggggaacaggtggtatttggttacatgagtaagttctttacatgattcgtgagactttggggcacccayctcctgagcagtatgcactgaacccaatttgtagtctttatccgtcacccctttcccaccctttcccccgagtccccaaagtccattgcatcattcttatgcttttgcatcatcatagcttagctcccacttatgagtgagaacatatgatgtttggttttccattcctaagttacttcacttagaataagtgagttactttacttagaataatttgcagtcccattcaggttgctgcaaatgccattaattaattcctttttactgctgagtattccattttgtatgtatatatatctatcacagtaaaactccttagagatcatattgtataatgttttattttacaggtgaggaaactgaggtgtaggcagattaagtgatttattcagccgttcacatctagttattattagcaaagctccagcaaaaacttgggtcttttgatattcaagctgatatttacrctctacaaaaatataaagtttgtttctgaaagtatgatttgccatactgtattagtccctattcatactgataaagacatatccgagactggaaagaaaaagaggtttaattggacttagggttccatggctggacaggcctcagaatcatggtgggaggtgaaaggcacttcttacatgacrgtgtcaagagaaaatgaggaagaagcaaaagcggaagcccctgataaacccatcagatctcgtgagacttattcattatcatgagaatagcacaggaaagactggcccccatgaatcaattacctctccctgggttcctcccacaacacatgggaattccgggagatataatttgagttgagatgtgggtggagacacagccaaaccatttcatttcgtccttggcccctctaaatctcatgtcctcaygtttcaaaaccaatcatggtttcccaacacacccctgaaagtcttatttcagcattaacccaaaagtccacagtcccaagtctcatctgagttaaggcaagtcccttccacctatgagcctgtaaaatcaaaagcaagatagttatttcctggatacagtggggttrtaggaattgggtaaatacagccattccaaatgggagaaattggccaaaacagaggggttataggccccatgcaagttcaaaatccagaggggcagtcaaattttaaagctccaaaatgatctcctttgacttcctggtctcacatccaggtcacgctgatgcaagaggtgggttcccatggtcttgggcagctccacccctgtggctttgcagggtacagcctccctcctggctgttttcccgtgctggcattgcgtgtatgggttttccaggcacagagtgcaagctgtcagtggatctaccattctggggactggaggatggtggccctcttctcacagccccactaggcagtgccctagtagggaccctgtgtgggagctttgaccccacagttcccttccgcactgccctagcggaggttctccatgagggccccacccctgcagcacaattttgcctgggcatccaggtatttccatacatcttctgaaatctaggtgaaggttcccaaacctcaattcttgacttctgtgcacccacaggctcaataccatgtggaagctgccaaggcttggggcttccactctctgaagccacagcccaggctctacattgtcccctttcagccacggctgcaggggctgggrtacagggcaccaagtccctaggctgcacacagcacagggaccctgggcctggaccacaaaaccgctttttcctcctgggcctccaggcctatgatgggattggctgtcttgaagggctctgacatgccctagagacattttccccatgctcttgggcattaacattaggctcctttctagctatgcaaatttctgcagctagcttgaatttctcctcagaaaatgagttttccttttctactgcgttgtcaggctgcaaattttctgaacttttatgctgtgtttcccctttaaaatggaaggcttttaatagcactcaagtcaccttttgaatgctttgctgcttagaaatttcttccaccagataccttaaatcatctctttcaagttcaaagttccacaaatctctagggtggggcaaaatgccaccagtctctttgctaaaacataagaagagtcacctttgctccagtcgccaacaagttcctcatctccatctgagaccacctcagcttggaayttattgttcatatcactatcagcatttttgtcaaagccattcaacaagtctctgggaggttccaaacttcccacattttcttctgagctttccaaactgttccaacctctgcctattagccagttccaatgtcacttccacatttttgggtatcttttcagcaatgccccactctactgataccaattactgtattagtccattttcatgctgctgataaagacatacctgagacagggaagaaaaagaggtttaattggacttacagttccacatggctggggaggcctcagaatcatggcgggaggcaaaaggtacttacatagtgacatcaagagaaaatgaggaagcaaaagcggaagcccctgataaacscgtcagatcttgtgagacttactcactatcatgagaatagcataggaaagaccagccaccatgattcaattacctctctcaggtccctctcacaacacatgggaattctgggagataccattcaagttgagatttggttggagacacagctgaactgtatcacatgctgatactggaatgtatctattatatattttttgggattaaaaaacataaaaataacacatgagctccttgaaggaagaaaggtgcatagtaaatgtttagtggattttatgtattcaatttatttaaaattaaaaattcaaaaggtatgtaagaatgtacaatgaagttttcccttttgcttttgtcccaagctagttttcctcctctttaaggcagtgattgccatctgttttttgtgtatgtttccagagagattttatgtgttattgatttctatttgggtaaaaagcgggtcattgcattccgttgttctctagaaagtccatactcagtcctatatccatagcaattgggctggtgtgttttttttcttcttcttcttttacatttacatttttatagtctctcataaaatggctttttttttttttttgagacaatctctctgttatctaggctggagtgcagtggcatgatcatagctcactgcagcctccaattcctggcctcaagcaatccttctacctcagcctcatgagtagttgggataacaggcatgagccagcttggctgcatgtttttgaaaataggtacccactcttaaatctgtttttcaggctcagtagtagtggtttaacttttaagatttccagtaattagataaattacttgaagcactcctagtattttttcgtatttcagacattaactctcccagctgtttatttttttactttcgtgttttaataaccctctatgactttaatttcaagaactgaagcattctcctttaagggataaagtattttattttgatcatttatggggaagtacctctaaaggatgcattatatatgttctttctttggtagtttaactttttcctactgacttagggttatgaaatattcattgttttgggtgattctgctatagagtactagaatgtaagtttctactcaaagtggtccaagagttttagaattatgttttatttcttaagtacttccctcacttgcagccattctttcttcttttcatttttgtttgatctctgctctgtaggcacccaacctatttgttgtttttctttgtggttagaaatttcatgtccagattttatacaaatgaattttcagttctgattgcagtgaatattttactcatatagattttatttaattaattaatttattttgagatgaggtcttactctgtcacccggctggagtgcagtggcacgatcttggcgcattgcaacctttccttcccaggttcaagcgatacttctgcctcagccgcctgagtagctgggattacaggygcccgccaccatgcccagctgattttttgtatttttagtagaggcggggtttcaccaggttggccaggctggtctcgaactcctgacctcaagtgatccacccacctcggcctcccaaagtgctggttggtattacaggtgtgagccatcgtgcccagcctcacatagatttttaatgtgtttggtttctgatttatttttgagactcgaatttttttttttctttagggttctaattcagtcttcagataactgaagttagatagccatttctatgctattggtagtggttattgttttcaaattgaaaacagctttattgttaagactataaaagaataatatgtcattgtaaaatatccaaaccatacagaactttataaagaagaaagtaaaaattacttagaattttctcatgcagagatatggctaatcaaattttggtaactgtccttttaagtgattctataccataaatattttgatgctgaattttctctttgttatgatactaaatttcagaatttttaagtgatgctcaatgtataatgattcgtttataatttaraattctttatcttttcataaccgtagtatacctaaatatattacatattaacatacacatattgaaataaattatatatagaactgcaactttatagttttttttctaagacctggataatggcaacgagagtagcatttttagagatttcagaggtagaatctgaggatggagaagaatggcaggataagactaactttaaggtatttgcttttgagtgactagtcactgacasaattagcccatatcggggaaaacaggatgatcagcactctcctgttaacgttctagacagttgggggccatttatcttgaaacattatcttgtagtaatttgcattcacattgatagtagaagctgacgttttctttggacaactctttttttcaggtttcctcaagcatctgcttcctacatattactacaatttgcacagtatgggaatatcttaaaacatgtggtaaggcttaatttttttcagttcagagttttgactaaagagggataagttgtgaattgagagaaactgcttctgaattttgtgggttttttttaaacttaaatttttttttgagttttgatataatacatcctttgaagtctggaaggctggaagttgcctaatttttgataaaaagagatatagtgagaagatatggagaagtgagagtttgaaaatccacctcctctcacctcctttcttaaacagtttacagtcttaaaaaagatagattatgccaagtattatattactgttttccaatttgagctgcttttattggggataaaagaagtaggaggcagttcctgagcttttagagtttttagagctttatagctctaaaatttaaaaaattatcttaccttgygctacaagttataagtaacaaatccttttttgttgctagagattgacttaactcctatacaaaatcaaattgagtagttttaaataactttatggcaagtgttgctttgatctctttacaataaacattatattttgagaagtatcttactttcagagaatatgtacatgttgattgtagagaattgagagattgttgaagctgttctaaatacgatttttgttgaactttacagctttttacaaggcatcaaatacggaatggaagtaaatttatcttaccatgttcctattttctagtagaattcattagatgtagattttatatattttctattttaagagacagttttattctttgcagatgtctaatacaggaaattggatgcatattcgttatcaatctaaactgcaggctcggaaagccttaagcaaagatgggaggatttttggagaatccatcatgattggtgtaaaaccatgtattgacaaagtaagttattgrtgatgtaggcaaagtagcttaatctatatgaagagcacaagaccaaggattgaaattggtcgttgtgtcacttggtttcactgtgtctgtttttcttagtttgtaaaatgtgatgatgtttatagtactctttgtggtaagccgaaggtatttaatcatagagtttagaatttagaggtaatctgtcctcacctcttcatttttcagataaagaaactgagagggcttaagtaacttgtccagagttgttaaaggtgaggcctagattttaggtctcttgactactaatccattctctttcttgtgcaaagcgataccagattctttaaagtacttaaatggaatggtactatttcagaatgaattagttcatattaacattaactgatagttaacttttaaatgtcaaaggttttcgtttcaaaatatttctgtttaaaactattttaaaattattctatatatactcattaaatagtacagagtacaatttaaactgttctttgtggcttgttaaatcattgtgaacattctttaagtatatgtgaacttgtactacattccaggcattgtgcttggtgctagtatacacacattaatgaacaaagcaagatgtggttcctattcttaaaatctgttatatcagtgtagttatatagttataatactgtgctgtaacaaatgtttgcagaggccagaagaatatttggggtaactaagtgctaaatagcattggagtttgattctttccaatccaggtttccctaagaatttttttgtccttgctgatttttcatagtgttttaggaaattcttatttttgtggtctatagttgtattgagattgtttgaggtcactgaagtgagatttctggctgagcattcaatctcaaatgctacctaagaagcaaatattttctcaagcctaaaattatttgcaagtttaattagagcaaataaagtatttcatctttatcttttaattaaatttyctaagtaggatgtaatactggatgatatgtattatgtttataaacaraggagttatttctttgtttctccagagtgttatggaaagcagtgacagatgtgctttatcatctccatctttagcctttacaccaccaatcaaaactctaggtacaccaacacaacctggaagtactcctaggatttctaccatgagacctcttgctacagcatacaaagcctctactagtgattatcaggtattttaaggattggataaaaaaagatgtactttaatggctgagtgcatagcatgcttaactttttcattgtattgatttgtatgccattaaatgtttcctgtggaggctattaccttgatgaaaccttyacgctttaaaagttttctgctttaaagttaacatcttggccaattggaaagttatcatgaattaaaaaaaaaaatttatttgccattcctttaaattttttgaaagttgttttagctttttctaagttatatttgcatacatacgaaatgtatcctgtgtgcatctttgacatgagggcgcattaaaactctattaaattgatgactaaattgatggtatccaaagtgcagaaccttaggttggagtagctttggttatttaaatgaagacattgaccaacctccagacagaaaaaaatttctcacttcaaaaaagcttaaagaagttaattatgttctttgaagaatggtagaagtattatgatctcattcagtatattattgtctcctactgactagccaagtgttcgaacttaaccagctgcagaaacaggtcctgaaacacacagtacatgaaacacttgtgctttagtagggcagatagtggtagttcagttttttgacttcctctgaaatttggagattattctagaactgtttttttctttaggttctattactgttattttaaatttcccattcagtgcagcttttgttattcaatttttctttcttttgttttgagacggaatgtctctctgttacctaggctggagtacagtggtgctatcccagctcactgcaacctctgcctcctgggttcaggtgattctcctgcctcagcctcctgagtagattacaggcacgtgccaccacgcccagctaaytttttgtatttttagtagagatgggaccatgttggccagggtggtctcaaacttttgacctcaagtaatctgcccaccttggcctcccaaagtgctgggattacagacctgagccactgcgcccagctattcaattttctaatttaagaaacagatgttatttgctttgccaaaggaataaaattttggcattcttaaaagcataaggatattctaagtccatattttaattttaaaaatatacaattcaggccgggcgcaggggctcatgcctgtaatcccagcactttggcaggcygaggcgggcggatcacgaggtcaggagatcgagaccatcctggctaacacggtgaaaccccgtctctactaaaaatacaaaaatttacaatttagtgctataaatgcattttggtgtttctcttttaaatgagcaattctagaattrcctatgacactgaagtaacaataacctaaccgttttttttgtgtgtgttttttaataggttatttctgacagacaaacgccaaaaaaagatgaaagtcttgtatccaaagcaatggagtacatgtttggctggtagtagaacaccaagaagkaggttgctacactaaaacagagttagcagagtgctgctggttccttcggttagttatataactgttcctgcagtattggatagctatctcatacttcttttagaaagaagccyttttcattaaggatacaacctatttgtagctcgcactttaaaagatgcttgagatacattttaaagaaaactaaaaatcyctgtaaataggattttgtgctttctgtaacagtgcatgcttcagcacagaaaactcagcattgattattgtaaattaaataactgaaattgtggtgagacgtcatagtcttyatgagaacgtgggggtgaatttcatgaaggggaactatagttatttctaccgacacaaatattataattagcaatttgaattatggtcttttaatttagatagtatttaatattttaattatccttgtttgtatatgtcctgtcacagagtgtcctcttggtgtattctaaaacgagcattcttttaaaaaacctaaagtttcttgataataaacattgtcaatgatatgtgtattagtctgtttgcattgctataaaggagtacctgaggcaggataatttattaaaaataagaggtttatttggctcagggtttaattggcttgtagctgtacaagaagcatgatgctttacttgtggaggaaagtaaagaagagtgagcatatcacatggtgaaagagaggaagagagcaggaagaaggaagttctagactctttttaataaccagatctcacatgaactcattactgcagggaggacaccaagccattcatgagggatctgcccccatgatctaaacatctcccactagtccccacttccaacatcggggaccatatttcaacatgagatttgaaggggacagatatccaaatgatatcaatatgtattgaacattttttgaaagggtgatttattataaaaagctttaagtattcattgaaagagaaaatatgtatgaaccactatataccagctttaattaccattaaattttgccatacttgtttcttttctttcccttttattttgtttaaagcacatcccagataagatgtcattttactctaaatacgtgaggatatatcaaaaaagaatatttctacatggaattacaatgtcagtatcccattgaacataattaataccttttttttttttttttgagacagagtcttgctgtgtcacccatactggagtgcagtggtgcgatcttggctccctgcagcctctacttcctgggctcaagtgattcttgtgcctcagcttcccaattagctgggactacaggcgtgtgccaccatgcctggctaatttttgtatttttagtagagacgggatttcaccatgttggccaggttgatattgaactcttgaactcaagtgattcacctaccacggcctcctaaagagctgggaagtattactaagtaatactaaggaatgtactggcatgaatgaagattcatttataaagtatattttcatctgaaaacttttacattgaagtctttttcttccagtttaggattatattttatatcctatttcataatgtgcagaactcaattattcaatatagaactggctactaaattccattttaaaagtcgtgcatttgtatttgaattaatacacattttattaaaagggttgtttattggagggggtgttttatttatttgcataggccttcatggactgtgaagtttgcttttgggctaaaaatatttgtttgctatattttgttatttctcttggtatcatatcttacccatctttgtatctgtcatttattttaaaagatccaggaaaatttcagaaagcgagctgtcctatttttgaacactatataaaaacaacaaaaatggaatatctgtgatgttaggaaagttaccctgaactaagcctccttttaaaagctcagagaagctgacttcaaaaaaaataacgtgaaactataatcatgcaagtttgtttaaaaaaaaaaaaaagagtataaggaagaaaataacatccctgtagacattgaaagcacaccagaaaggcatgcccataaatggatagaagctatagagtagtacttaaaattgagttttaagacatttagaaaatgatacaagatatgaaagaacaacaaaaataaaattgaagaacttgggaaaatgttagtaatagaggaaaatcactcataaattaagactagaataaacaacagctgatgaacaacagatatgccctaaaagaaatgaaagataaaaatggaggacttttagaaatcagaaagaaaagagataaaaaggattagtaggggtatgacaaactctagagacagaaaaaatgcaacatacagaacaaaatcaaatgactactttgatgaaaaaaatttggaactacacattggaagagtaacctgcctacctgagattattatactgggacaaccaatggcaatatacaaactttgggtttgactagacaaaaacagcaaatgacttacaagagcaagagttaaaacagcagcactatgtcaggaggaaaaagaatagcctctttaagatatctgtagaaagaaaatgtgagtaaaagattttgtatctaccaaaactgattaagtataaaaataactcttcagacactatcagtgtgcaagaattcaggaaacgtgtttcccttgagtgtgtcctgaggaatggactagaaaatgcacctccagcaagctaaatgcctagaaagatgacataaaggctggtgagcatttaattttatgttacatcatgagcaaagtgctgaccaggtttattgcttgaattgaagctcaggccactaggtagcttttcccttatcactgtctttcaagtctactcaggctaatatgacaggagtcagtctttggtttacagtaaaataccaagctgatttatctgtgaaccaagcctggggttttttcctcctctgtcacctgatagtagtggtgaaccccaacgaagccatgagctgagggaaaggtgctggtgtcttggaggtaagttacatgggccaccttttcatggaagtgggagccctaggaatggcttgggcaccatcctgaatgtaacatgagttattactatgctggtctattctttgggtttggtggatctgacaatacccagctcatgatggatagctctggtcacatagttgatgtgctctgatgtgaggagctactctctaaatagtgactagttatctgctgcggaaagactgactgagctccagaaacctaaaggtctgtgttacgacttatgcaatcagggcttgccagagactctgtagcatccttgtctaccaggaatgtctctggcatcatgggatttgccaggtcatatggcctaaatgtcgagttatttgtactataagctggaacttgctccagaactccctcactctgggccccactaaaatctaagccacataagaaatgggtcaaaggagttttcctatctacaatttgtgtttctaaaatccagaagcttataaagtgctgtatctctttttaatggtaggaggatcaaggtgaaataaattatcctttagtgacgggcagtcctagcatgctccagaccaatggatccctcataacttcaccagtgtggttgtcctttgaatttttgtggtttatctttaaccttctggaatgcatgtgacttagggcatcctgagtacttccagtttgtttatttatttatttatttttgagactgagtttcgctcttgttgcgtgggctggagtgcaatggcgggatcttggctcactgcaacctctgcctcccaggttcaagtgattctctgagtagctgggattacaggcgcccaccaccatgcacggctaattttttgtatttttagtagagacagggtttcccatgttggccaggctggtctcgaactcctgacctcagatgatccacccgcctcagcctcccaaagtgctgggattataggcatgagccgtcgcacccggccagttacttctttaaaaaaataatttttgttgtggtacaatacatattacattaaaattaccattttaacatccccccccccctttttttttttttggcgacagcgtctctcacctgggctggagtgcagtggtgctatcacagctcactgcagcctcaacctcctgggctaaagtgatcctcctacttcagcctcccgagtagctgggacaacaggcatataccaccatgcctgtctaatttgtattttttagtagagtttgccacgttgcccagcctggtcttgaactcctgggctcaagtgatctgcctacctcggcctcccaaagtgcagtgattaccagtgagggccaccgtacccatctcatcttaaaacaatttttaagagatgttcagtgatattacatacattcataatatgcaaccatcatcactatccattgccataattctttcaatcttgcacaaatgaaactttatccattaagtaatacccctccccttctcccaggccctagcaaccactattctttctggctccaaaattttgactatgcttcctcatataagtggaatcttgcagtatttgtatttttgtgacttatttcatttagcatgatatcttcaagattcatatatgttacagcatatgtcagaatttcctttttaaggctgaataatattctcttgtatgtatattaccatatttgattatccattttttgatttgttgtacacagcaactagaacagagggtaagaacacagaatacattaataccttgtctaagatcacatagataagtagtaacagcaataggataaaaactttttttttttttttttagaatgcagttttgtggaactgtaacattttgagatttaggtgtttttagtttctattttaggtccaggagtacatatgcagtgttgttacatatgttaattgtgtgttacagggatttagtgtacagattgttttgtcactcgggtaataagcatggtacatgataggtagtttttcagtcctctcccttctcccaccctcccaacttctgttgttcccttctttgtgtccatatgtagtcaatgtttagcttccacattgagtacacatggaatgagaacatgcagtatttggttttctgttcgtgtgttagattgcttagtataatggcctgcctctccatacatgttgctgcaagggacatcattttcttcttttttatggctgcgtagtattccatggaatatatgtaccatattttctttatccagtctattactgttgttgggtatttacgttgattccatgtctttgctgttgtgaatagtgctgtgatgaatatatgtatgcatgtatttttatggtaggatgatttatattcctctgggtatatacccaacagtgaggtttctgggttgaatggtaattctgttttaagttctctgaggaattgccacattgctttccacaatggctgaaccaatttaccttcctaccatcagtgtgtaagtgttccctcttctctgcaaccttgccaacatttttgttgactttttaatagccattcaaactggtgtgagatgatatctcactgtggttttgatttgaatttttgtgattagtgatgttgaacattttttcatatgcttgtcagctgtatatatgtcttcttttgaaaggtgtccgttcatatcctttgcccactttttaatggggttgtttttgcttgttaatttaagttccttatagattctggatattagacctttgtgggatgtacagtttgcaaatattttctttagttctgtaggttatctatttaatctgtgtaatggttaatactgagtgtcaacttgattggattgagggatacaaagtattaatcctgggtgtgtctgtgagggtgttgccaaaagagattaacatttgagtcggttgactggggaaggtagatccacccttaatctggtgggcacaatctaatcagctgccagcaaatacaaagcaggcagaaaaggagagagacaggcctagcctcgcagcctacatctttcatctttctcttgtgttggatgcttcctgccctcgaacatcagactccaagtttttcagttttgggactccgactgtctctccttgctcctcagcttgcagacagcctattttgggacgttgtgatcttgtaagttaatacttaatatactcccctttatttatatatatgtatatatatttatatttatatatttatatgtctaatattgtcagtggggtgttgaagtctcccactattattgtgtggttatataggatatatatataggatatatatatatctcctattagttctgtccctctaagataaccctgactaatacaatctgtttataggttgttttgttttgttttgctgtgcaggagctctttagtttaattaggtcccatttgtcaagttttgtttttgttgcaattgctttt

SEQ ID NO: 96522 - DNA, 25988 bp, Homo sapiens
atagttgaaggacctgtagctcatcttcatctagcaggcaattacatgtatagaataggaactaaagttaaagggaaagctctggattagagacacagattgagaaccatcatatttggatgctaattaaataaaaaaatcacagagtaacaaagcataaaatgagagaagattcagaaccttaaggaacagaaacatttgagtcttaagttttatattcatttcccctagtattttccataaatagcagatactgtaaaatactgcaaattcaaattaactttagattttataaaagcccttcatgttttcttttcttttttttttttctttggagacagagtctcacttcatcgcccaggctggagtgcacacaatcttggctcactgcaacctccacttcctaggttcaagcaattttcctgcctcagccattccagtagctagcactacaggtgtgcaccaccgtgcccagctaacttttgtatttttagtagagacagggtttcaccatgttggccaggctggtctcgaaatcctgacctcaagtgatctgctcacctcggcctcccgagatgctgggattacaggcgtgagccactgtgcccagccactatgttttctatttgagtcttacagtcaccctataatgtagaaaggacagtagtatactctctcccatccccacaccttttttcatttaaaaagtataaactaataaataaataaagaacgaatacacagattaaaaagccccaatacaaaagaatatggaaaaattataactttcagtacctgctcagtatctaacttgcctctctcatccattttatatataatatggaaaggaatttaaggaggttaattggcaagtcttagtagctaacaagtctatattaattaagaatcagggagactgttttcacaagatagtgccgaaggcgaaaaaggaagctcctacccatcttaaagcagaagccaaagcaaaggctttgaaggccaagaaagcagtgctgaaaggctgaaagtagtcataaaatatggtaagtggcatcaaacacatacacaaaaaaagaagatccgcaagtcacccacgtcccggtggcccaaggcactgcagccccataggcagcccaaatatccttgtaagatagcaggatacaaggagaaagaagcttgaccactataccatcatcaagttcctgctgaccagagttcaccatgaagaagatagaagacaacatatttgtgttcattgtggatgttaaagccaacaagcaccaggtcaaataggctacaaagaagctccataacattgatgagccaagatcaagaccctgatcagacctgatgaagagaagaaggcttatgtttgactggctcctgattatgatgctttggaggttgtcaacaaaattgggatcatctaaactgagttcggctggctaattctaagtatatatattagtatcttctcaccagaaaaaaaaaaagaatcaagcactatcaacagttaagtattcaaaatgacaaaggtgatggataaatttgattctaacactgtttgaagtttcatgtgtcaaaataggacaaaacagatattctgtaaaccatgctttgccattcaataaattgatgccacttaccatattttatgaccacttttttggcagttatatttcaaacctagaaagtactataattctataaataatcaaagtcacacctcttaatatattacataattgagtttttatgcttttctctaaaattaaaatctactcatactttttctcagatttgtctccatggcagccagatacccaaacagaaagtctagaattcacaaagatgaaccgtaagtttctaaactggacccaagtcaaggtaaacatatttgcaatgccaacttttagtatatattactgagtgaatgttaatgcaaagattaatgcatatattcatcatatagcattatcagaaaaggaccttgaattactccaactcttattttccaattttagtttaattctagaactagatagctttcagggacagtaagagaataggatataaatgtctatacaaattagcacaggtctgaatcatgaaataaattagtttgatttatggaaagcagctaagtgccaagtaagaactaatccaaaccaaaacattcagcacaattttcatttctggcaactccagctcccggctagaaaaactatcctagctatgacaggctgggtgcagtggctcacacctgtaatcccagcacttatggaggccgaggcaggcggatcacctgacgtccggagttcgagaccagcctgaccaacttggagaaatcccgtctctactaaaaaaaatgcaaaattagccgggcgtggtggcacatgcctgtaatcccagctactccggaggctggggcaggaaaatggcttgaacccgggaggcagaggttgctgtgagcccagatcgcgccactgcactccagccagggcaacaaaagtgaaactacgtctcaaaaaaagaaaaaaaaaagctatcctagctatgacatgaaatggtgacaatttattgagctataaaagtattagtaaattagtagatttggcagccctttctctaaagctgaaactactgttactgcttcataccacaagtgctagagccttgaattagaccaaggcacttccactctgaagtggaagccagtggtgaaccaaattaatcaagggaatttgtttccaaaatacatctacccccttcacactcctcccatccgtaaaattctgaagggaagtggagatgatataagtgatatgtgtatgcctttttaaaaactcctaaattgttttgaggtatctatttccaactccatgaagaattcttaaattaggtccaaactttttcaaaacactgtatctatcacaggcttaaggagcagagctacaaagtgacaagggctcaacagaaggctaggaaggtaaggagctgtactcggaacagatgtaagctactttcagagctttctgtgctggctccctccagaatccactacattttagtcagtgataaatgttcagttccacatcccaagaaaagaacataggctactgaccagataaagtgtaaaaagaagcaattctggaaatcaaaaaaaagataataagccacagacgatgacagacaaaaaaatcttctgttctggctttaaaagaacagtaactcggaacaaggatctctaaggggaaaaaaaaagaacaatacaaagtactggtatgataactagttttgaaacttctgcccatattttatcagtttttcactatgtagcattggtttttctataagactcagtcaagctgaaaatttcaatcattctagaacttaataaactactacaagatgccaaaactgtattgcaaataatcaaacttaaatctgaattgcatgtcaagacagttaaagggccgggctaaaaaacacactttcaaggtctattttagggcaaacaattaaactcctttacaatcattgtttcaaattccttataaacagctccaatactgaaatgtttcatcagagagaacttctataacgtataaacgatcatctaaccacactatatgctaatttggactagtgtttctttagctacttggtaatttcctactcgatactcaacttactgcattctacaatgacacctactggccattcaaaatcagccattagttctctaagacagctctagtaggctggttacataagaagaaacacacacacacacacacacacacacacacacacacacacgcataaaagcaacacacacacacacacgcataaaagcaaagatttaactggtactcaaaacactacagaattccacctaaaatagaaccagaaattttctttgtgactgagattgcattattcttggaaaaggagaaaagacaaagaacaaaacaccaaacatcaataaaaatttttatctaaagcactgacaaatgtctcagtactgagaacatctgggaacaaacaactttaatgatgcacctctttcccaattaaatttttgagaaaaaatgaaattttgatttaggttcatatataggaatataaattaccattaatagaaaaaaatcacatcttataaagtttttctgacatgcagtaccgaaataaatttaggaaaattgtagagttgctgacactacattagaccttatctcctaagctaaaggcaatatttcaaacaccttacattttagaaatttataacacttcttttaaaatcattttccagtgctgctctcaaaattgtttttcaatgacctacaaaatcaagtttttatgtcgtttgcccttccataacacatactgaatagaattcctattttaattctacattttattgtggaaacaatgaattataaaatttttttaaataagataatttagttaattatatctataaatatattttgcctctgtccgagaggttcagagtccactttttaaacctaataaataattcataagtagcttctcagacttgcttacagaacaaactacttaaaagttgacttttttctgccgggcacggtggctcacgcctgtaatcccagcactttgggaggccgaggcgggcggatcatctgacgtccggagttcgagaccagcctgaccaacatggagaaaccccgtatctactaaaaatacaaaattagtcgggcgtggtggcgcatgcctgtaatcccagctactccggaggctggggcaggagaatggcttgaacccgggaggcgaaggttgctgtgagccgagatcgcgccattgcactccagcctgggcaacaacagcgaaactccgtctcaaaaaaaaaaaaagtttatttttttccccatattcagaccaccaccttatttgcacagtccctaacttccacaatatcctggggggaggaagggatctaccaactaattttctagtcattttccaacttacactgagctcctactgtacatttttaaaggattccccacttttctgaagatctttaaaaaatgttgtcagccttgaccctcaaataaattcacgaactacaaaacatgaacctggccacattcatcgcaaactagtatctgtcaagtccataattgggataagctcttcgtgactactctatcctccatgctaccacccttcgcctagagaacctgccaatgtaaatggcactcaagccaatgaaaaaagtgttctaacacattaataggttgcaagacctcctctcccaggagggacaacctagttgtttgggtaaataacagccaaagattacataatgtacagcaataatgagtgttcagaatctgaccgccagtaaatatttttcttctccgctccccctcaccacccccaggaaatggccctaagaagcaatcactgggatttctcttaactgtcttcaatgccgtgtccttttctcgcctggggctttgtgcaaagaatcccttcagccctcacgacaccgccttgctcccgcctctcctccctctctgctggcgccaccgcagcccccacgccctaggtgggcccccacgtcgccccacaaggctcggcttccacccgcctcggctgccgccttctcctcctcacgaccctcccaagatgctacctggtttacgagaggttccgggaccaccaacacaccggctaccgcctttccagaccaccctcgccagctcccgtctgtagtttccgcggccgaaggagaagaaaacccctcttcatctagcactttgcctcccccaaagacagcaccgccgcctacctgtcaccctgctgtctccggcttcctaccgccgccgcctcccgcagcagcctgccaactgcagcgcaacaaccaaccctctcattgggtgagaacacgctctcaacaacagcctcccttattggctgcagtatgccggcagccccgccctgtgtgcggtgtctaaggattccgtccccaagcaaggacaacatattatcttccccgcccttctcttttctacagtatctgttacctcagtcagattgaggatgcacatatactgggaaaataatcgacttccagcgtccctcatgtagtctctacctgattcaggaatctctaacccagtatcggaacgttaagcggcttctccgctttcctgccgtgagaaactcgaggtgacaacctccgtttccggttggctccggttgcagagttgagtgtcctgagaggtcagattgctgtcaggtaaattagggagttggtgggaggcccgttgattaggattaagagctagactctattctggggagtgcagaaaaggagagactaaatggagaaggatgggaggctgggagggagatcaaagaactagcaggcgagaactaatgaagtcctagtttagagttggggtaggaagaggtggttggaggattcagtgatcattactgtagttgttaaatccaggtgcttgttcccgcttctgccacacgcaaaattgtctttgtttgcctttggatcgcaaaggcagaagaacagcatcactaaaagtaataacagttcatttgttttttatgttctaatattcatataatcacagtttttaatacgaggaagttaagatatatacttgatagtcttcggtaaactaaaattgcatgtagtggaagtagcattatcttcttatttctttcttagggaaaggataccagcacattttcttagagccagcttcctttagtggaggttgatcttcatgagacttttagattcacttcagacatagatagcttttaaaatttttggttgcatgttttttctttatttaactaatttccttactgttattatttgagctgctctgaaacggaaataaccaccatttttcagtcctcagcacaatttaagtcaatttttctatttttattttttattgtcaagtatatatacagaagggtgtataaaacatacattttaaaaaattataactaacagaagcagacactcctgtatccacctcttagattagaaaataaagcattgccaataacttagaacatgcagtcttaacaggggtgattttacatttcaaggggttgaaaattggtggggccggggtcggaatcttagttactacaatgatttgtgtccctccaaagggccacagtatataaacagttatacagtatatatgtagtgttaaattttcatggcggggggtgtgattaggaataaaatgtctagaaaggttccttacagggacaatagttaaaaattggttgaaaaacactgccttagaatctcccagtatgtttctgtgattccatctcctccaccaagaggtaaccattatcctgacttgtgctaagcactcacttgttttactttaatttttccgtctatgatgaattcctaaaaaatgaattgttaggcatttcaatctatataaatgggttcagagtgcatgtgtatttttttctgactcaccccttgctcattatccatatttgtggagattcaatcacacttttgcatgtagttttttgttgtataatattctacagtgtgactataccataatcccttctattgttattggacatttgggttgtttacagttgggagagagaataaacaatgtggctataaaggttcttttaaaaacatatttcttaggctgggcacggtggctcacgcctgtaatcccaacactttgggtggccgaggcaggcggataatgaggtccagagatcgagaccattctgaccaacatggtgaaacccagtctctactaaaagtacaaaaaattagccgggtgtggtggtgcacgcctgtaatcccagctactcggtaggctgaggcaggagaatcactagaacctgggaggcggaggttgcagtgagccgacattgcaccacccactgcactccagcctggcgacagagtgatactccatctcaaaaaaaaaatttgtttttttttaaagactagaggcttgatgtctctaagaaaatattttaaatatattttttatattccataaatataaacctttgatctgtgattatgtttataagatttacagttgataaagtagattcatatatccaaattgttccaaagacacttttatttatttattttatttgtatattttttgagacagagtctcgctctgtcgcccaggctggagtgcagtggcgcgatctcggcttagtgcaatcttcacctcccaggttcaagtgattcttctgtctcaccctccctaatagctggaactacaggcatgtgctaccatgcccagctaatttttttatttttagtagagacgggattttgccatgttggttaggcttttcttgaactcctgacctcaggtgttccacctgcctcagcctcccaaagtgctgggattacaggcgtgagccaccgctcctggcctccaaagacacattaatattttctaataacgatttgatcatctgttttgagattaagttaattaaaattaaattaaaattcccagttcccaactgcaccagccacatttcaagtgctagtggctaccatattggacagtgtctatctagaatatatgtactaggagtggaattgatggccataaggtattcatatgttcagcttttttttttttttttttttgagatagaatctcactctgtcacccaggctggagtgcagtggcgcaatctcggctcactgcaacctccacctcctgggttcaagtgattctcattcctcagcctcctgagtagctgggactacaggtgtgtgctaccacacctggctaatttttgtatttttagtagagacagggtttccccatgttggccaggctggtctcaactcctggcctcaagtgatccacctgccttggcctcccaaattgctgggattacaggcgtgtgccactgcgcccagccatgttcagcctttctaggtcttgccagtttttcagaatggttgtgcttagttacattctcaccacctaagtatgaaagtagaaggcacatcacaatgtgttttcctcagctctcacgatcttgcaaggtaggttttatcttcatgttatatgaagaaactgaagttcagggaaattaagtgatttgccttggattttacttttactagtgcaaagtaggagaatttcaagctcttactttacaggtcacgatatcattgtttgatttatggctatttggaaatagaaataagtttaaaaagaaaaatgggccaggtgccatggctcacgcctgtagtcccaatattttaggaggccaaggagggaggaatgcttgaggccaggagttcaacagcagcctgggcaacataggaagatcctgtctgaaaaaaaaaaaaaaaagaaaaagaaaaaagaaaatgaaaggtttcctagagaaagtgttttcaactttctgctctttttgaaaagtcatttatatgttatatttagccgggcaccgtggctcatgcctgtaatcccagcactttgggagacccaggtgggcggatcacaaggtcaggagatcgagaccatcctagctaacacggtgaaaccccatctctactacaaaatgcaaaaaattagccaggcgtggtggggggttcctgtagtcccagctactcgggaggctgaggcaggagaattgcttgaacctgggagtcacaggttgcagtgagccaagattgcgccactgtactacagcctgggcgacagagcgagactctgtctcaaaaaaaaaaaaaaaaaaaaaaggtatatttagtaaattcctatgaaaaggatacttctgaaataattaggtagaagagaaaatacattgaatgtatttaaataaacttgtataggagaaatgagggtatgtacgctttcatgttttctttcaaagatttatctttcaaattacttgtttaagcacagtagtattgtaattttgaaatagtctttataccatggtaatgtttcaagttttattttcaaaaactattctatcaaaattcttgaccctttgttttatactctcttccaaatacactgatactcaggttgatattctagaattgacatttgccaaaataagggtttgtcttgttttaagtgtttttaaaatgaagccttattttaaaaaagattttttgaaaacatggtatgcagaagccaagacattatcattctaaataaacacttgtaatggtcttcgtttgtaataaatgtattcagtctcaaaagtcagtctgaagtctgacaccataatttttttccttcattttattgaatctaccaagtaataatgggttaaatgtttcattcagagttgtgttgtaattttaacttgtgtttgagagtatcggttttcattttcattttcatttaaatgtgaaaatcctcctgggtgtggctgtaatcccactgtaatcccagcattttgggaggcctatgccagaggatcaaggatcacttgaggccaggagtttgagaccagcctgcacaacatagggagggtccatcgctataaaacatttaaaaactagccaggcgttgtgcacactccagtcctagctactcaggaggctgaggcaggacaatcacttgagcccaggagtttgaggctgcagtgagctatgatccagagcaagaccctctatctttaaatatatatatatatatatatatatatataattaaatgtgaaaatcatcaacataatgttttttagtatcttaacatgtttacaaataataagtgttggtttttcacagttagtatgtacaatttttttctcatatcttggaactacttattttttgagagagtctcactctgtcgcccaggctggagtgcagtggcaccatcttggctcactgtaacctctgccttctgggttcaagcgattctcatccctcagcctcccaataatgtgtctttaatatacactttttaataattacctctctcttctgagatgcaatgtaagaattcctaccaggccaggcacagtggctcacgcctgtaatcccagcactttgggaggcggaggcgggcagatcacctgaggtcaggagttcgagaccagcctgaccaacatggggaaactccatctctactaaaaatgcaaaattagccgggcatggtggcgcatgcctgtaatcccagccactcaggaggctgaggcaggagaatcgcttgaacccaggaggcggaggttgcagtgagccgagattgcacaccattgcactccagcctgggcaaaaagcaaaactccatctcaaaaacaaaagaaaagaaaagaaatcctaccttattgggcctgttcatagttataaatatggacataatggtaatatttacttgattttacttccggaaaagcagtgattatagaattgctactgcttgccaagtaattagaaaaataaaaatktaaaaaaaaataaaaggattgctactgccaaccttacacaaattatagtatagtgttactaagccataccccttaatttgaattagcaatttaaatgaggactgagctggtttatttttatattatatattaaaataacactagtaaaaccaaagtatttatataaccattgaggacatgttttaattaaggaagcaaatttattgattaaaaaggagtcctaaggtatctgttggcccagttcagggatcggcaaactgcagcctgtggaccaaatccagcccagtgcctgtttttgtaaggtccatgagctaagaatggtttttacaaatgaacatttgtaatgactttgatgctaaggatcactaactttgagctccagttaagtaraatgttacccccaaaaggggagttccatttttttcgtcagtagacctgtattacaaaaaaatttgtagtcagttacttactacattttgaattttatcaataaggtatttgcggtagtgtgttttctcttcctataaatgtacctacataattgcctcaattttacctcttttacccacaaagcctaaaatatttacgatctgcctctttaaagaaacctttcatgtaatcatatgtatttaaaagcattgcattttaaaagaatcatctaaagaaaatttttaaaacaggatgtataacctttttattatacatatttatgcattatgaaaggattcaaaaggaaaacaatattgcttagaagttaggagcagggggccgggtgcggtggctcacacttgtaatcccagcactttgggaggctgaggtgggtggatcacgaggtcaggagattcagaccatcctggctaacatggtgaaaccccgtctccactaaaattacaaaaaattagccgggcgtggtggcgggcacctgtagtcccagctactcgccaggctgaggcaggagaatggcgtgaacccgggaggcggagcttgcagtgagccaagattgcaccactgcactccagcctgagcgacagagcgagacgccgtctcaaaaaataagaagaagaagaagttaggagcagggttctaaaaccaaactgcaaggttctaatcccagctgtaccattactatttttgttacctttggaaagttacttaattgcttggagtctcattgtcctcatctgtaaaatggggatactcattatttaagttcaaagagttgttttagaggtaatggagttaatacacataaagcattttagcatatgtttactatttataaagagttgttttagaggtattggagttaatacacataargcattttagcaaatgtttactattattataatgaagaaaagaaccagatagtaaatggttatctctgagtgatgagattgccaattatttttcttttttatattttgtgtatgtgtatttcctaactgtgaacrtggttgtagaataagacacttttataaaatcctttaactggaattttcaagtatttatattggcttttttttttaatattaaatgctttaccttaaaacataaacaataaatttgggtatttgatatctacaatttgcatatttctcacttgtgttaatcttttccttacagacatggcccatgaacatggacatgagcatggacatcataaaatggaacttccagattatagacaatggaagatagaagggacaccattagaaactatccagaagaagctggctgcaaaagggctaagggatccatggggccggtaagatgaattaagtaatttagatagaatgtatcctagagaatcaagtgtctatgttgcttttcaatgtattctccttagagaatcatgaaaaatggctttttactttaaagggttttttttggtttttgttttgtttttgagacggtgtcttgctgtgttgccaggctggagtgcagtggcgcgatctcagctcactgcagcctccgccacccgggttcaagtgattctcttgcctcagcctcccaagcagctgggattacaggcacgcgccaccaagcccagctactttttgtgtttttagtagagacggggtttcaccatgttggccaagatagtctcgatctcctgacctcgtgatccacctgcctcagcctcccgaagtgctgggattacaggcatgagccaccacgcctggctactttaaaagtttttggtttgttttgagacagggtctcactctgtcacccagactggagtgcagtggtgcgctcacagcaacctccatctcccaggcttaagcratcctcccactccagcctccctagtagctgagactacaggcatgggccaccatgcccagctaatttttatattgttagtagagacagggttttgccatgttgcccgggctagtctcaaattcctgaggtgaagtgatctgcccaccttggcctcccaaagtgttaaaattacaggcatgagccgctacacctagccacattaaaattttaaaatcgactttattgagctatcgtttatatatagtaaaattcacctgttttgagtgtaagtcctttatcagataaaagttttgtggtgcttgcttcagaaacatatatactaaaattgtaatacagagaagttagtatggccctgtgcaaggatttaaaacaattttttttaaggtttgcaaatgttttttctcacagtgtggcttatctttttattttctgaataatgtctttcagagagttttaaattttgatgaattcacaatttagcaatttttaaattttacaatgtatcctttttgcaccctaagattatcttctatgctttcttttagaagcttttatagttcttcttacattctgtgatctgttttgagttcatttttgtgtcatatgaagtaaggatgaagattagtatttttacatatgtgcatccagttgctccagcaccatttattaaaaaattattgtacctccgttgaattaccttaataatgttgtcaaaaatccattgagtgatttttgacactcaatgtgggtggtggctcgcacctataattccagcacattgggaagccaaggcaggcggatcgcttgagcccaggattttgaaaccagcctaggcagtacagggagactttgtctctacaaaaaaattttaagaattgccagatgtgatgacacacacatgtagtcccagctactcaggaggctgaggtgggcagatcacttgagcccaggatgtccaggcggcagtgagccaagatctggccactgcactccaacctgggcaacagagagagaccttgcctcaagaaaaaaaaatcaattgactgtatctatgggatctatgtctggactgtactctgttaccctcattaatatgtccacccttatgccaataccacagtgtctttaaattacatagcataagatctccaactttttttttttttttttttttttgagacagagtctcactctgtcacccaggctagggtgtggtggctcaatctggctcgctgccagctccacctcccgggttcacgccattctcctgcctcagcctcctaaatagctgggactacaggtgcctgccaccatgccctgctaattttttgtatttttagtagagacggggtttcaccgtgttagccaggatggtctggatctcccgacctcatgatccacccgcctcagcctcccaaagtgctgggattacaggcatgagccaccgtgcccagccaagatctccaacctgtaaaaaattgttttagctattctaggtcctttgcttttacatataaactttggaatgaacctgacaatttctattaaaatccctgcttggattttaattgggatcacattgaatctgtttcacatagattcacaatgggaatctatttcacatccacattgaatcagattcccatcaatttaggggccaggcatggtggctcacacctgtaattccagcactttgggaggccgaggcgggtggatcacttaaggtcaggtgttcgagaccagcctgggcaacatgggaaaccctgtctctactaaaaatacaaaaattagccaggtgtggtagtgggtacctgtaatcccagctactcaggaggctgagacaggagaatcacttgaacccgcgaggctgaggttgcaatgaaccaagatcgtgccactgcactccagcctgggcaacagagtaagcttccatcttaaagaaaacaaaaaatttagggataagtgatgtcttaacaatattaagtcttctagtcaatgggcaatttaggtcttgttcattttatcagcagtattttattgctttacgtacaggtcttgcacatattttattaaatttatactgaattaattatttattttattttattttatttttctgggagacagagtctcactgtgtcacccaggctggagtgcagtggcacaatcttggcttactgcaacctctgcctcctgggtttaagcaattctcctgcctcagcctcctgagtagctgggattacagacgtgcaccaccacgcccagctaattttttttttttttttttgaaatggagtctcgctctgtcacacaggctggagtgcagtggcacgatctccgctcactgcaagctccgcctcctgggttcacaccattctcctgcctcagcctcccgagtagctgggactacaggcgcccaccactatgcccggctaattttttgtattttttagtagagatggggtttcactgtgttagccagaatggtctcgatatcctgacctcatgatccacccacctcagcttcccaaagcgctgggattacaggcatgagccaccgcgccaggcctaatttttgtatttttttggtagagatggggtttcaccatgttggccaggctggtcttgaactcatgacctcaagtgatccgctcgcctcagccccccaaagtgctaggattacaggtttgagccatcaggcctggcgttgtttgtttgtttgtttgtttgtttgttttgggagatggagtctccgtcgcccaggatggagtgcaatgatgccgttttggctcattgcagcctctacctcgtgggctgaaatcatcctcccacctcagcctcccgagtagctgggactacaggtgcatgccgccatgcccagctaatttttgtattttttgttgagacgaggttttcctgtgttgcccaggctggtctcaaaatcctgagctcatgtgatttgaccacctcagcctctcagagtgctggaattacagatctgagctacagcacccagcttgaattattttaatttttgatgctattgtaaatagtattttaaaatctcaacttccagttgttcattgctaatacttgtaaacacagttgacttttatatgttgagtttatatcttgttaccttgctaaattcactttttttttttttttttttttttttgagacggagtctcactctgtcgcccaggccggactgcggactgcagtggcgcaatctcggctcactgcaagctccgcttcccgggttcacgccattctcctgcctcagcctcccgagtagctgggactacaggcgcccgccaccgcgcccggctaattttttgtatttttagtagagacggggtttcaccttgttagccaggatggtctcgatctcctgacctcatgatccacccgcctcggcctcccaaagtgctgggattacaggcgtgagccaccgcgcccggccgctaaattcactttttagttcaagtagattttttttacagatttcttagaatgttcttcataaacaatcattctgtctacaaatacattgttacttcttccttttcaatctgtaaactttttatttctttttcttgcatttttgtactggctaacaccactactataatgttgaatgaaagtggtggacgtccttgccttattcccaactgggagaaaacatttggtgggtcaccacttagtatgatgtttcttacagtgatctcctaggtgccttttatcaagatgaggaatttctctctatttctagattactaagtgtttcattgtttattatttcttttttttttttttttttttgagacagagttttgctcttgttgcccaggctggagtgcaatggcgagatcttggctcaccgcaacctctgcctaccaggttcaagcgattctcctgcctctgcctcccgaatagctgggattacaggcatgtgccaccacacccggctaattttgtttttttagtagagactaaaacgttggccaggctggtctcaagctcccgacctcaggtgatccacacgcctcgacctcccaaagtgctgggattacaggcctgagccaccgtgcccatcctgttattaccattaatggatattggattttgttaaatgctttttctgcatctattgagatgttcatagtttttcctttttattctgttaatatggcgagttacttctattaattttcaaatataaacaaatcttgcattcctggagtgaaccctacttcattatgatgtattaccatttttatatgctgtcggattcagttttctaaaattttgttaagaatatttgcaccaggtgtggtggctaatgcctgtaatcccagcactttgggaagccaaggcaggcggatcacttaaggctggaagtttgagaccagcctggccaacatggcaaaaccctgtctctactaaaattacaaaaattggccgggcgcggtggctcatgcctgtaatcccagcactttgggaggccgaggtgggtgaatcacaaggtcagaagttcgagaccagtgtggccaacatagtgaaaccccgtctctactaaaaatacaaaaaattagctggatgtggtggtgtgcgcctataatcccagctactggggaggctgaggcaggagaatcccgtgaacccaggaagtgaaggtttcagttagccaagatcgtaccatcgcactccagcccaggcgacagtgcgagactccatctcaaaaaaaaaaaaaatacaaaaattagtcagacatggtggcgggcacctataatcccagctactcaggaggctgaggcagagaattgcttgaacctgggaggcagaggttgcagtaagctgagatcacaccactgcactccagcctgggcaacagattgagactctgtcataaataaataaacaaacaaacaaacaaaaattagcgggcatggtggtgtgtgcctgtaatcccagctacttgggaggctgaggtggaagaatcacttgaatccagaaggtggaggttgcagtgagctgagattgtgccactgctctctagcctcagtgacagagcaagactccatccgcccccgccaaaaaaagaatatttgcatctatgttcatgagggatagtattctgtagctgcttttcttctaacatctttgtctggttttggtatcccaattagatttaattagctctcgtatttcctaagtcatatttctagagttaaatagtttttgtttttcataacatgattttttcattggcttgtccttatcagaccagagcagggtatcaatcttccaaaattcaggctgctatggtagggagaagcagagatccttttgaatagtaacagtaatgtcaagtgttacatactccatactcctctgccaaaatatatcatgcatgagcctgtttagtctttatgatattataaagtagataataatcatcattgaatagaacaggaagcagaccatgacaggctaagcatcttgcccagcctacaagattgtgaatctaatataagtggcataccaaagattaataccaagtctctaacttcatctttccgtgatgttgtaatgactagtgtgggcagagcccatctgacctgtgacagataagctgacgtgagtcttgcatttgagggttctgtaaaatcctgaggcatatgactattaaatgtgaaaccatcaagtgtttattcttctattttatatgtgaaacttgggcatatacttaattatcctatgccacagaaagattcctattgcgattcacttaaatgatcttctgtagggtagcatttaagtcaattagaaagatgaaaattaaatgtcttcaacgtatatacacacacgttgtgtatgattataattttttctttttttttttctagcaatgaagcttggagatacatgggtggctttgcaaagagtgtttccttttctgatgtattctttaaaggattcaaatggggatttgctgcatttgtggtagctgtaggagctgaatattacctggagtccctgaataaagataagaagcatcactgaagataatacctggaagcatcatagtggtttcttaactctccaaaataagatttcttctctgtagcctacttgtctggtttatcccttacagaatattagtaagatttaatcaattaaaatatatatatatgccaatctgcttttgtcattcttaaaaaaaaaaaagtgtctcaagccatatcagatttggtttagaatacatagggggttggagaacagcagtagtgcgttctgcatatagcaggcaggcatcatatatttggctgagcaaatgggcatgttctaagaagtttttttttaatctttttctttttttttttttaactagtcctgacctagctggcactaacaagtatttaaatgggagttggccttgctgttttttttttgagatggagtctcgctctgtcacccaggctggagtacagtggcgtgatctcggctcactgcaagctctgcctcccgggttcacaccattcttctgcctcagcctctcaagtagctgggactacaggcgcccgccaccatgcccagctaattttgtttttgtattttcagtagagacagggtttcaccgtgttagtcaggatggtctcgatctcctgaccttgtgatccacccgcctcagcctcccaaagtgttgggattacaggcgtgagccaccgcgcctggctggccttgctgcttttatcatcctcttcagatggtttagaggaacccagattctactgcccttttctggctgacacatccatgtatcatgttcatttttcttaattgtggtattttgtggtattttctactcttgcttagtcctcttagtccttagtcctcattgttcttatgtcatgaaaaaccttacatttttttcttcttttttttgttttttgagatagggttttgctctgtcacccagactggagtgcagtgggagagtgatcttggctcactgcaacctcagcctccctgggctcaagggatccttccaccataccaggctatctttttgtatttttagtagaggtggggtttcgccttgttgcccaagctggtctcaaactcctgggctcaaatgatctacttgcctcagcctcccaaagtgctgggattacaggcatgacccaccgcgcctgacctttttctgtatttctaacaataaactagacattctccatgcctgtaatcccaacactttgggaggctgaggtgggcagatcacttgagctcaggagttgcagaccagcctggccaacatggtgaaacgccaactctactaaaaaaacaaaaattagccagacgtggtggcgggcacctgtaatcccaagtacttgggaggctgaggcaggagaatcacttgatcccagtaggcagaggttccagtgagccaagatcacgctactgcactccagcctgggtgacagagcacgactctgtctccgaaaaaacaaacaaaaaaaatagatgtaacacttattgaggaggggtgataattttgtttaaataatgaaacagagaaaatcccaatgtgaatttttttcttttctttttttttttttttggtttgagaatgagtctttctcccagcctagaggggtgggcagtggcacaatctcagctcactgcaacctctaactcctgggttcaagcgattctcctgcctcagcctgccaggtagctgggatttcaggcacccaccaccacgcccagcaaatttttgtatttttagtagaaacaggttttgtcatgttggccaggctagtcttgaactcctgatctcatgtgatccacctgccttggcctcccaaagtgctgggattacaggtgtgagccaccgcacccaaggtgactttttcttcataaatttctgtttttaaatgtaaagcaatgctaaagtgagatgaatttctaataaactgatagtggtaaatagaatatggtaatatgaaacataaaaaagactccatgcaaaaaaaggaaagcgtttattttttaatttagataaaaatttaatacatactttcttctctgtgttttgtttgtttgttgagatagggtctcactctgttgcccaggatggaatgcagtagcccgatcgcagctcaccgcaacctccgcctcccaggctcaagcaatcttcccacctcagcctctcaagtagctgggactacaggcgagtgccaccacagccagctaattttttgtgtttgtggtaaaaactggatttcaccatgttgcccaggctgtctcaaactcctgagctcaagtgatccacctgtctcagcctctcaaagtgctgggattacaggtatgagccaccacgccccacctgtcttgtttttgtttttggaatttacagtctctatcttccagcaggataccagaagcaaaaggaaagagtttaaaaggaaaaagatcaatgggacaaatagaaatagcaagatgatagatttaacttaactatattgataattatattaaatgtaaattgcctaaagtttaaactctgaaacatttcttttttttttttttttttttttgagacggagtcttgctctgtcgcccaggctggagtgcagtggttagatctcagctcactgcaacctccacctcccgagttcaagcaattcttctgtttcagcctcctgagtagctgtgattacaggcactcgccacctgcccagctaatttttatatttttagtagagacggggtttcaccctgttggccaggctggtctcaaactcctgacctcagatgatccacccacctcggcctcccaaagtgctggattacaggcgtgagccaccgcacccagcccactctaaaacatttcaattaaaagagatggctgggcacagtggctcaggcctgtaatcccagcactttgggaggcccaggtgggcggattacttgagctcaggaattcaaaaccagaccggacaacatggcaaaaacccgtctctacaaagaatacaaaaattatacgagtgtggtggtgcacacctgtggtcccagctacttgagaggctgaggtgggaggatggcatgagcccaggaggcagaggttgcagtgatccaagataatgccactgcactacagcctgggagatagcctaaccctgtctcataaatgaattaatgaatgacagaaataatcaacttcggcaaaaaacaagacccatctataaactgcccatatgaaaaccccagtgaaaagaatgttgaaatatattaatatcaaagtagattttagaatgaagaccattacttgtgagagagacatttcataataatgaaggggtcagttcattaagaggatctaagaaatcttaagtgtttatgcacagagcttcaaaatatgtaaagcaaaaacaaagaaaacttagagaccaaacaaaattatgatatgtttggagattgcaacacttctttctcagttactgatagaaaattcaaaatagggaaggtgtggtggcccacatctataatcccagcactttgggaggccgaggtaggaggattacttaagatcaggaattcaagaccagcccaggcaacaggacaagactctgtctctaaaaacaaaaaaagttaaaaaaaattagccaggcgtgatggcgtgcacctgtagtcccagctactcaggaagctgaggcaggaggattgcttgggcccaggaggtcgaggctagagtgacctgtgatcatgccactgcactccatccaacctgggcaacagagtgagggcctgtctcaaaaacaataatttaaaaaaatttaagaattttgaatcactcactttctaacaaaacccagggaatgtacaagactatctcttggggtaaaaggagcaagtatttaaacctctgtttttatttccatgtttaatgaaaatgaattggtggctcggcacagtggctcacgcctgtaatcccagcactttgggaggctgaggcaggcagatcacgaggtcaggagatcaagaccatcctggccaacatgatgaaaccccatctctactaaaaataaaaattaaaaaaaaattagctgggcgtggtggttcgtgcctgtagtcccagatactcgggaggctgagccaggagaatcgcttgaacccaggaggtggaggttgcagtaagccgagattgcaccactgtattccagcctggtgataaagcgagcctccgtctcaaaaaaaaaaaaaaaaaaagaaaatgaattaaatgttgttaatgtttaatagattcacagtgaagtttgctctcacatggcggataccaaagcagtcacacagaattagtggtaagttatcctgaagtgaaagtaagagttctaccctccaaaggagagaacaaaaggagttttcagcagattgctatagactatactttgtatgtcctcagttttggaatttattatctactaattactgttttcttgtttttcattttttgtggtttcttggttttttttttttttttttttttagatggagtcttgctctgtcacccaggctggagggcagtggcgcgatctcggctcactgcaacctctgcctcccgggttcaagagatcctcctgcctcagcctcctgagtagctgggattacaggcacaagccaccatgcccagctaattttttgtatttctaccatgttgtgtttcaccatgttggccaggctggtctccaactcctggcctcacatgtgtttcaccatgttggccaggctggtctcgaactcctggcctcaaatgttccacccacctcagcttcccaaagtgctgggattacaggcatgagacactgcaccccacttttttgtgggtttttttgagatgggatctcactgtgttacccaggctgggtgcagtggtgcaagcacagctcactgcagcctggacctcctgggatcaagtgatcctcttgcagcctcataagtagctgggactgcaggcacataccaccacacccggctaatttttttatttttgtagagacagggagctcaccatgttgcccaagttggtctcaaactcctgggctcaaggaatcctcccaccttgacctcccacagtactgagattagaggtgtgaacctctgcacccagccttgtctactagttttaactaaaccttcatgaagtagataagtggcttaaaaagatttttttacaaagaaactgctgattgaagctaatactaataacccaacaacaagcaaacaagaataaaatagaagagctatgaactccgtcagcaacattatcagtaaataggatgatctaatcacgagacgagtcaaccaaaaaaaaaagaagattgaaataaggacctgaagcccaggcacagtggctcatgcctgtaatcctagcactttgggaggccgaggtgggcggattgcctcagctcaggagttcgagaccagcctgggcaacatggtgaaaccccgtttctactaaaatgcaaaacaaatcagccaggcgtggtggcgtgcacctgtagtcccagctactcgggaggctgaggcaggagaattgcttgaatctgggaggcggaggttgcagtgagccgagatcgcaccactgcactccaacctggatgacagagcgagactccgtctctaaaaaataaaataaaaataaaaaaaaggacctggacccactatcagaacaatgaaacttgtcctaacagtgtactgatctgttaactaatgatagcgtgtagtcatcatgattagtaagacatttaaaaatgtttaatctttgtcttacctttcgtttccatatttgtgtacttttgtgtattttcttttttgttgttgttgttttttgagtcagagtcttgctctgttgcccaggctggagtgcaatggcgtgatcttggctcactgcaacctctgcctctcgtgttcaagcaattctcctgcctcagcctcccaagtagctgggattacaggcatgtaccaccatgtctggctaattttttgtatttttttttagtagagatgggtggggtcttgctatgttgcccaggctggtctcaaactcctgacctcaagcaatcctcctgcctcggcctcccaaatgctgggattacgggcatgagccaccgtgcccagcctatttgtgtattttcaatgta

SEQ ID NO: 96523 - DNA, 68775 bp, Homo sapiens
agacaggaccaggcagctccccacatccttccacatccgagctccaggggtctctggcttgtcctttcacagggcggctggtgtcccttaggtgggtgctggtagttcctgggagagttgacgggatggagcaggccaggggggctgagaagttggcctggcgagagaaggtgggtgggactgggagagcctgggcagggaggggcctttctgggagggagtgtcatggggctggccgagatccaggacccaggagactggccaagctgccacaggaggcctgagaggctgagcatgggggggccaacactgacagactttaacaagtttctggctcccccaggaaaaaaacagaccacatctgatccttggccctgagtccagagtgggaggcaccgtgacaacaatgcgcagagcagggaatgcagggagccatggatagtgctggggtgagctggagtcctggcaggggcccagctagggcagtactcattctgcagagcctgggagaaggggctgcctccttgggaggggtttgtgtgggagtctcagcgggaattctattggaccaggggaaccagccttgctcagtgacttctctgggtgtcctcctctaaagtgagggtcaaattcccacctctctcgcctcctggctatgaccacagcagaccaggcagggcatggggctaggcggggtcaggggccatcctcaggctgacacctggcctgtgggtagggtgggatctgaaactatagggtcttcagggggccaagtgtggggtaaggggtggcactttccgcagggctcgccctctgcagatggttcagcttctcatcggctgtccctttgcaggtgcctcaggaaccctgaagctgggctgagccatgatgctgctgccagaacccctgcagagggcctggtttcaggagactcagagtcctctgtgaaaaagcccttggagagcgccccagcagggctgcacttggctcctgtgaggaaggggctcaggggtctgggcccctccgcctgggccgggctgggagccaggcgggcggctgggctgcagcaatggaccgtgagctggcccagcccgcgtccgtgctgagcctgcctgtcgtctgtggccatgcccatcatgggctcctcggtgtacatcacggtggagctggccattgctgtgctggccatcctgggcaatgtgctggtgtgctgggccgtgtggctcaacagcaacctgcagaacgtcaccaactactttgtggtgtcactggcggcggccgacatcgcagtgggtgtgctcgccatcccctttgccatcaccatcagcaccgggttctgcgctgcctgccacggctgcctcttcattgcctgcttcgtcctggtcctcacgcagagctccatcttcagtctcctggccatcgccattgaccgctacattgccatccgcatcccgctccggtgagcagggccggggttacatctgtgcaaaggctgttggtgcccaggctttggtctgtgcccggagccagggtgagcctgggatcagggcctggtctgcagtgtcagcatggtgagctggcgacggggccccaggctcagcaggggctccccagggccagcacgtggccagcagtcatgccgaactgactgacccctatgggcgcagggcagcctggccctcccaggcggcctgggttcccctaggctgcctgaggccaactgtgctctgctttttggcagatgagtgtggccagggtctggcattgggcttagcagggagctgtggtcccagtgacccacgtgctgccagcgggtgtgtctgggccattcctcacacacaagcaaaacttcccggatgatgctggggtggagtggggagccaggggaaaccataggacctcagagttaggagccgcccgccacctgccttcccccagatcctctgggccagccttgcagtgtgcacattaggaaaatgacccagagaggggaagtgacttggttgaatgccacagtgagtcacttggacctatatgcaaattctgttgctcctcaagtcaccaaggactcatcgtcttagaggcagccagtgtgctcaggggctggctgttggaggggatttttatggtgaatcttttgtgaagtgacttcagccaagtaattgtgcaaatgaagattttcccagaggctgaattactcggcatggattccacctacccaggccatagatgaggctagaaagtgcatccctcccttggggacgtcagaggccttctgccccacctcctggcccctctgccacagagctgggttccacagcctgggtggttgtgggccctgaggccatgcatgaggcttgaggtggtgcctcttgagagtcagggagcagggtgcaccatctctgcggtgaattatctgaaactggtgggtgcctatctaaagaggaagccacagcaggttgagggtgccccagcaggaaggaggacccagctagatgagcaaatggaaatttagagcgtcaaagccaaggggcccttagaggtcatttcctctcatcttcgggatggaaaatgagcctcagagaagacagccagctgtttccgggccacacaacgagttggtagtggagctggggcgagtcctggaaagaaatgtggcctgatccccactgtgacttcagtcactggggagcggtcatgagcagcctgtctcgcagagcctgcaccaggtggctgtccctgtcacctgggctctaagtgggagcaggagctgcactgggctgctccagggaaggggaggaatctggacctcacactgccctgtcagatgctctctatcccaggagagtctagaaccctcggcaaaggagaaggggaccctggccagccctgagaggggtggaattagggattgtcggactccaagtgcagtctctggtgagcctccatccattgctctgcgacgggcagagcagagtttaggttcgtccagtggcagctcagaacacggaggcccaggaggggccctgtctgcaggtgcccaggtgggccagagaacaaagcactggaggggacttcagggaaccaagctgagtctgcacactgatgggatgctctatggggaagcagaggccaagctctcacttttttctctgattcaaagggtatgatcagggctgccgttctcaatttaaaggagctcgactttttttctcttttgtctctccctttccttctctgttttctgagagttgagagaatgactccctatgtagtaggacaggatgtgctgtgtggctatggaaagttagctgcctctctctgggcccatttcctcatccataaaataggacaagtctctctgcccctctgagctcacaaaggtgttctgaaggtccagtgagtggatggggtgacagggaccctgaggagggttggaggcgtggggagggtggggattcagatctttgggttcagagccatggacctgccccctatcctctacccatctcatcccaacttccttggagctggaccttagttccacccagaccttgagccatttgactctgctccatgaggctctgcaaggcttaggctggtctcttctgcagggggccctggagaggatgacgacgatgatgttcatcctcccttgagggcagagagctttgcagttgccaaaggatgtcagctcagcatctcctgtcatcctcttggcctgcattgtggccaggcggatgttctgaccctcctgttactcacaaactcatggggaggccagagcagggaaggacatacgagtgtctcctgatgtggatggactccagggcccttcaggctgttcctggcccgcaggtcccttcgctttcctgttcctcagggcccctgggcctctgggcatgtggaggtgtccatgtgggctcccgagagcaagcggggtatgaaaggaacttggtgacactcctggccggcgctggagtcacagcctgcctcaggatcctccctcctcctttctcagctgggaatccagcctcctctacgtgccgtttcctgctccactcagaaaggtccattcggctagccctgggtctagcctcaggcctgccccactctccattaactttttttttaaaaaaaagaactcagttttggaaaaatctgttattttccaagttcagggaacctgttgggctagcacagggcctagtcgaggaactctgtgagaaagacttcaggccagaggcagagatgtagctctctgtgttcccagaggatagggaattcagggtgagagacacaggcttctttttccagttcccaggggatttttgcctcactgtcccctccctggctctcacagcagcccttggtggatgttctcgctggtttgaggaacaggccaaggtgcaggtggcagctggtggtgaggcccgaagtcctaacacttctaagagggcaggattgggagagagggctccctggaggaggtgtcacccagtgggtcttgcaggacgggcaggcagggtctcactggcatgagtgtgggggcaggtgtgtcaggaggggggcaaagcctgggacaagaccctgaggaaggaatgagcatgtgagcactgggtagggaagggtggcctggctgcctagtgacagagagagatgaacagagtgggcaggaaaggtggaggccaagtcaggcctgttcgtaccaggggaaggaatggaggtttccctgtgggtccatggctcttcaattcttggatcaatgactcctttggacaacttaggaaggctccacctactcctcaggttgggacatgtgcacataaagccccagctggaatcatggggcatattcttggaccatagggtgagcccccagtgtgggtaatggagatccccagaaaggggcagcctgcaagccgggggacacagagctgcagagggcacctccacaaagggtgggcagcagctctgggacccacattctctgacatgcctgggcaccccagagtggtggtgtgtcacgctagacagccttggcatcccttccagctggatggtcaatgtttggggtctaagacggcaagatgtgagtgtgttggtcacagatgcagcccaggatatgctgctgggcctggctgaggctcagctgtgattccatttgggccctgatgctgtccccaccccgtgggcaccagggtccagggctctcagcctatggagatttcttttgaataaacttagtctatttgcaatttaagaaaaaaaaaagtcatgttttgcccactctaaaacattaaaaaggaacaaaagagtatagtatagtagaaagttgtcctccataccccctgtcccccaccctcagttccctgcctgcaaggccatgttaagaatccttccagagatattctttgcatatataagcaagtgctattaatgtatgttttgtttctgtccccacacgggactttctttgcagagtacggtggaagactccccttgtgggttcccgtttctgtacaagtcaacaattggacagaccagggatttccatactgtgttcccagaagccttcgggttggctctggtgtccccaccaattcactgattcaataaacatttaataagccccttcccttccccagcagcttcacctctgtgactgcctgggaatgtgggcgacaaggtttgctgctgagaacagtttgaaaaccagcaaagcaggtggcccagggcccaggcagctctgcaacacccctgtggctgcttggctctgctctgttgcctcaaatgacaggaaactcactattgcctgaggcaggccatctctcctgtgaacagctcagctgaaaaactcttaacctaccctgagttacaatctgcctccctataatttccacccactgattctccattctgcccttagagggcagagtgctgacaggtccacgacttggtcccattttacaaatgaagaaactgaggctcagagagacaaagttttaaaacattcctgttaacagggccagaacccaggaagggatatgcttttctcaggaataatgtcaaaattaatatagcttcccagtcaatgaggactatataaattactatttgcaaagcactaagaacagtgtccggcacagagtcagtgctatgtaatgtagatgtgagaatgagagagcctgagattttatgtttgcgagtcccacaggaggcagggcaatgccaactccctgttgcttggaagcaatgggcaagtctatgaccctcctgttgaggccctgttacaggtaaccaagcccccacggaatggagctgaggagctcctgagaatgggcttgtccggttactgtttggattcagaactgacctaagagattcagaacagacagactcgccttggcctgagttgcctctgggctcttggaatgtccacagcaagtccattcctctccttgggcctcaatttacccacctgtaaaacaagaggattggaccacataagagatcggaagccaccagggtttctctttttctcttttatttgaattagttgacaaaacttaaatcttgggagattttacccagaaaatcatctccccagccccacctgagatctggtaatagcaggcgtacgttttgcatggcgctgaagaccaggtaaacgccccaccagctgcctcctgtgtgtgctacctataggcgcctgtttgctacccgtgaatgagatggtttctgtggatgttcccagctccgcagttaagtagagcacatccttccccttgcaccttttttttttttttttttttttttttttttttttggagactgagtcttgctctgtctcccaggctggagtgcagtggcgcgatcttggctcactgcaagctctgcctcctgggttcacrccattctcctgcctgtctcccaagtagctgggattacaggcccccgccaccacggccggctagttttttttatttttagtagagacaaggtttctccatctcctgacctcgtgatccgcctgcctcggcctcccaaagtgctgggattacaggtgtgagccactgcgcccggcctccttgcaccttytgagtgtccctgtctcggagctggcaatgcagagatggatgtaggaaagccctgcccccgaggggcccagatgtggtggggatctgctgcacttcggtaggaaacttctttgagatctctatcctggacttgaaggatgggtagggtttctgccaggtagaggggagtgtagtctggtcttgccagaatcaaaactgttaaacagaagtcatccctcagtgatcatcaaggttgccttcctaaattagggagactttttttttttattgtccattctttcatgaaatctaggccacctttcctacagggctgaggtctgcttactggctggcagatccagccatttcccgagtatgagactgggagtcggtaggcttggatttctgtctggctctcactcaggaagactgagtgatttcgggcagattactgtccccctggacctcagtatttccttgcaaatgttaagatggccatgtaaatgttaacaagtaattctctcatttctctccagagggctgtgggtgggtttggaggggagaaatggcatctcctttggcctgggacctcctcccctcttttaccctccatgctgcctctcctcaagggcttctggagtccccaagtcaaatggcaaatggggaagagaagacagggtatggagtacaagaggcctagatccyctataggtctgatctggctggtgctgcccctagccagtaaagccaccctccagaccccttcaagcctgttgtagccttaaccaagatcaaccaacatggaggtgactgatcttggttaaggctgcgaccaacatggaggtaattgatcttggttaaggctacgacacgtttccctttagagaaaaatcatgttttccycctcaaaaaatcatgcgttaatttcctccaaccaaactaagtcccaggactactccgaaaactactcaatgaccatctgggcatttgtacatgggtttccatttcttggatgcctgctctcctgttacctcccagaagcctgtgaaaaaggcaaggcatattacttccacttaacggaagaggatgctggggcgaggtggcaggaaatgactggtccaagaccttacagtcaggaaatgtggaaacgggtgctgctctgggrttctgaactcttggccctgcttaacyctggcttctcagatctctgatgctggtctcttctccccaggtacaatggcttggtgaccggcacgagggctaagggcatcattgccatctgctgggtgctgtcgtttgccatcggcctgactcccatgctaggttggaacaactgcggtcagccaaaggagggcaagaaccactcccagggctgcggggagggccaagtggcctgtctctttgaggatgtggtccccatgaactacatggtgtacttcaacttctttgcctgtgtgctggtgcccctgctgctcatgctgggtgtctatttgcggatcttcctggcggcgcgacgacagctgaagcagatggagagccagcctctgccgggggagcgggcacggtccacactgcagaaggaggtccatgctgccaagtcactggccatcattgtggggctctttgccctctgctggctgcccctacacatcatcaactgcttcactttcttctgccccgactgcagccacgcccctctctggctcatgtacctggccatcgtcctctcccacaccaattcggttgtgaatcccttcatctacgcctaccgtatccgcgagttccgccagaccttccrcaagatcattcgcagccacgtcctgaggcagcaagaacctttcaaggcagctggcaccagtgcccgggtcttggcagctcatggcagtgacggagagcaggtcagcctccgtctcaacggccacccgccaggagtgtgggccaayggcagtgctccccaccctgagcggaggcccaatggctaygccctggggctggtgagtggagggagtgcccaagagtcccaggggaacacgggcctcccagacgtggagctccttagccatgagctcaagggagtgtgcccagagccccctggcctagatgamcccctggcccaggatggagcaggagtgtcctgatgattcatggagtttgccccttcctaagggaaggagatctttatctttctggttggcttgaccagtcacgttgggagaagagagagagtgccaggagaccctgagggcagccggttcctactttggactgagagaagggagccccaggctggagcagcatgaggcmcagcaagaagggcttgggttctgaggaagcagatgtttcatgctgtgaggccttgcaccaggtgggggccacagcaccagcagcatctttgytgggcagggcccagccctccactgcagaagcatctgkaagcaccaccttgtctccacagagcagcttgggcacagcagactggcctggccctgagactggggagtggctccaacagcctcctgccacccacacaccactctccctagactctcctagggttcaggagctgctgggcccagaggtgacatttgactttttttccaggaaaaatgtaagtgtgaggaaaccctttttattttattacctttcactctctggctgctgggtctgccgtcggtcctgctgctaacctggcaccagagcctctgcccggggagcctcaggcagtcctctcctgctgtcacagctgccatccacttctcagtcccagggccatctcttggagtgacaaagctgggatcaaggacagggagttgtaacagagcagtgccagagcatgggcccaggtcccaggggagaggttggggctggcaggccactggcatgtgctgagtagcgcagagctacccagtgagaggccttgtctaactgcctttccttctaaagggaatgtttttttctgagataaaataaaaacgagccacatcgtgttttaagcttgtccaaatgagaatggcgtctgagttcgtttcctactccatagctaggcctgtgcacacatacaggcatgtgttgtgtatgagagagtgtgtgcgtatgtgcagacaccctgcctgccccgggggccctccccagggtcctgtcctcgaggggacaggctgcctggctgcaccacaatccaacctgcatttctatgagggcccacaggggctatgggagaaggggctttccccagcaactccccccctccttatcttcctacatctttaagggaagatctctttgtatgttaccttctcagaactgtgacccgccacctgccctgctgcaccctttagcagaggtcacagaggtatccgcaaacagatctgggcaggggctacacggccttcccctagaatccccctccttctgttcttaacaaaagaaacccagaaggaaggggtgtttttgctctgaccccggccttaggggcctcctgcctgaggaggtggtgccatctttctgtgatggcgaagtttgaggcctggaaggcagttagcaacctgcccctgcctgaggttggtggagagctgtgattgtcccggtttggtctcactcactctgggactcccggaaggagtgtaagaatgtcaagggtaatcctcacacagccctgtgagccctgttttacagatgattaacaagcccagagaggttacatgattgctccaggtcacacagctagtaagtggcagaagtgaacttaaaactcaggtctgtctgactgtaaaatccatgttcattgtttccattaacttaatgatgaactatttgaaccgaaccaaaaagtacaaaataacatcatttcctcagcactctgcttaagaactgaaacattacaatgttgcatctgacccctgcccatcattaccctgcatcctaggcctggaaacaaccactttcctgaatttcatttctttccattgcacttcttcttcttctttttttttttttctttgagacggttttcttttctcgctctgttgcccaggctggagtgcagagcagtggcacsatcttggctcactrcaacctccgcctcccaggttcaagtgaatctcctgcctcatcctcccgagtagctgggactacaggcacttgccaccatgcctggctaattttttctgtgtttttagtagagatggggttccaccatgttagccaggctggtctcaaactcctgacttcatgatccgcctgtctcggcctcccaaagtgctgggattacaggcgtgagccaccgcgcccagccctttccattgcacttctttacacttttagtatatggatgcctgcaaaactatcccaaaaccaacaaaggattgttttagctatctcactgttatatcctcagaggtcctctagactggctgcacaggagaaatacctaggaagcttcaatcagcaccaaagcctcagtcccttgccccagagacactggattaattggctagggtagatcaagtaattccccagggggttcttatggacagccaggacaacctataaggagccactgatacaaatgcactgagtccaccccctgtccacaccagcttcctccctcctaggatctgcactggctgtgggctgagggtggaacagtggctggggtatgcctgagaagaccaagagcacagaagctgccagtcctcatgagcaattggtgggaagaggccagaaagagaactacaaaggtagggaagaatgaaatcccgtctctccagccttttctgagaccttgggaaccagactttgagkactgagctagatgggtgtaggctttggggctgggagaacagggccaggggctcagcaaaggcttctaggtacaaatgggccctagtcctcccagggccagctcctgcctagtggtagagcacaggcctcctcatrtcctcaggagcttagggtcccatgtccacacccaccccatgttggttcccaccgtcagcaggcctgagtgtaagcacatgggcagagacctgaacatatgcaggcatcattcctctgacgataagagaatacatttgtgcacatataaacatgctagggggcagagcccacctcaacaggaataagtgcccacagcagcagcatgagggagatgtgaagactggtgaagggcatgagcaacatcccagcgccatggggtgcaggctatgccctggtctacactgctctgggccaggctgccaggagctgtggcctgggctgctccaagccctgcagctctgtggaagggcccctctccaccctctccctgcccttcccaaagggctacgggtggataacatgcttcattcaggcctgtcccacgcataagggtcccatcacagatccatgttcttgatagccccagcccccctctacagcrggtgttgccaggccacagggaggtctgagagcaggggtctggctcaggctcagccttggctcatcactggccctcacaagagacaagccctccggagggctccctttcaccctcctcctctaaccacccctcctgaaaccctaccttaatctggttggattaaggccctatcctctgggaggcatcacccgggggctcagggagctgagtagggccacagttcagtgcgctgaccaggggacagcaaaccacagcagggcaggaagaggggccacctgggtgctgtgaggaaatgagctgctgatgctccctgcatcttctgggacttggtatcccagaaatgggaaactggtcttttcaactgtggtggggaaacaagaacccgggggaatccaactgctcagcatgtgggaagggctctgcgcagcccgcccctgctcctggggccgcagggaaaagtgggtgaggccagcactctgtgcctgggatgccactgctgtcctgcgatgttgtgctgctcccccgcatggctgctgctacgggctcttgccacagctggacaccctcccctgagctccagtgccggacaactgttttctgagcatgctaagcaatgaccctctgctgacgggagaagttactttagaggggacagaacttaggaagacccaggtgtgctgtgaggcaagtggctccctccctgacccttactgctcagtgtgcaaggttaccaccttctcctcctccccacacccatcccccctctctcccaaggtgcccctcattgctgctgtcactcatcattagcagtcactgtcattgttaggacagcccctgtcaggctgcagagccaagggagggggcaggagaatgtcagatgactcacacaacctcaaaagagggggatggacacacaacacagaacctagctacaagaagcacctcgtgagactctggttcaaccctttctttttccagagaagaaagagcagcttagcagagtttcctgacaagtccctctgcttcccactagtcaggcttggagggaggctggcctaggagaaaggccaggccaggaagtcagcatgaggctgggcaggtgacaggtgtagccaacccagggtcctctgagggaggtggggaaggctttgcatggacccatccacacttctttgccttgtccaaggaagtgtttccgtttgggggaggagaggagtgactctttgtcaaatcagccatctggactgtcacctaacgaccagctaagccctcggatcaagctggttaggacctgagccctgtctcctggctctctgtccctctcccaaccacttaatgagcccttgctgatgcacactgagccgggggcaggacgcagggagccaacaactgactgaggggaataagcccgacggggagaataagcccgacggagggaataagcctgtgagggacacacaggctctcagaggaggtgaaaaccacacgccagcgggcagtcaggatgggcttcacagagggggccacaccaagctggcctgtcagaggccggcggtcagctccagggccccatctcttcaatgtgttagtcaggaaataagaacaaggaggggctgagtaaatctgcgcctgattttcatctgcctacactgaattatgccatccatttggaggcaattttcaagttaaaatgttgtcagaaggctgtcacagttttkatctttcttttctgttctttctcaacccacccacattttctagttaggttggaaaggggagtgagggggatagagcctggtttatattcagagatttctggaattgttaaagatagatgagacttttagaaattatcaagttttctcttaggaaaattgagtcccagtccaatatcacaattaattgttctttcagttccagaacttttaggggaactggagggacctggccaggcatcctgcaggctatctcttggggtttcagcttgattctctctgctgcctggttcagagatgcccaataatcccaccacttgctccttccagccaccaccctgttccactgactgctgaacggggagtcaaagcaccagtttcaatccctggtcttgccattgacttctttgacaggacaagtcactgagctgccacacctacttttacataaaatgagttaataaaygtgggccgggcgcggtggctcacgcctgtaatcccagcactttgggaggccaaggtgggtggatcacctgaggtcaggagttcaagaccagcctggccaacgtggtgaaaccctgtctctactaaaaaagacaaataaaaattagctgggcatggtggcaagtgcctgtaatcccagctacttgggaggatgaggaaggagaatctcttgagcctgggaggcagaggttgcagtgagccgagattgtaccattgcactcctgcctgggcaacaagagtgaaactctgtctcaaaaaaataaataaatgtggcagtgctttggaaggtatatttaacacaaatgcccaggatgatgatgatcattattattgcagtaataaatccattctcagctcagaaaaataagagggtaaccaatcaatagctccagtgttcttggaatcagagagtggaaaggaggctgggagggaaggaagatggggtggcagggaggagagctactgaccaccttctatattctgatcactgacattgcccagccattgccagagggagaaatgtggtgggtatgagttcaagccaggcacctggaagtccctgatctctgggtgccgggaggtgggtgtggaactggcagacgacctaggcaagggtcactgattatggatcatttactttsttcaaccctatactgtcccatctgtttatgaaagtctagacattagggaaatttagacttatctaagaggttaatggagaagggatacagtaaatgtctgggccaacagagtcaggattcaaaatgacctcaaaggsctggacagataaaactgagcaaggaccagtgtaaagtcctgctcagaccggatgtggtggctcactcctgtaatctgagcactttgggaggccaaggcaggtggatcacttgcagtcaggagtttgagaccagcctggccaatatggtgaaacccsgtctctactaaaaatacaaaaactagccaggcacggtggctcatgcctgtaatcccagcatttttggaaggccgaggtgggcagattgcctgaggtcaggagtttgaaaccagtctggccaacatggtgacaccccgtttctactaaaaatacaacaaaattagccaggcgtggtgacaggcacctgtaatcccagctacccggtaggctgaggcaggggaattgcttgaaccagggaggtggaggttgcagtgagccgagatcatgccactacactccagcctgggcgaaagagcaagactccgtctaaaaaaaaaaaaaaaacaaaacaaaaaaaactagccatatgtggtggtgcatgcctgtagtcccagctactcgggaggctcaggcaagggaatcacttgaacctgggaggcagaggttgcagtgagctgagatcacgccactgcactccaacctgagcaacagcgagactccatctcaaaaaaaaacaaacaaacaaaaaaaaaaaacccaaaaaaaagcctgctcaatttcagaaaaagccaatgtgcagggaggagtgggaggatagagagacccagcctactatcagttcaggtcaaaacaacatggacactacagttactcagttgagcactggctaacaccgtgggacaggctgggaaagaagcaactgcagcctcaagctgcactgacatcctagttactaggaagtgagtcccaggctacagggactcaccaggtacccactcaaggcaggagacatgctcatttctcaacaccacctgctcatgaacaaactgaaatgagtttgtcattttgtgcctgcaaacaagacggtaacctcccaatgacactcaacgaattaacaagtggccaaaggaaggggatcaagacagggagcatctagaaactgaaaatgtctggaggacatgaggttggagaagacttagggagagctatggtgaacagatcagatgagagaaacagcttgcattgtgctattccaaaaggcacaactgggctcacagaagcttcagcagaataactagttcacgttaaaggccaccaagatgcaacaatttgagactcatggctgggtcttcagtgatccaaggacagtcatgtcaggatattcaggtgcttgctggcctggaagaggcctggacccccttatgggccttgaggagacttctctgtacttcgagggcacaaggctagtgaagatggctcatcttttgtggccagaattgccttcagttcagttttcagttcatggaagcccagagcaggtatgtgggataagacagaggattaggaggagggaatgacaacatatacattaaaaagtcactacctgcatcaaatgtatgagtatagctgggagacaactacctggtatggattgaaaggcatcaaagaggcccagagtcctgtattaacagaatacaccccaaggccaaaaattcctccttagatgacagcagtattaccccaagtgaaggacatttgccatctggggagggtaccatgatgatttattgggtcaacatgtggacatccagcagagaagcctggaggggctgagacatagggtagagaaggcatcctgcagcccagggttaagcaaactctgccaactttacaaaatgctctcacccaaggagtgccagagggtgaagctggggagggtcctcatccacttcctccatcctaccccatacttcctgtggccacttcttacttccctaatcctattagtaggagctcttctccttatcttcccaaatccaatctattgcattctgttaattctttctgaacatctttggaatctgttccatccactctacccctcagtaacccctcaaagtcatggtcttggcggaggcactatcatctctaccaacctgaatacactccaaacagacctctttgttgatctcttttaccgcaatctattcagcccaagcagtcagattaatatctccaaagcacagcatcagccatgtccctcccttgctccaaaacatttagtggaccctaaatatgcagcagatcaagtccaccttctttctgtggccattcaaggacacagctttgccctccagcctgtctctgaccacccactttcctacccactaccctgctcctcactgtgccaaactgaactgtctaccatcctcttaccccattccctgcctttgtctctcaggcaggccactttgcctgggatgctgtcactcccctactttagacaattcccatgcttcagggaccacctgaagagccgtctcttccatgaagatggagggagactttgctgaaatcctcttttccccttcctgagcgcctttagatgcatgcctgtcccacgcaccagaagtttgttacctgcttctgatgacatctcttctgctgctaagttatgacttaacgcctgaataatgtgctggttttcaccagtgtatgttctattttcctaccaagactataaattygaatcccagagagaggagtggggatggtatctcctccatcctagggcgaagcatagcaacacttggtaaggcacactgactgggtcgagagacctgggttttagttctctgctgccattaactggtcatgtgactttgggtttccttccctgcaaaatgatgaagcagtggatacatatcgcttccagctctggtattctctgagtctatttgactgtgggctgacccacccagctctaggcctggctagggaaggagcaagggaggctatggacaagcccagggagagagagagggagagggagatggggagctaatagctctggaggaaggaaggacatgctgggctaatgggataattggataatcctcagagctaggggctgccaggctggggccagctgttagaagcagacacaaatagcacaagcaaaacaagggcgctgatgcaggaagcagcttgctgagagatatggaggaaggtgggtggtggccagagggtgggggaggggacaaagagaaactggagcccctttctgttgaaattttgaggacaggatcttaaggtcttgtactctgaccccatttagaaagactgcatttaaggatcctggccttctatataccaaagaacattcttagagaccagtggtttatcttggcctccacagtgtcctggccaccaaggacctttaaggaccataaagccctcatctttgcccattgagggttatctgtaaatggggcatccatttgacatgcctgtgaaaatattgctggackcttacaaaatattaattttagatacatgactcagtgggtcccttcatttcaggcagataagtggttctgtcagtggggttgggcacagaacaaaagaaattttggaggggtctaggacccaactctgctaggtcacataagtcatgacctcagtgactggacctcagttagcccatctataaaatggggacaataagcattaccctccctgcaaggctgttgtggagataaaatgagatcatgaatgggaaagtaatttgaaatgcaagtgctttgccaagcactttagtcccaactctgtttctaattttgtatgattttagaaaggctatttcctttctctgagttccagtgtcttccactataagatgatgagatcagactagatgctctttaaattcccttctaattctaatgactctaattcttatwaaaaatagtatatttacatttgtataccctataaggacagtatgagaaaagaaaattagaggccaattttattaatgaacatagatataaaatactaaagattagcaagccatatctagcaatgtacaaaaaaatatataaatcattatccagtagggtttatcccaggaatgcaaggatggtttcacatcagataatcattcaatatcattcatattaataagttaaagaacactaaaggagaatctcaacagatgcagaaaatgcatttgatttaaaaaagtcaacacccaatcatagaaaaaactgttagcaaactagaaatataaaaacattttcttaactcaataaagtatatttttcaacatctcactgaacacaccatagtcaatggtgaaatagaagccttctctttcggtcaggcacggtggctcatgtctgtaatcccagcacattgggaggctgaggtgggcagatcacgaggtcaggagttcaagaccagcctggccaacatggtgaaaccccatctccactaaagaatacaaaaattagctggttgtggtggcacatacctgtaatcccagctacacgggagcctgaggcaggagaatcgcttgaagccagaaggcagagattgcactgaactgagatcacgccactacactgcagcctggactacagagggagactctatctcaaaaaaataaataaaaaaaataagaagccttctctttctagtcaagaccaaacccactattctatccaatatagtactaaagttcctagagatcacaataatacatgaaaaagaaaagaaacaaaataacattatctgcagctgaattaactgtctrtatagaaaaattcaaaacatttctttggaatattattggaactaatgagagtttatcaaggctgtcggatataaaatcaacataaaaaaccaacagcattcctatagggcagcaaaaactattataagtcatttaaaatataycatttataatagtagcaaaaaccagaaggtacctagaataaatccaacaaatgcacaaaaagaagactcagatgaggagatgtgccatgttcatggatgggaagaatcaatactataaaactggcaattatccccagtccatctggaaatcaagtgtaatcctttaaaatttccaatagattttctttcataaattatacattttggatcctaaaaatcatttgaaaagaaaaaaggccaagaagagccacaataatcttcttccttttaaagaaggtgaagaattgtcctaacatacaatagtgtggtacaggaacaggcaaacagatgaagtgaatgagacacaaaggttagaagcaaacctgtctttgtatgggaatgtggtatgtggtagaggtcacattacaaaccacagaaaaagcatggaaggttcattaagtggttctgaaacatggaaaggtaaaattgaagacaaaggtgaaagaaacaaagatctttaacactttaaaaagcaaatatatgaaaatgtctttatgacctctggccaaagatttcttaaaacacaaaagcaaagccataaaagaatatgctgctaaattaactaatgaaactttaaaaaaaawttttttcatgaagaaacaacgtaaagtacaaagacaagccacagactggaagaaggtatctgcaatgcatataatcaataaaggattagtgtctgtaatatataactcctatgaaaataaacaaagatattatcagacaccttagaagaaaaaacctaaatgatcaacaaacacatgaaaataaattcgatctcactagtaattaggaaaatgaaaattaaaatatattttaccaccattcacagtcagccaactagcaacaatttaaaagtcttggtggggaacagaaatacataatacctagtagagttgaagatgtgaatagcctataacctagcattttccatttctaagcctcaatcttcaatcaagtcacacacatatttttaaaaaccatgcacttggatgttcattgtgtcactgtaatactaaaaatgtcaaagcaacatttttagtatttcttagtatcttttagagttagaatggatatatgaactgtggtttactacttcaatgaactatcatacagcaggcaaaataaatgaactcattatatcaacacctgttctatattccaagttaaatttctctagctatttccagaccagaccttgaatttccacctttgtgccagtgctcatggttattgtctttcctctcacttttagcccaaattttaatgatataatttaaatgccccttcctcctaaaacatcccaggatcctttaaattctgatattagaaattagaaaaccaagaccaaaaaaagttgagtcatgctaagttcacatggcagatgactggcagaattggaaccagaaccctggtctttatatccgtctttatacccatgcaaggccacagataatctcaaaagatgataaaatacagaacaaatcccaattcctagcctaggccactttatcccacaaacatccctggaacagctgtggtcccagcttctacaaccccttctagcctgtgaagtgttaagatctggcttcactactatgtgactatgagtctatgtgacgttgagtaagtcaaactctcttgtgcctcagtttccttatctgttagctgccaataattcctgcctggctactgcataagctcattaatagaatcaaacgaaataaacgataataaactagaattgtattaaatacatagaaatatttacctttttattattttcaagatatagaaatgcctgccctcttgctaaaagaatcatgggatgtctgatttgtaaataaatttaattttgagagtttgccattgcttggtgatggaggggagatgttgtccttatacaagaagcaggactctgaaagctctactcccttttcctgccctcttctgcttggaggttttgtgccactgagttccttggcacaggaggaccagcaggcagactggggtccccggaggcgggagcagccagccctgacaaaatactgaagttggtcaagattgtctttaaaatctcttccctgtgctctttcccccggtttagccttcgctacatctttcctgggttactgaggaaggggttctatacaacctcctccctctccaccaaccactattcagtttcccaccattcaagatctacaaggggccaggcgcggtggctcacgcctgtaatcccagcactttgggaggcygagctgggcgaatcacttgaggccagaagtttgagaccagcctggccaacatggagaaaccccatctctactaaaaatacaaaaattagccaggtatgtggcacacatctgtaatcctggctactcgggaggctgaagcaggagaattgcttgaacccgggaggcaaaggctgcagtgaactgagatcacaccactgcactccagcctgggtgataagagtgagactccatctctaaaaaaaaaataaaaataaaaaagacccacaaggaccaaagactacgaggttgggaaatgtgcctggccccattttggcagagtcagtattcaacaaatgctgaactgagccaaaaggactgcctgtgtgtcttccccattaaccagcagctttgtcctaagcaggtcctcctgttcacaaggaaaacgtctgatggttcccttcccacagactactggggaccactgcatttgccctcccctcctaggctctatgcattttcagacaggcccctggagaggaatggtaaacctgggggcggtcacatagggcagttagggcagtggagggaggaacaacggttgagagtgtaggggcttgaggactctactcccttccctttcttgccctgactcctctgctgcagcccagaggtgtcacaccaccatgttccctgacatcagcaggcaggtggcctgaggtgtctacagtcagagctacggctgagaaaggctttgaagttacacaggttatgttacctctcttttttcatttttaaaataaagaaatattttccattctcctgctttacaaagctgttaagaagattaaatgtaaaaacgagtaaaaagagaagtaggacagtcaagtctgccaggccctcctgcctgtgacccttgggtcgctgccagcttggacctcagtccagcttcccagggctccctccgatggtcctcctctcacccagaccaaggacactaggactaaacatgggaggccccgccctcctgagtgactctttatctatacaggattgtattctctgccaaatagaccaaaaggaaggaaggccggcaagacattagctcttttcttagctctcaaatagctgacatttcaggaaactgaaattctgaatgggaccagaggtgatttcaattcattgtgcctgtctgcagagtcagtctatatgaggactccattatataggacgtacttctagaagttcagcgaaacccttgtcaataaatctctttcaaacttatctactcatgcttggaaattcgtcattagagctttacttctttggcacaagccaaatgtgggtttttgtcttttawaaaagacatatcagtcatatcagtcatctcagtgtgaatggagtatactggtcctttcctgggagcaggctcatacgaagagaagactagaacactgaagacttgtagcctctgaaactagaagagggaagatgggcagtgtgtggaagagaaaggatgtagagggaggtggagctggtgaaggctttccacctgaacagtcaggtatgatctccaaagtacccaacaaagctacatgtaggccaggtacagtggctcatacctataatcctagccctttaggaggctgaggcaggaggatcctttgagaccaggagttcaagtccagcctcagcaacatagcaagacacgatctctacaaagaatttttaaaaattagccgggcatggtggccatgactgtggtcctagctacttgggaggctgaggcaggaagattacttgagcccaagagttcaaggttacagtaagccataatcgtgccactgcactccagcctgggtgcagagtgagaccctctctaaaaacaaacataacaaaaaaactacatgtaacaaagccagacagaaagagagattattctgcatgattccatttatatctaacaaatgaaaactaatctacagtgacagaaggtaatcagtggttgcctgggccaggttgggaggaggcaggagggtggaactacaaaggggcatgagggaactttaggggcgatagctatcttgattatgatgatggctgcaggactgtatatatatgtcgaaacttatcaagtcatacactgtaaataagtgcagtttattgtatgtcagttatacctcaataacactttttttttttaagacagagtctccttctgttgcccaggctggagtgcaatgaccagatctcagctcactgcaacctctgcctcctgggttcaagtgattctccttcctcagcctcccaagcagctgggactacaggtacatgccaccatgcctggctactttttgtatctttagtagagatggggtttcaccatgttggccagatggtctcaaactcctgatctcaagtgatccacctgcctccacctcccgaagtgttatgggagccactatgcctggcctataacacttttttttttttttaagagtctcgctttgtcatccaggctggtgtgcagtagtgcaatctcggctcactgcaagctctgcctcccaggttcacgccattctcctgcctcarcctcctgagtagctgggactacaggcgcctgccaccaggcccagctaattttgtttgtttgttttgagacagagtcttgctctatcacccaggctggagtgcagtggtgcgatctccgctcactgcaagctccacctcctgggttcacgccattctcctgcctcagcctcccgagtagctgggactataggcacctgccaccacatccggctaattttttttgtattttttttagtagagacagggtttcaccatgttagccaggatggtctcgatctcctgacctcatgatacacccgcctcggcctcccaaagtgctggcattacaggcattagccactgtgcccggccgctaattttgtttttgtatttttagtagagacggggtttcactgtgtcagccaggatggtctcgatctcctgaccttatgatctgcccacttcagcctcctaaagtgctaggattataagcatgagccaccacacctggccaacacttttttgtaaaaaaaaaaaaaaaaaaaaaaaaaaaagggtctcgctgtgttgcccaggctgaagtacagtgaccattcacagtgcactacagccttgaactcctaggctccagcaatcctcctgcctcacttttccaagaagctgggactacaggatcacgtaaccacatctggcaataacaatttttttaaaagagtgaaaacacaaacctacagtattttgtgcctgccaaataatgtctcacatgcctctgctaagttctggcagaaacaagtgttttccagcatgataattcacctttctgggaattggattttctctctgtgagttgatagggctgaacttgatgatcccaaagtctgatccatatataatagtctaagtagtgaggatcaaatatgttaactgatagaaatccactatgaaagcttaaagggtttaatacaaatataagatacgaatcattaaataactagtatatacagagatactgaataaaaatagtggattaggccaggcgcagtggctcatgcctgtaatctcagcattttgggaggccaaggtgggcacatgacttgaggtcaggagtctgagaccagcctgaccaacatggtgaaaccccatctcaactacaaatacgaaaattagccgggcgtggcagtgggcacctgtaattccagctactcctgctgaggcaggagattcgtttgaacctgggaggcggaggttgcagcaagccaagattctgccactgcactccagcctgggcgacaagagtgagactctgtctcaaaaaaaaaaaaaaaaacagtgaattaaacacatgcatctaattttgctatatctaaaacttcatcaaaaaaatgctttttggccgggtgcggtggctcatgcctgtaatcccagcactttgggaggccgaggcaagtggatcacttgaggtcaggagtttgagaccacctggccaacatggtgaaaccccatctctactaaaaatacaaaaaatagctggacgtggtggtgcatgcctgtaatcccagcctcttgggaggctgaggtaggagaatcgcttgaatccaggaggtagggattgcagtgagccaagattacgccactgcactccaccctgggcaatagagcaagactcctccgtctcaaaaaaaaattttttttttcaagggtaaagcctacaataggagctcttggaaagaaaaaataygacatcagaaacaaaatgcttagtggaaggattagaaaacattgaggaaattttccaggaagtagaataaaaagacaaaatagaaactaggaaggaacagatgagaaattcatcccaatatgtgaataataagttttagaaatacaacaaaggaaatgaaataattcaacaaaacactccagaatcgaaaggacatgacttttcagattgaaagggtcacgaatggccaggacaataggtgtgtcattgtaaaatttcttaatgctagggacaaagaaatcccgcaaggtcgcacacacagagtgaggaatcagaatggctttggccttctcaacagcagcactggaagctagaagacracagggctgaggaatctaagttctgaggcaaaacgatttcttacctagaattccacactcaattaaccaagtgttagacattttcagacacacaagattttgaaaaaaaattatctcttgtgtactcccaggaaactcctggaggacatatgttatcaaaacgagggaagaaagcataaaatgagaagacatgggatccagaaaacaggcaatctaacacaagaaagaggcaagggaatcccctggacagtggtaaatagaggttccagaatagcagtgtgtagcaggcccccagtgcaggagagaaggctccaagagactttcctgagaaaaatgtattgagagaagatctaggtaattggcagactttaagtggtaagagtgactagtggtaaggccttagaaacctaggtggatgaaaaaagataagcaaaacaaagtgatgtgttaggaaaagcaatcatggctgactacatggcttagctccaagtggcatttacactgtcataacaaacactattatctacaaaacttacactatactgggagcaagggggcacagagagggatgcatatgtatagagggggcaaatgaagaagaaggagctaaatcctcgtcttccatagtgggaagtcaacagataaggcctaaaggaaaaaacaggaagtagtattataaaacatgttatttggagataagtaaattccaaaagaattaaacaagttgaaattggtccctctaaggaaaaggaaatggggttggggtgggtacagggaggttgaggacygctctttgtcttaacaaatcttaaagaactagttccctttttaatcaatgttcctgtataactttgataaaatttaaaattaaaaaattaccatggtgaagggtgatgaaatgaacgcttattgaatgcagtcagtgcggacaggtgctccccatataggtgccaccctgctggtgtccaagctttctgagctgttacagatcacgcccaaggtatgcaggaaggtgcctccatttgggaaacagcatgggggctggtcccacacggtgctgactgctgcctcagtaagtcacttagcctaagtctcagctgtcccactttgcagaaccagattcaaggagtggtgaaggtttcacgggcaagtgcctgtagaatacctggatgggcagccacctacttcaggtcctgatctggagaaaagaaagcagtaggaaagcagtgagcagaacagaaaaatatgcagtctgatagtggaaatagactccggcccctggtggcatgaaaaagaggagcccctgcagagcagagctacttgtgagctggctcacgccctgcatgtcagactctgatcgtactcctgtgtgctggagagtttctgtttcagaatgttgaaatggtggtttctgagagtgagctctgttgtcagatactccagcagcagcacagtgtgaagcatatctcgggataaacacctatcagaggccacagtctagttagcgagctgagataaaccatgttctaggagaactcacaatacaaggtatggcgaggaagaaaaatgccccaaaggaggaatgaaaacatccagcttcctggatgccttctctgacacttcttgctttgtgactttgaataagtcactcgccatcatcactcacttttctcttctgtaaaaggactggactagatgctttcgagggtcctttcctggcatgtaagaaagtaaactcacagctgggcacggcggttcacgcctgtaatcccagcactttgggaagccaaggcaggcggatcacctgaggtcaggagtttgagacgagtctggccaacatggtgaaaccctgtttctactaaaaaaatacaaaattagctggttgtggtggtgcatgcctgtaatcccagctacttgggaggctgaggcagcagaatggcctgaacctgggaggcggaggttgcagtgagccgagattgtgccactgcacaccagcctgggtggcaaagcaagactgtgtctcaaaaaaaaaagaaaagtaaactccctgagggcagagaccttgtctgacttgttcattgctctgtcctcagtacccagcagagtgcttgatacaaccaggtgcttgatgaatacttgttgaatgaatgaaatggaagataaaagcaatcagttttttagagtcttaaaactgaaaaatgaccccagtcaatgctttaatttcacaggtgaaaaaacaaaagcccagtgaggagggaaaaaatgtgcttgtgatcaccacagctaagcaggaatggagctgagattcaagtcccagcactgtgggaactcaattgagggtaggttagggtagactagacgggcgagggaaggccacatctttaactattcagaggtgaacttcagggtaacagtcttctgaactaactaataaagtttggctgtggggcaagacgtagtgaaaagtatatgcagttatctgggttcaagttccacctctgctacttacctgtgtgatcctggcctagctacctaatctctgaatctgtttttttggaaraagagataataataatatctactttacataatttctgtcagaatataagtaagttggatatggtatgtgaaaaaaatatttttcaagatgtcaaatctcataggttgttaatgtgtttagcctagctcccttctagtaatatctcattcactaacaaatcaacatagtttattaataatggtttattcatccagttagtcatcactttgaaaatcaaatggaagaactttgaaaggtaggtaagttttgatggagtagagcaggaggaagaaaaactggggagttagaatctaggtggggagggccaggtttggtggctcatgcctgtaatcccagtactttgggaggatcgctcaagcccaggagtttgagccagcctgggcaacgtggcaagacctygtcggtactaaaagttaaaaaaaaaaaaaaatgttagctaggtgtggtagtgtgcactacttgggatgccaaggtgggagaattgcttaagccccggaggtcaaggctgcagtgaaccaggattatgccactgcactccagcctgggcaacagagtgagatcctacctcaaaaacagaaaaaagaatctgggtgggggcattgcaggggccagtcctgaggagccaagggcaagcacagagaggcccaggagtcggaaaccagattccatactctgtgactgggagaacctgttaaccctcttggtctgtttcttcatctgaagtggaaggataatgacagtacctctgctaacttggaggctgctgtaatatcacaagaccatggatgtgaagaatttttagggatcatcaactgccatctccacagatgggagattatcattcctttataagagtatggatgagagggtaagagacatacttgaaataaaccttgcctatcaaattgtctcccctaaatttatattttgaagtcctaatccccagggtgactgtatttggagataaggcctttaaagaggtaattaaggttatataaggtcataagagcagggctctaatccaataggactggtgtccttccaagaagaggaagagacaccagggatgtatgtgcagagagaaaaggccatgggagaacacagcgttaagacagccattggcatgcccaggagagacacctcacaagaaaccaaccctgccaacatcttgatcttggacttccagccttcataactatgaaaaataaatttcctgtttaagccacccagtctgtggtattttgttatggcagccatagcagaactaatacacccaccttacggttttgcttcccttactccttcccccagaacaagttctctcttcatacgtaacggcattgcacaaaaatagcttctggtcagccagtaaggcaggaggcagcgtgactaatgggcaggaccaggtgttgggaccttgaccagtctactggcaggttgtactcctgaactgctaagtgggtggaaccagttttgtctgttcttagacaccaagtttgtcttccaagattctgaggctcgacagaatgatgaactgtttaaagagcttttagtcacagggaaggatttaggcccatgattaaagctcaacttccccctttcttatgtcctgggtaatttgaataatgttgccttaaaaataggggacaagtaggccgggtgcagtggctcacacctgtaatcccagcactttgggaggccgaggcaggtggatcacctgaggtcaggagttcaagaccagcctggacaacatggcaaaaccccgcctctactaaaaatacaaaaaaatagctgggcgtggtggcacatgcctgtagtcccagctactgagggggctaaggcaggagaatcgcttgaacctgggaggcagaggttacagtgagccgagatcacgccattgcactccagcctgggcaacagggcaagactctgtctcaaaaaaaaaaagaaaagaaaagaaataggggacaacatttatatcctgattagaagctcctaaagtaaatacataagcttccttgggattagattgtcagaaatttcaaaaaacaaatctggtaactgcattattcagtcaacaaattttcatggtcacctactatatgccaacctctattgtaaattatacagatacaataggaataaaatagacttagttcctttttttttttttttgagatggagtcttgctccgtcacccaggctggagtagagtggcgcgatcttggctgactgcaacctccgcctcttgggttcaagcgattctcctgcctcagtctcctgagtagctggaactataggtgcgtgccaccatgcccggcttattttttatgtttttagtagagacggggtttcaccatgttagccaggatggtctcgatctcctgacctcgtgatccacccgccttggcctcccaaagtgcggggattacaggcatgagccatcatgcccggccaaaaattttttagacagtacacctgcagagggcacataccatgaatggaacttgcaggactggaggttgctctgggtgtgtcagtgagtgagtggtgaatgaatgtgaaggcccacggcattactgtgcactactgtagactttataaacactgtatacttgggctacactaaatgtatttttaaatttttctttcttcaataaattaagcttagcttatagtaactttttgacattataaaccttctaatttttaaccttttgactcttttgtaataacccttagcttaaaataccaaaacattgtacagctgtacaaaaatagcttatttatatccttattctataagtttatttccatttttaaaattttatttttgttttactttttaaacagttttgtttgaaactaagacagacacatacacattaacctaggtcagggctatccagagaccctccctacccagggtcaggatcatcaatatcactgtctcccatctccacatcctgtcccactggaagctccatgcaataatatgcatggagctatcctctatgataatactactttcttctcaaatatttcctgaaggatgtacctgaggctgttttacagttaacttttttttcctataagtagaaagagtacactctaaaataacgattaatagtatagtaaatatataaactagtaacatcatcatttattatgaagtattatgcactgtatgtaatcgtatgtgctatatttttatatgactggcagtgcaataggtgtgtttacaccaacatcatcaaaagcacgtaagtaatgcactgcaataggatggtataatggccatgacatcaccaggcaatgggaatttttcagctccattataatcttacgggcccaccattagatgtgttatgtggcacatcactgtaaaactctttggcctggcattgaaaacccagttcaatctgggcctcctaccctcctatttagatgtctttttccaaccaagggtcatccccagtcaaacctttcaaaactccaattcactaactagaatgcttactatgccttacttaaatcctatccatctggcaaggtatggcaggcagcctctaagatggctcccatgatctctgcctcgtggtattcacatccttgtatgtgggctgaacttggtgactcactgctgataacaagaatacaacaaaagtgatgggatatcgcttctgagattaggttgcaaaaggaatgtggcttccatcttggtcacgcttcctctcttaaacctctcaccctggtgaagccggcaccaagtcttgaagcagccctatagagaggcttatgtctggagggactgaggcctaccaacgaccacttcagtgagcttgaaactggattcttctctaccctctgatgagcctttaggctgagagcttaactaaaacctcatgaaagactgagccagaggcacctggctgagctacacctggattcttgacccatagaaactgttggataataaatgtttattgttttaggccactaagttttaaggtaatttgtcatggaagaatagacactaggctacgcgtggcagctcacacctgtaatcctaccactttgggaggctgacgcaggaggatcctttgagcccaggaattcaagaccagcctgggcaacacagtaagaccctgtctctataaaaaaaaaaaaaaatagacaactaaaacacaaagtggagcaatatgttacacagcaatagataactgatagacaagaccagttcaagttgctcccctgaattttccttgacctagcttagcccagagcaacctctgcctaatgtgaacttgatgtagagctgttcttctcattggtcattttgcacaagggcaacattagttatcttctatcctctgtgtctcttgtcttttccaagtaacctgaggtcagtagctgcttaaatttcttgtatgtctctggagaaagtgtttgtgcaagtagagaaagcggtaggctttgagaggctagaactgcrtctgaagggtcttttcattcatgtttggtgactgactgaaaaatgacttgttggtgggaaattgaagtgtatgttagaagagggaccacagcttaggaagagctgatttttgatcttcatcaaaatgaggcttcagtggcraatactaacagccaatcctccttgtaaattctgttgatttccttcttattgtgtaaggagtttagccttctgttggcagttgtgttgtgacaagcagcagagagggggtggctctgggacactggggtcacttcagaggaagggaagttgattgtcttctcagggccccttctctcacatttattctttccagggcctctgcagcaggactgtgctgaagcccatttcctacacgtagcaccatttatttaaaacacacactacatatacacaacagaccaaatgcaaaggaaaaaaggggaaaaaggctgctgaagaccagagtcactaaaagttcaggctaagaatagacaaggaactctgagagctgctcagctatgtgacctcctgcaggggcttggcaagaagcccaattcagctttgttttttctgtgcttttacaaagaaagagcactagcttgggagtcaggagacctaggtaccagactttgctttgccagtgcctctttctgtggccttgggtaagtttttcccctctctgggcctcagtttcccatttgcaaaataaaagtgtttaagactaggttccaagattttccaattctaatgctgagaggatacagaggaaaacagaaagaatgctggctgaggaaccaggagacttgccttcttgtcccagctctgccactgacctgacctctttgggcctctgcttcctcatctataaaataaggtactatattcattcatccagtccttcaacgaatatttcttgagcacctactatgtgccaggcttggtgctggagatacgatgatgagtcaagccagacagtctatgttctcatggaatttctagtctattgggggtggaagggaggaggagaagatgaactgtaatcaaacaatcacataaatgaaggtgtaattaatgccagggtaagaaaaacagggaagggtcacacttggttctcagcaactgagggatagccacaatgtccaccaattccaatgttctgtgacctagtatgtagctctgcggggaggtgcagagaagcctttggaataactcatatctaaaatcatagggtttttttgtttgtttgttcgtttgttttcagaacggcacagctcaattaatccaagcaaccaacaaccatctattggggaccttctagcaggaatcagtcacctacctctggcctctctggtgctttacactagtgggcagaatggactcataaatggacacagctataaaatgcctcacatcattctctgatggctaattatatgtttcaaatactaatgtgtctaagaattaggtgagaattggatgtggtaggacaatcagagaaattttctcacaagtagaaattgagataggctctgaaggcttgytgcatagtttcagataaacagaaacaataatatcagggcacagtgggcccattccctcctactagacagtacaggtgcatgggacatacgagagatatctggccgggtgtggtsgctcacacctgtaatcccagcactttgggaggccgaggcaggtggatcatgaggtcaggagatcaagaccatcctggctaacacggtgaaaccctgtctctactaaaaatacaaaaaattagccaggcgtggtggcaggcacctatagtcccagctacttgggaggctgaggcaggagaatggtgtgaacccaggaggcagagcttgcagtgagccgagatagcgccactgcactccagcctgggctacagagcgagactccgtctcaaaaaaaaaaaagagatgtctcaagtaagagactcctaaatttcattttggggcaggagagattcaaaccctacttgttttgtcaaagagcaaaagacctcttctgtgacctactctaaatcccgtcccttggattaggaggcctgctactgatgggattcctaacttggggtagccatctcacctcaatgaatctgttatcctgtaaaatgaaggggttagatgatacccaaaatcccttataacacccagaaagatggctaaaacttcattctttgtaagaatttttattactttataataaaactgatggttgctactatggagtatgagctgtgcgatcttaggcaaattactaagttttcaaaacctgttatactttctttttaaaattcattttaatttttaaatattttattttcttttatatttttgaaacagggtcttgctctattgcccaggctggagtgcaatggcacaatcacagctcactgcagccttaaactcctgggctcaagcaatcccctcacctcggcctcccgagtagctgggactacaggcatgtgccaccaagcctggataatataaaaatttttttttgcagcaatgaggtcttgttatgttgcctaggcttgctatgttgctagggttaaaatggccaattttacgttatatatatatttaaaccataatctttaaaagtaatataccaaaagtaattcactcatataaagtgaattatacactttaaatgagtgaattatatggtttgtgaattacacctcagtaagaggatattctccatcccaacctaaacttctgtcccctcctcagaggcaactatttgtttcttagctttctttctagaaagattctaggcataaacaagtacatcttaaaatctatcatactttttcttttcatacaaatgaaaggaagtgatataccattttatactctgctttttttttacttaatatctcttaggttgttgtgtatcagcacatgcagatttactgcattctctttttttttttttttttttgagaaggagtttcgctctgtcacccaggctggagtgcagtggcacgatattgactcactgcaagctccgcctcccaggttcatgccattctcctgcctcagcctcccgagtagctgggactacaggcacccaccaccacgctcggctaatttttttgtatttttagtagagaccaggcttcaccatgttggccaggctggtctcaatctcctgacctcgtgatccgcccgcctcagcctcccaaagtgctgggattacaggcatgagccaccgcgcccagcctcgatttactgcattcttttccacttctacatagaagcccactggagggacctatcacactttatttaatgagttatcttattgatgaatatcttgtttctagtcttttttttttttttttgagaaagggtctcgctgtatcacccaggctggactgcagtggcatgataatggttcactgcagcctccaactcccggggctcaagcaatccttttgcctcagcccctaaagtagcttgaaccacagacaggtgccactatgtctggttatttatatatttggtagagatggactctcactatgttgcccaggctggtcttgagctcctgagctcaagtgatcctcctgccttggcgtcccaaagtgctgggattataggcacgagccaccatgcctggtacccatggttttaggcagacacatgaatacatcatctataggataaattcctagttctggtgttgcagggtccaaaggttagcacatgttaagtattactattgccaaaatgacttccttagaatctataccaatttacactcctaacaagaattcattcactcacttttttcattcaaccaatattgagtacctatcatgaaccatgcacaattctaggtcctggggacacagcaaatgaacaataacaacaggaataaaaagataaaaatccattccctaatggagcttacactctcacagaaggagagggcaacccaaaaagtaaaatatgtaacatcttagatggtaataaacgctatggttggccgggcgcagtggctcacgcctgtaatcccagcactttgggaggctgaaacgggcggatcacgaggtcaggagatcgagaccatcctggctaacacggtgaagccccatctctactaaaaatacaaaaaaattagccagctgtggtggtgggtgcctgtagtcccagctactcaggaggctgaggcaggagaatggcatgaacccaggaggcagagcttgcagtgagcttgcgctgggcgacagagcgagactccatctcaaaaaaaaaaaactgctatggctaaaataaggcagagaaaggagtgctggccatgggtaagggctagtaatttaaacgggatggttagggtataaaaattctaagcctcagcttccttatctgtgaagcaggacaayaatagtacctatgctggccaggggctgtggctcatgcctgtaatcaccgcactttgggaggctgaggcaagcggatcgttcgaggccaggagttcaagaccagcctggccaacatggtgaaaccccatctctactaaaaatacaaaaattagccgggcatggtggtgcatgcttgtaatcccagctacttgggaggctgaggcagggaaattgcttgaacccagaggcagaggatgcagtgagccaagmcagcactactgcactccagcctgggtgacagagcaagattcatataaaaaaaagtacccatgccataggattgttgaaggaattcaatgatactatatctggtatacagtaaaaatttcctaaatgaaagctattcttattataaacaactttacagctaaggaaagtgtggcccagggatgaacaatttgcctatggtctcagggaaaattagtggttgggtaagagctaaaaccaggcctcctgaccctccatgcagtacacttccaaatatatcaagggaccaaaagcattaagatgccatcctactggggctgctaacgggcaacgtggttttagcttcaagagtgctctgagaatgtgattttcaacatgcaaaagaggggaagggagatgagagagtacacaaggttcattaaggagaagcaggccaacttcactcaggcctaaggctgagcctgctggggtttgctcacaagacattcagatccaggatagtgttctcagccaaaggcaacaagcgttctggctgctgctcgcccatctgctctgatgagactctcccaaaccctggactcccattggtttcattccaaggaatctcctggaggaaagataagcascagttaagtcacagctgtagaaataataagatctggaggggcacttatatctgtttggccgagttagattttcaagcaggccaagtatgtggtgatggtggtctctcaactctctctgtgccttttcctcaccccatggcacctcctctccctgtccacagccagatactatttccctaggccttctgcctacccagagccctttccttgtgtgggttctatccttcctttagccctatcctttcttcagtgagcgtttcattccctccattcctcctaacccctacttcggaaatacatatttttaaaaaggtgacacttactggcttaacagtgtcactatggaacaggattcagggaagtcagtgttctgggcttgacctctgttaatgtgtaggtccctatatgaccttgggaaaaccaattaccttttctgggcttcaatttcttcatctaaaaaatgtatttcggctgggcgcagtggctcatgcctgtaatcccagcactttgggaggccaaggtgggtggatcaccagaggtcaggagttcaagaccagcctggccaacatggtgaaaccccatctctactaaaaatacaaaaactagccaggcgtggtggctcacatctgtagtcccagctactcgggaggctgaggcaagagaatcgcttgaacttgggaggcggaggttgcagtgagccaagatcgcgccattgtactcaagcctgggcaacacaatgagactcggtctcaaaaaaaaaaaaaaaaaaaaaaaaaaaagtatatcatggctgggcatggtggctcacggctgtaatcccagctgtttcggaagccaaggtggaaggatcccttgaggccaagagttcaagaccaccctggtcaacatagcaagaccctgtctctacaaaaaagaaaaaaaattaggcatggtggttgtgcgtttgtagtcccacctactcaagaggctgaggtgagaaacttgcttgagcctaggagtttaaggtttcaatgagctatgattgtgcccactgcactctaacctgggcaacagagggaggagaccctgtcccaaaaaaaaatttgttttaagatgtatatcatggcatttcaagtaccacagtgtagatttttctgccaagggcagatcccaatgatccacctgaagacaaaaaggtatacagagaagtaggagggccaaagggagaaacattcagagttgaggtgccaaggccactaaaatgctattaaaaggggtgtaataaaaaccaatatttgttgaatggcatccagtatccagtcctggggcagccataaggaaattcatacctgggcgagagatttaggtttaaaatcgattcttgtattgggtagacctcaatgcaggggaaattccagaccagctttggaccatggcaactctactcttaagaaggggaacataagaaagaaaaggtactttgtcccagatcactagcccctcagttacttgaacatcatggtgtagatctggctgtgagatttctctgcaaggctagaaagaggaagattgagaaacattcaaacagattgataaaaagggttcttgaactcaaatttgaggaagtgacctaagatttcaaaagatgttagaattataagcaaattatgtggatgtttccacttctgtttaatctgtggacaattacattaacagatggagcttctgctggggcaatctgagaaaacttaaaaaaaaaatctcagtgactatcactaatgttatctttcaagctgrcatccatgatcttattttttattttattttttgagatggaatttcactcttgttgcccaggctggagtgcaatggcgcaatctcggctcactgtaacatccgcctcccaggttcagtgattctcctgcctcagcctcctgagtagctgggattacaggcatgcgccaccatgcccggctaattttgtattcttaatagagatggggtttctgccatgttggccaggctggtcttgaactcccaaccacaggtgatccacccatctcggcctcccaaactgctgggattacaggcatgagccagcacgcccggccatcatccataatcttaatttcatccacagagaaaggtagagagcagcaaggggaattgagacatgagattctgaactctgaaataatctawgatagtcactacatcattgttcctgcctggaaaaacaatccagaccccaaacttttcttctytgatgccctgcagtggggttgacaataaactctcacaggcttgagccttgtggcatcatcagtacagcagaaacagttgcagacattttgggtgaaaaatcaaccaagcctgcttaaatccctctgcctgctgggacaaaaatatggtcagacttccagagtcagcagtgcatcctagcagagaaacactgaaggagagatggcactgttttcacggagtcttcagtgactttccactgagctgtgggaaaatctgacagttgactgtagctgagtcataacccagaggtcctgaccactcagatatttgaagattcctttcattcctttcccaaacggggaacctggcaaactccaattggttaattccatttacctcctgttccttgcaactatatgtaggtatagagtagtgtgctctcagcggtagcaaaagggtatcagaataacagcatatacactttgtaattataatagcttatatttatcttctacttactgtgtgtcgggcactttctatagatttttttttcattgaatctttaaaactgttcagcagtatatttactattattatccccagtctacagatgaagaaactgaggctcagagaggctaataacttgcccacagtcacatacctttggtgtgagttgctgaggtttaacctaaacattctaactccagagtttgtgctctagccactatgctatactgtagccaaacaccagcatggatatcccaagctcaaaggcacttcaaataccacaaatcaatcaattttccagctgagaaaacaggcctagggagattataggaattacctagtgatagagtcagggttccaggcagatctcttcactccagagttctacactctctccactgcatcagaatacttcaggttcgtagacaagcatgtggtgcacacttgtagtccccgctatgatcrcaccactgcactcccgcctgggtgacagagtgaaatcctacctctaaaaaaaataataaaatagaaaaagaatgctttgggtgctctccatcatcttgagaatctagagcttttctatatcttatcccttattctttagggaatggaacttaattttatgtaaacataaaatattttcacatagtttttctacaatatactgatttcccaatccttcccccctcaacttttttacatagactttttttgaaatggcatcttactctgtcatccaggctgaagtgcatggctcaatttcagctcactgcaacctccacctccagggctcaggtgatcctccactacagccttctgagtagctggggctataggcacacaccaccatgcccagctaattttgtgtttttctgtaggatggagtttcaccatgtggtccagggtggtctcaaactcctaggctcaagcattccacctgcctcggcctcccaaagtgctggaattacaagcatgagccactgtgtccggcctatgtagacttttaaagggcattttaagttcacagcaaaagtgagtggaacacatagagctatcccacagaccccctgcctccacacacagcctcccctgctaccaacatccagcaccagagtggtgcatttgttacaaccagtgaaccaacactgacacgtcattatcacccgaagtccatatgtttggattagggttcactcttggtgttgtatattctatgggttttagcaaatgtataatgacatgtatctatcattatggtatcatatagtatagtttcgctgccctaaaaatcccatctggtctatttattcatctcttcctcctaaagcccctgacacccagtgatcattttactatctccatagttttgtcttttccagaattacatatagttgggatcatataatatacagcctttcaaattatttcatttaataataagcatttaaggttcttccatgtcttttcatggattgatagcttgtttctttttagcactgaataatattgcattatatggatgtaccatacagtttatttactcatttatctacagaaggacatattggttgcttccaagttttagcaactgtgaataatgctgccataaacactcatgtgcaggtttctgtgtagacataagttttcaactcctctgactaaatacaaaaggacaattgctagaccatatggcaagagtaggtttaattttatacaaaactgtcaaactctcccaaagtagctgtactgttttgactcccaccagcaatgaatgggagttcctgttgctccacatcctcatcaccatttggtgttgtcaatgttttagattctaataggtgtacggtaggatctcgttgttttaatttgcaattccctaatgatgcatgattttaagcattttttcctatgcttatttgccatcttctttggtgggtgtccattcaaattttttgcccatttttttttaagagatggggtctcactatgctgcccaggctagtctcaaactcccagcctcaagtgatcctcccacctcagctcccccaagtgctggaattacaggtgtgagcacaagcctggtcaccctttttttttttttttttttttttgagacagagtcttgctctgtcgcccaggctggagtgcagtggcgtatctcagctcactgcaacctccacctctagggttcaagtgattctcctgcctcagcctcccatgtagctgggattacaggtgtgtgccaccacacccagctaatatttttgcatttttagtatagatggggtttcactatgttggccagctggtctcaaactcctggactcaagcaatccacctgcctcagcctcccaaagtgctgggattacaggcgtgagacaccatacccagccttcagctatgatttctttttctttcttttttttttttttttttttgagacagaggctcactctgtcgcccaggctagagtgcagtggtgcgatctcagctcactgcaacctccgcctcccaggttcaagcgattcttctgccccagcctcctgagtagctgggattacagacaagtgccaccatgcccagctaattttttgtatctttagtagagacggggtttcaccatgttggccaggctggtctcgaactcctgacctcgtgatccacttgccttggcctcgcaaagtgctgggattacaggtgtgagccactgtgcctgtccccagctatgatttctagtagtcaattattgagtgtttcctgatctctgcataatgccctcctctacccctccctcttaggaaatgaccagctaaggctccagtatgctccctcagttctcacttctagggaggctttccatctctaggtcttacctgtgtagtttattctttatatcctgcctcctgtcatggggacagtgtccctattcctctcatgcagtttgtccacagtgaccttggccccactaacctttccagcctcttctgtatccagaccaacttcactttctttagtgaaggattagagatggataacagcctggaaatggccacgtgtagtggaaagggtttagtcttagtcaaacaattcttgactcctctgggcaagttagttaaccatgctgagtctcatgcccagtggataggacacccctgcttataaggtgataatgaagattaaacacaaaatcatgtaaaggggttagcccatatcctagaacactacagatactgatttctctctctcttctggcctttttcccacttctcacaagaaatgttcaagaaagcttcatttttaaaaagcccaggccaggcgcagtggctcacacctgtaatcccagcactttgcgaggccaaggcaagtggatcacgaggtcaggagttcgagaccagcctggccaacatggtgaaaccccgtctctactaaagatacaaaaaattagctgggcatggtggcacttgtctgtaatcccagctactcaggaggctggggcagaagaatcgcttgaacctgggaggcggaggttgcagtgagctgagatcgcaccactgcactctagcctgtgtgacagagtgagcctctgtctcaaaaaaaaaaaaaaaaagaaagaaagaaaaagaaatcatagctgaaggctgggtatggtgtctcacgcctgtaatcccagcactttgggaggctgaggcaggtggattgcttgagtccaggagtttgagaccagctggccaacatagtgaaaccccatctatactaaaaatgcaaaaatattagctgggtgtggtggcacacacctgtaatcccagctacttgggaggctgaggcaggagaatcacttgaaccctagaggtggaggttgcagtgagctgagatgcgccactgcactccagcctgggcgacagagcaagacactgtctcaaaaaaaaaaaaaaaaaaggccctatttcatcttcaaagaccctttcttgccctctattcaattcattctgatcgctatttattgagccagggaccaccttttcaatactctctcaaacgctgaattcaacacataatggcaaattggtctcactgcagcattaacattgctggacactgacactgggggcctgctgattcctgcatctcctctaacttctctgaacatttctgtctcaggtactttatacttctcatctttccacatcctgatctcttctattcccatggcttcaacaaccactatttgctaaaatttccagttttttctctctctagtccaaattccaatccttaggccccagacctgaatttccagccattcacagggatctccttctggaggtcccaggggcatcttaatctccaaactggctttttctcctcatggctcttatttcctaaatggcttatattattaaaccaatactcagacaagaggccagaatcatcctgaacatccttgtcttctacacctcatattctatgttggagccatcacaatccctttgattttcatttccacagtgcytcttgaatccatccccactctatttctagggctttagttcagtcctttatcatgtctcacctcagatattgctgcagactgggagcccttattgccaggcactcaccctgctcatactctgcttagagcccagatttatgtaattaatagatctgagaatattaatcatctgctacaaagtcttccatagcactaagtgaaatactaaatactagtatctttagctcgcattaggatggaggtgcctcaacactattaaagaccttgtcttattaattattatatcccatgacataatattgtacattaaatattcattaagaaatgcttattaaattaatgaataaaagcccagaactatgccatgtatagtagggcatatgaaagaaatataggatggtccctgtcctctaggagcttacactcttactggagagacaagataaaaacaagaaactgggccaggcacagtggctcatgcctgtaatcccagcactttgggaggctgaggcgggcagatcacttgagtccaggagctcgagactagcctgggcaacatagcgaaacctgtctctactagaaatacaaaaattagccaggcgtggtggcacacgcctgtagtcccagctacttgggaggttgaggaggaaaaatggcttgagcccaggagacagaggttgcagggagccgagacagcatcactgcactccagcttagacgacagaatgagaccctatctccaaaaaaaaaaataaggaaaaaaggagtttgcctaaaataagaaagcagtaatttttttttttttttttttgagacagagtctagctctgtcacccaggctggagtgcagtggcatgatcttggctcactgcaagctccgcctcccgggttcacgctattctcctgcctcagcctcctgagtagctgggactacaggcacctgccaccatgccctgctaattttttgtatttttagtagagatggggtttcaccatgttagccaggatggtctcgatccatgatccacccacctcggcctcccaaagtgctgggatttcaggcatgagccactgcgcccagccagaaagcagtaactttttttgagtgctataataacaccaaagtggccaggtgtggtggctcatgcttgtaatcccagcattttgggaggcctaggcaggcgatcacttgaggtcaggaattcaagaccagcctggccaacatggtgaaacaccatctctactaaaaatacaaaaaattagctgggcctggtggcacacgcctgtaatcccagctactcaggaggctgaggtaggagaattgcttgaacctggggggcagaggttgcagtgagctgagatgatgccattgcactccagcctgggcaacagagcaagactttgtctcaaaaaaaaaaaaaaaagtgaacatatacaaaagctataatagaaaaactaccttttgatacacatatatacatactcttttaatgaagcaatcctttgagaaagatattattatccccacttcacagacaaagaaactttggcacagagccattaaagaacttgtttgaagtgacacagctacatgcaagaccctgtactaagcactactgacacagattaataaaatagttcatgctttcaaatatctcaaaatcgaatcaaaaattcygaaactaaatgattctctcataaacaattacctatacatcaatgtygggtattgtaataaatatacacataagatgggagtgttattttaggaatattaagcttaaactattacgctgaaaaggctctactagaagacaaacacactgaaataggagaaattagcttcctagctaatacagcttctttgctaatacaatgacgcaggcaagatccaggcaggcaggtgatgatggtggatgcagtaagactggagaaggggcaggatgcaagacagttcacaaacaggaatgacagtaaaagtttaatgtaagaacaaagaatcaggcttaagtttttaagtcttggaaactcaaggatattagcaaagacaaagatacatttattttaaggtatggtatactgagctgaagactgctttgctctgagagaatataatataatatagattcagaaatgagactttacaaatcattagcaaccaggcttgagttgtatctaaagaaagaatttaaaaatatttcaattaggctctgtgtcagtgggatggcctctacatgttttctttggttttattttctcctcactctccactggtctctattatcaattctgtttgcagcaccttttccacggaaatgaagtgtgattataaagtaacaatgctgaagtttaagcatacaagaatttatccaaaactgattccaaaaatgttgtttttgctttaacacttttctggaacttctgtgttggagttgctttcagagtccatctacaatcccaacaaggaagccaattatttcacagtcatactttatttgtgaacacctctaacctgatcatccattaacttagctcagagttaatttctgttttttcaaaagtaaaatctaccctcgaaaaaaaaaaacacagatttcttgagtaaccaacactaaggttattccaggggttgtgctccttaggcaacttcatgagaggctttcctgtaggggagacatggagaattaacatgtctgagcccttactgagagctgggcattggactgctaattatttcccagacctgcttttcatgtaatccttgaagcaaccattcaagcaagtactgtcatctcatgataaagaataaaagaaagttcaaaaaagtaacttatataactaatacatagcagagttagaactttaaaaacacaattttgctactgtaccatgctgcttctaataaaataagaacaccgcttcccaatgaacagaaaaatgatcagttaaacagtatcattactatataatcctatattatatgcctatagctttaatactcttttaacatcatttggttccctgccactttctgtactgattaactcaggaaaatactgagagaaatatgagcaaccagccatgagagtctgtcayagattttgagttaagtctatctgatagaaacagaatgtaagaaacagaaatgtctttggagcatcaggcttgactctctctaattatactagaataatatgggttaagtacattataatccaggtcaacaagcaaatagtatttcctttcccttatacaccttcaaatggaggctactgtatatttaccaccagggctttattcatgcactyttagttgaacacagataatacgttttacttattcctcctttgaattctactcatttatcactggaacactatccacatttatatatagcagactcaaactatcttaaactgaattggaagactgcaggcttgaattatttaaaagaaaaacatttccacttgtcctgccaagtacttgatcaatgctcacttaagtgatgtaatcatctcctctcattttgtaagctctattctctctcttcaggtgactaagcagtctgcaatcttccttcctttaattgaataattttcaggcttgtgtcttatccttycggtttttacaaattcatgcaatcattttctcctgtgactacagtaaagggttttatggctayggtcctttcgttagcacacatgtctctagaactctctagatctgctacacatacactgtctcaacgcagactttcatctactcttatgttccagatagactagctactctgcaatggctatctttttctgcttgtggtcttgcttttccttctttttgattgaccttcctgtgccttccacacatccctctggctcaggtattttttttctcctaactcagatattttttttctccatacctctcagatattttttttctcctacctctctggacctgcacggtacttttggtaatgttatcacctactattgtaaacacagctactgtttatcccacctctggacctgcacgatacttttggtaatgttatcacttactattgtaaacatagctactgtttatcccacctctggacttgcatggtacttttggtaatgttatcacctaatattgtaaacatagctactgtttattaagcactagccatgtgctgtgtttggagccttatgtatgtaacacaaactatccagcttttcctcctacccctcacaatgcactttccagcccctataaaatctgtcacttacaggcctggcacagtgcccggcacatagcaggtgctcaagaaatggaaggtattattatcataattatgagaagaagcaccatatgacttattcatgtttgaccccaatgtctggttcgtttaatatttgtttacaaaactaggcaatgggctgggcacagtggyttacgcactttgggagaccaaggcgggcaaatcatttgagatcaggagctcaagaccagcctggcaaacatagtgaaaccctgtctctactaaaaaaacggaaattatctgggtgtggtggcacatgcctgtaatcccagctacttgggaggctgaggcaggagaattgctggaacccgggaggcggaggttgcagtgagccgagatcgcgccactgcactcccgcctaggcgacaagagtgagactccgtctcaaaacaaaaacaaaaacaaaaacaaaacaaaacacatctaagcaattaagagaataaatgttgaatggttgtaagccatctgtaagacaaactgtgcagcttgccatggactactgaaactaactctttccagagtctggacaggacaagtacatagtggggctgtgctgcccagatgcatggcctggaagtccggcaagaagctctttttggctagtgactgcagaggctgagtatagaaaagggtcgtcagtgtgttgctccaacacaggccagtatcagtttggctccctaggtgcagaatgtgtggtcagaccaactcactgggatcagagagaaacatgagactgtaagagaggattcggatgatgaaggaattcctgattcttagaactgaaggctgtaactgttgcactcacacaggcacaaaggtggggctctggggctctgggatttggcaatggcagtctaggaaatagtctatgttagtctggcaagatgtagcaggatatgccagtcacagtggtgtgctcctgtagtcccagctactcgggaggctgaggtgggagaacagctagagtcccagcgtttgagaccagcttgggtaacacagcaagaacccatttcaaaacaaacaaaccaaaaaacaactcacagaaaagaggtagcaggacacaaaattcagattccagattcaagtctttggcaatgctaagtttaaaagggggctgtgcactgagatatcagaaagagacttgagtttaaggaaacaagagattcaagattagagcacaaaagggttttttttgttttgttttgtttttttgagacaggttctcactctgtcacccaggctggagtgcagtggcacaatcacggctcactgcagcctctacctcctgagctcaagttatcctcccaccttagccccccaggtagctgggactataggcacatgtcatgatgtccagctgatttttttttttaaagatggggtctcattatgttgcccaggctggtctcaaactcctgggctcaagagatcctcccactttggcctcccaaagtgctggaattacaggtgtgaatcaccatgcccagccacaaaaaggtttaatgccctaaactagttattagatttgggacattaattcaggcagggctagcagcaagcaaggttgagatctgaagtaggactcagattctaggagtgagggcagaactagtctagtgtttaaggtggggctgaacttgccagtggttgagtttgttgctggggcagagaacctggtaagttattacaatactgtaagccctccacaatgaatcattagtataccttatagcttctcagagtacacaatctacttagcttcagtataaagtattttaagatgccaattatctgcagatggtgaagtayagaacataagtctgtttggcctaacttaacaaatacataattctttctacacacttgtttcgccccgggctgtgtacctatttgacctcttaacccccatcgatttttgtccccttacgattctccagatacaaccacttccaatttgaaattgctctttgcaaccatgaggtagttgtttcatccccagattctgggaccagaactcttttcaccattaggttccagaaactagggtccaaatactcttgcaataaagtgtttcctttaaaccaaatccaaccaaacatacttttaaaaaagttaataataaaatcttcccatcatctggctcttcagtaaactcacagttactgacttttacttcatcaaataccaggctgtcttgtatcgttctttggcttatttatggttctttggatttgacatccctaaggttttcttggttcatrttacagcaatatacagaaatcacagactgtaattcaactacccatctgatgactgactatcttctacaacactcccaccaagtggtcatctggactgtacctgaacaccctgaatgagaactcatcacttgcagagactgcctatttcattttttttatatcacccaatgaaaataactgtattggcctgaaatatcctccctaagtttcttgagacagagtcttgctctgtagcccaggctggagtgcagtggcacgatctcagcccactgctactcactgctacctctgcctcccgsgtcctggctcaagcaattctcccgcctcagcctcccaagtagctgggattacaggcacatgccaacatgcccagctaatttttgtatttttagtagtgacggggtttcaccatgttggccaggttggtcttgaactcctgacctcatgatctacccgcctcggcctcccaaagtgctgggattacaggcgtgagctagcacacctggcctcctcccttagtttctatccattgactccagctcctctccttagggacatgtggaacaaataaaaacctcttatatgtggccccttcagaaatctgaatgaagtgacaatatccttcctgagtttgtttgccttgttttgctaaatatatgttccaagtgcctttaacattttgttgttgttgttgctgttagatctctcttttctgcatattcaagatgatctatatgtcgtgtagctatcccagagctagattaatttcaggtgtgctctggtcagcacagaacagaatgagatagtcatcttccttgtgttctgcacactatacttctcataatgcaacctaagattatatcagctttttttggcagccacacacactgttgactcacattgagcttctagtcaactcaatacccctaattcagccacacgtactgctgctaggcccaatgcatacttctgcaattgttttagcggggaggaagtggtaaagagaaagatttatcacattgatacttcatgaaatttggggcccaaaaattcaacctgggattttgcattcctgtcatacataagcctatgcttagtttgctatcctaaatgattagacaaactagtgatgagtcatggactggagttcagcttaggctagtcagctttgctttgtttcatggtctcatgcagccttctcaaaattaccgatctttcaaatgtatgctatttatcccragaagaactggtggaaagactataaatgattcaatgcaaagccattatcaccactgaaaaaaacaacgcaaagataagtatccagtacattaaagatggtatatttataatttgccatggaagaattatatctaaacaccttctccttgattaaaaatagcatctatagagataatgctatatagattttcaaagatatttcaacttagcttattccattccttcaagaaagtggggaaggtatcattatcctcatttctagttcagttcagtccttattgtacccatggtawtccaacacaagtgagacccaccccatgtgattaaggcactcatatccagggtgttctcatttctagtccagttcagtccttatgggacccatggtattcccacacaagtgagacccagtccgtgtgattaaggcactcttatccagggcgttctcctgtaagtgtcaggcaacatctgctctgcttgcccttgccatctggattttaaaaaggatctcatactccgttaatcataaaatcatagaatctatgagaattagtctaatatctttgaagattaggaagaggtatcaaataatgcacctaaagcttcagttacctaatagtaaaaccaggattagaacatatttatattctaaccagtattcagaccaatcttctttctcttacactactatttctcaagatacaagtaggtaactgtctgttatctacagcaaggacatttctgaaaatgggatctgagatacacattctctgcaactcaagaatgttatggctaaggatcccaccaaactcctaatccaagggaatatgggccaggaagctaatcagagagggatgaaccatgagatgctgaaccagcgacttcccagtaaacagatttgtgctatatgaagcagctcccccaatatctaccattgttagagccacttgaggatttagaccacttgtgttctagataaccagggtgcagagacagctagaagtcatgttgaaaggaaataattataaatctgctacagccaaaggtggtctttttcaaaagcaggctaaataagccgctgagttaatatagctaaaggaacccggtaagtgactatgattgcatcagtgcactccagcctgggcaacaaattgagaccttgtctctaaatatttatcaatactgatatggtgtccaatttgattcaacaatcatttattgagtgccagttatatgcaaatcactgtagactcaaagacatgccattcctttatccttaagaaacaacagattcaggttggacatggtggctcatgcctataatgcctataatcccagcactttgggaggccaaggcaggaggactgcttgagccttggagttcaagaccagcctgagcaacataatgagaccctgtctccaaaaaacaaaaaacaaaacaaaacaaaaaaaagggcatggtggctcgtgcctgtggtctacttgggaggctgagctgcaaggaccgcatgaacccaggaggttgaggctacagtgagccatgattgtgccaatgcattccagcttgggcgacagagtgagagaccccacctctaaaaataattaataataatgacaataatgtttatttcaaaatagccacaaagaagtgataaatatttgaggtgatggatatgctaattggcctgatttgatcattcygcaatgtatacatgtatcaaaacatcacaytgtgccccataaatatatacaattattatttgtcaattaaaaataaaattttaaaaacactttagaggtttaatatgaataaagaaggtttactatgagtaaagcagagctggtcatgagaggagaagaaacccacaacaaaaacaagggacaaaaaggaggctgctaaaatgggggccgtaaaaccttatttgtcacaattttggctgggttggccttgctctgctgcaaaatccatttttggtaagtttgggtgggctactccaagactttttcatgtgagacacttaagtctacataaggataaaaaacaataaaaaatgctagtgaaaaaagaattgtgacttctgggctaaggaatgcaatgtagggacaaattaacccagaaattgggttttagaatgttgcttagaaattgggtcacctcagatcttttttcccttgactataagtaaaatattggctcttacagtttctttccagtaaataccatgtttaacttggaaatctgacaaataccaaaaaccctatccccttacctcacagtattattggatgatcaaatgtgacaagatgacgcaaaagccttttgtgtgttgtaaagtgytaaatgagggcataaacagcccctctgggtcataggagaagactggtgggatctccatgtcatggcccttattagaattgttcaccattgatcatcataacattttagtccttcaaatgtaaatgagtaaaaatagtaccttactatatgatccagcaattccactgctgggtatatacacaaaagaaaggaaatcagtgtatctaagggatatctgcactcgcatcccatgtttgttgcagcactgttcacaattgccaagatttggaagcaacctaaatgtccatcaacagatgaatggataaagaaaatgtggtacatatacacaatggagtactattcagccataaaaaggaatgagatcctgtcatttgcaacaacatggatggagctggaggtcattaagtgaaataagccaggcacagaaagacaaaccacatgttctcacttatttgtgggagctaaaaattaaaacaactgaactcatgcagatggagagtagaaggatggttgccagaggctgggaagggtagttgaggatgggggaaaagtgcagatggttaataggtacaaaaagtagttagaaagaatgagtaagatctagtgtttgatagcagaacagggtgactatagtcaataatttaattgtacatttaaaaataactataagagtataattggattgtttgtaacacaaagaataaatgcttgargggatggataccccacttactatgatgtgattattacacactgcatgtctgtatcaaagcatctcatgcaccccacaaatatatatacctactatgtcctcacaaaaattaaaaataaaaaaatttaattacctatacacattactttttaaaaagtactttaaataccttccctaaggattgaaataaacacatattgtgaatttaaaagtaatacctaaaaacagacactaatactttttttttgagacggagtctcgcccaggctagagtgcagtggtgcaatctcagctcactgcaagctccatctcctgggttcatgccattctcctgtctcagcctcctgagtagctgggactacaggcacccgccaccacgcccagctaattttttgtattttttagtagagacggggtttcaccgtactagcgaggatggtctcgatctcctgacctcgtgatccacccgcctcggcctcccaaagtgctgggattacaggcacgagccaccgctcccagccccactaatacatttttaaaaataagctccttctgcagaaccagcttctataatgaaactgttttctcacaaataagcatatagaggaatttatacatggctagattattagaatcatattttattagaattaggacaagacttacatcatctctatagactgtctcaccagttccctcccctcccttttttttgttttgttttgtttgagacggagtcttgctctgttgcccaggctggactgcagtggcacgatctcagctaactgcaacgtctacctcccaggctcaagtgatcctcctgcctgagcctcccagtagctggaattacaggcacgcaccaccatccccagctaatttttgtatttttagtagaaaatggggttttgccatgttggccaggctggtctccaactcctgacctcaagtgatccacccacctcggcctcccaaagtgctgggattacaggcctgagccaccgtgcctggcccctatcttttttataacaggaaaactgaggttaaagtagaacccagactaaactgcaggttttctgactcctgttctaagtctcttttcttctataatttttttaaaaaatatttcaaacataaagaaaagtattggtaataataagcacccagattttttaaatgttaatattgtcatgtctcagatctcttaaaaagaattaaaacattatctatcaacagataattcccattcttctatttcattcccctatctctctctccagaggtatccatcatgttgaagttgtgtgtattctgtccttcctgcccatgtttgtatacacttaccaaattatgggttatatatccttaaaccacaccatgttgccagagaaagagttgttcttccaaacaaggaagaatccctcactctagtatgcttcatgcagttataaccttttgggttggtgggatatttcagaaagaaactagggcaaagccttaagtctttttaaatgattaccacagagccgggcgcagtggctcacgcttgtaatccccacactttgggaggctgaggtgggcagatcacctaagctcaggagtttcagaccagcctggccaacgtggtaaaaccccatctctactaaaaatacaaaaattaggcgggcgtggtggcgtgtgcctgtaatcccagctactctggaggctgaggcacaagaatcacttgaacccagaaggtggaggtttcagtgagctgagattgctccactgcactccagcctgggtgacagagggagactccaactcacaaaaaaaagcaaaaaacaaaatgattaccacagaaagagctagtgaagtgtcttgctatcattcagagtaaaaagtaaattgggcaaatataaacatttttaatacaactttttaaatcctaagttttatttatgaaacactggtttacaatgaacaagtacgaatgacctgtcactgaacaatagggaaagatgaactaaacaatttaactagtaataatagcttctactactgcttcgaggtccagctcagtgttatcaccttaatgaatttgtccatgatcccagagttgattccttcaataatcatttattgagtgctaaagtcctctggatacaaaagtagatccggtccattttctgaggacagcacagaaataactacacaatactgtttaataaatgtaacaagagaactatctatgaaggcctgggggagcctaactttttctgggacaattggagaagtctttacagaagtgatgtttcaactgcatggtggaggatgagaaggcggtcacaaaatgaaggatgaaaggtgattccaggtagggatacactgaatgagagggtacaaaggatggtaagatactagttttagaaagacaactaaggatagacattggaggtggagagacaagttacaagactggcaacaattcaagcaaaagatgacaggaggcagacatgaggagggaggaggaaggatatgaacaaaatccaggagataaatttagcagaacttgatgcctgattgtattgaggaaagaaagaacatggaggagttgcagatgactctcaaaaacttggcaaatcagtgggtggtgaggccattactgaaatagggaatacagtgcagaagataagaggctgggcgcggtggctcatgcctgtaatcccagcacttcaggaggctgaggcaggcggatcacctgaggtcaggagttcaagaccagactgaccaacatggtgaaaccccatctctactaaaaatacaaaaaattggctgggtgtggtgacacacgcctgtaatcccagctactcgggaggctgaggcaggagaatcgcttgaacctgggaggcggaggttgcagtgagccaaaatcgcaccattgcactgcagcctgggcgacaaaagcgaaactctgtaacaacaacaacaacaacaaaagaagataagagcctgcttgagaaaggaggtgaaagttcattcagtttgaagcattttgagttggctttgaagcctcttccatgagacctccaacaatttctctaagccagaaatcacctctttgcactccatagtatctttttcatctcaaattatttaaatctgctgtatttacaagtttgtctttcctttttttttttttttttttttttttgagacggagttttgctcttgttgcccaggctggagtacaatggcacgatctcagctcgctgcaacctccgcctcccctcctgggttcaagcgattctcctgcctcagcctcccgagtagctgggattacaggcatgcgccaccatgcccggcaaatttttgtatttttagtagagacggggtttcaccatgttggtcaggctggtctcgaactcctgaccacaggtgatctgcccgcctcggcctcccaaagtgctgggattacaggtgtgagccaacgtgcccagccgtctttactttaaatcacaaagaaaaggtactaggtcttatctgtctttatatggctctcttagcagtgccttacacatagaaagtcctcagagtttgcactcttgagaaggcagctccatcagatactagaaaccgtcagctaacatttatcaaaacaaggaacaaaacttgtgaattagcagctgaaacaaaatacctgaagtataatatttttaatgttagtagctgattctagatataaattagctccctttgtgctcattttacttgcctcttttttttttttctttgagattgcgtctcactctgttgcccaggctgaagtgcagtgttaagatcatagctagggagcctcgaactcctgggctcaagcgatcctctcacctctgcctcccaagaagcaggtgcgcaccaccatgataggctaatttgtaaaacattattttgtagatacagggtcttgctgtgttacccaggctggtctggagttcctggcctcaaacaatacccctttctaggcctcccaaagtgctgggtttacaggcatgagccaccgtgctggccttttctgacttttaaacaaccccgcagcgtaatctttgcattcctattttacagataaagcaacagaagcctccagcgactaagttaaactttcctggggtcacaaggtttacaagtggctgaataggatttctacagactggttccttcacccggctgcccgccgaagtaagcgggccttactgccctaattctcaataggaccccaaagaggacgcttctttgctcctgaagggatggcaccctctggattcgcggtaacagcaaatggggctctcactcctaccatctcagtgacagtttaaagcgcaccctaccgcaggaaagtgcccatatttgcacacacgcggcagagggcagggctgaaaaggggccctagggtgcagggggcgcgccctcacccggggaccccgcattttacaatattagctccaccgaggcgcacggaaccgcaggcgagcaactgaccttcggctccagcggccccaaagccgggggtgggaacgcgcgacccaggtagcggcatggactccgagcctggcccctcgggggttaaaactccccagacataaaggctccggacgacagaggtgcagccgccgcgtgcccgtgggacactgaaactcttcccttaccttcctcggtagtcctgtgagggaggctggcccggccggctgccctacggtgcggacaggaggtcgcggtcgggaggggccctgcccggcggttgctgctggaaccagcccccgcaagggcccgcagcggccgggccgtttacctcagacccgcgccgcagcctcccggagcccgcgcccaggactccctcacgacctctccagggtcccggcccgacaccaaggggcaggtgaggrgtggaacctggaggcacccgcgccagggcccctgagggaggcgggaggggkacagcctcagtccygactcgcagccgaggcgcgacractccgcgcagtcccgcctgtggaggggcgtgcctcatcgcttgctaaccgagaggcgaagggcaaggggcgaagggcaagcgccggatcctttcgccccctccccacgtgaggccctggaggctgattggccgtgtgctgcggaggcggcaagaggaacgtgtcctggcacgtgccgaaggagcgctaaaggccaggggcggtcccacccgcgaagccctggaaggcggattggctgcgcgaggaagtggcgtgtcctcacttgagctgtctgggagcgagagtaagagataaaggcaagggcgcctgagcgggcctgggcacctcctcccactgcgggcaaagggcaggcagttcgtgcgcggacacaagcactggcggaccgtggccatggcgggcgctgagtggaagtcgctggaggaatgcttggagaagcacctgccgctccccgacttgcaggaagtgaagcgcgttctctatggcaaggaactcaggtccgcagccaagaggctaagctaatggggtcttggggccacagagtgtgggtctgggggagcaggcagggagggcctcagggtctgaagggctcaggggaggcggtgagaagtcctgagttggcgggcagagaccatagtaggtcttgatgggacggccccggggtccttgggggttgcagaatcctggcgtgacctttacaaatctcttctcccccacgttgcccagaaccggaaggaaaaggacgggattttactctccagggctttctctgtggccatcccaaccctcctccccggagccgggcttgtcttctggatgtctggctggatcactgtctccaaccagagcacccagcaggtgtactgattgtccggccccagaccatccttcttgcggtgacccgacctctggctgacccttggaaatagaggctgtctgcatttagttggcgagggaacctttcccactggcaagccatgggcgctggtttttccactccctgcaagcttgtgcatcaccaggactttctgagggctgtatactgctggacactgtgtccacaaagctgaaaaagacacttcctggccgggctcacacctgtaatctcagcactttgggaggccagggctggaagattgcttgaactcaggagttcgagaccggcctgggcaacatagtgagacacccatctctataaagcatttaaaaaaatagccaagcatggtagcatgcatctgtagtcctagctacatggcaggctgaggcgggaggatcacttgagcttgggaggtcgaggctgcagtgagccaaaatctctcctctgcactccagcctgggagtcagagtgaggccctgtctcaaacacacacacacacacacacacacacacatacacacacacacacacacacacacgtctttggatttggagcttacttggataatcccggatgatcttatcttgagatcctgaccttaattacgtctgtgaagaccctttttccaaataaaatcacaatgacaggttccaggtgtcaggatggagacacagctcaacctgctacagtagcttcagggtctgcaggtggaaataactcaggggctatttgctatgtggaggtgggcctcaggtgggcgaggctgggcttgttgagctgccctggagatggtcattccaggtgaaggaggagcaggtacaaaagagggcgctggagagaatgctggaaaacctggatattcaaggggtcagagaaagagactttgtgggagattctggaggtgaggactctggggcaggacagggaaagaagcatcagatggctcagaaatgtctagcgggtgaggacagcaggaagtctgctggatttagccatgataaggctgttggcagttcctgagatggggccaggaggtaaggcctgagctgaggggaagcatgtgtggaagctccctaggcagcagggagagacagcaagtgagtaaacacatggacatatgtggaacactgtccctctttctctttcttcctcaccttctctcccccctatctcccttctgtttttcaacgggagagactctttaacagcttcagtgatggatgtggaggtctgtaggtactagtggagaaagatgtccaagctatgtgtattaagtgaaaaaggcaagttgaagaacagaaaatacagaatgataccattgtatttgtaatgcatacacgtaggaaaataggaaagagacataaaacattgttaagaggggttgcctctgagttttgggactaggggtggggtagaaaggggaatgtatgtttcattttataccctttcccactatttgattcacccccgccatgagcacatgtctcttttgtaacagagctctagtttaatgatttaaagtgctggtggtaaagagccatcagacatggaaagatgaagttccagaagtgagaggttgctgaggaggcaggaacttggtgtcctctggcaaggtctgcctgaccctgggtgggagaggtgggggccctgaagggcatggtggggctaggatgggaagtgaagggctttactccttgaagtttgaagggaagccctgagtggggaggcctcagtagcagggtgaggggtagagggtctgaaagccaactacagggaccagggcaggcagtggcagcaggaggccgtctgtgaggttatggctcatttgctggtcttgtcctcctgggcagtggctgattgatgttttagtacttttgggctactataacagaataccagacttccctgtacttgtgggcaatcacagggagaaaaaggagaagggtctgtgtgtctgtttccccaaaggtctgtgggcctggtagctggacagccctttgggaacgtcctagtgaacactgtcctcagcctgtggtctcacaccaggaagaagtcaggtggcagagctcttgtctgagtgtgcaaccctggctgtaaccaacatctggctgcggtctctttccccatcttaaaccacatgaatttattcctcacagttctgaatgctatgaagtccaagatcaaggtgccacagcagatctggtgtctgttgagggcccactttctggtttttgatggtgccttctcactgtgttcttacatggtgcaggaagcaagcatgccctcttggtcttttaaaaggactctaccctcatgacctaatcacctctgaaagagccctatcacattggagattaggatttcaacatatgaatttggggcagacataagcattcagtctgtctcagtgttccactgcatctcctgtaccaggcctttcggtgggcacagcacatggtcattgactgcgtctacacagggtatggcttgaggattggttaggttctccaagatgaagctgtgtaggatgtggtaatgcaccgcctttgataatgggagggcagagaggccttacaggtactgcccagatagtagacaggagtggctgggaggaggtagagccccaaaggtggctgtcctggagggtggagcggcctctcctgtattaccttggcttagaatgagctcgcagggagctggggataaggaggtgggcagcctcagggctggctaggcggaggcatcacttgggggaagaagggtaggtaatggaggttgtgcatggtgggaagatgaggagagagacttcagccaggtggtggttacagccatgtttccacacccaagacgagctcttcacctgacattttcctggtgtgagaccacaggctgagaggccaggcagggttcaccaggacactctgaaagagctgtctggctcccaggcccacaggccttcgagggaatagacacataagccttgctcctttttctcctggtatctgcccacacccatatcctggaaagctgcgtgatttatgtccaccagaggggatttgctctgaggctgtggcctgcaggagcgcccttccgctggagggtgggaggactgtctaaggcagtcacagcaaggagaggcacggtgtgggcactgctgctatttctaacctgctggagtgaagggaaccttgactacttgaaaagcaggctgattgtcaggggcggaaccgaactcagagctgtcagggccgtcacatggaaagtgcctggcagggggcggcgacagggggcttgggctgacagggctgtgattttgaaagaaacgtctccaagaaagtgatttaaagtaggagagaaatattattattagataatggctgtcaggttattttttgatgtgttttctgagtatttcataatcatcttgcgcttagatggtaagcccttcctggctaggggccgtgtcccatcccatgcctctgtggctttcaccttcgggtgtgcaacaggtatcaggaggtatttgctgtttggctaatggtcacttcagtggaaggttttataactaattctctagccttggttaataaactacaaatgtggatgagcacttagggcttccatctgaacacctgggcccctccaagcccacccaacaccagatgtagaactggcctcccccagcaggagcagcaggacagagtggccagggtctttattcaccataaggccatccatgtgatcccaggtcatggcctctccatccaacctgtctcctgagccccattttccaagcccctcggctcccacagcctgcctcacaccctaggctcagcatagccctgattctggttcagaaacacttttgagaatctgttccctcctttctgtgctgactgccaggactttaattcctaccgtgatttcagcaactctaaaacaccaacctcttaactggcctccccattgccaggcctaaccgtgctgactctgctgaggtctccctgccaattgcaggtaaagtccaggttcagtgtagtgttctgtcatggctggaccccactgctcgccagctcccttgggccctggcactgagcgccttctagccaggacatcctcacctctttggctgataaatagctacaagaaatgggagagagattttaagtggagcagactgcatcaaaatccccttccctcttttttcctgcccatctaggaagcttgatctgcccagggaagctttcgaagctgcctccagagaagactttgaactgcagggatatgcctttgaagcagcggaggagcagctgagacgaccccgcattgtgcacgtggggctggttcagaacagaatccccctccccgcaaatgcccctgtggcagaacaggtgcagactcttttgaccataataaatacacaaacagggttgtggcctgcccttggagcacacctgcaggccctggctggccgcatactccgggtctgcaggcttgggcgcctcaagcagtagcagaggcgcttctgccctggcctccccacatccctccagcctgcatctctggctcttctgtcttcctgttcttattctgtctctccctcctcctcactgatctttccacttctctccagctattgatctgaagctccatttaccaaccgggagggtgcccttttggcctgctcgtgctctccacgggacgctgcctctcagctgcctgccaggaggcggccagccagcacacgctggttgggaccgtctgtccgtgtgttcttctgccttaatcctcagggcggggactcgctatacccagaagtctgtcagttgtggtgcctacaggattacgggaatagataggcattcgcttatgacctcagagttagtaaataaaggtgacagcatcttgtatctccctaaagaaacatgttgtcacaggcgcaggtggtttgctttatacacttctccacagcattcctccagctgctcaaactttcagggattttcctgcacaggtttcctcaggatacggcgtgtttgaggattcttagggattctggagaaacctaaggcctcttggattccaggtttggttctgcatcatcattcacattggtccttcctttgcttttgttggattcacagatgtctggttctca

SEQ ID NO: 96524 - DNA, 15274 bp, Homo sapiens
ttctgcttctattgagataatcatatgggctttgtctttggttctgtttatatgctggattacatttattgatttgcatatattgaaccagccttgcatcccaggaatgaagcccacttgatcatggtggataagctttttgatgtgctgctggattcggtttgccagtattttattgaggatttttgcatcaatgttcatgaaggatattggtctaaaattctcttttttggttgtgtctctgcctggctttggtatcaggatgatgctggcctcataaaatgagttagggaggattccctgtttttctattgattggaatagtttcagaaggaatggtaccagttcctccttgtacctctggtagaattcggctgtgaatccatctggtcctggactccttttggttggtaagctattgattattgccacaatttcagatcctgttattggtctattcagagattcaacttctttctggtttagtcttgggagagtgtatgtgttgaggaatttatccatttcttctagattttctagtttatttgcatagtggtgtttgtagtattctctgatggtagtctgtatttctgtgggatcggtggtggtatcccctttatcattttttattgcatctatttgattcttctctctttttttctttattagtcttgctagcggtctatcaattttgttgatcctttcaaaaagccagctcctggattcattaattttttgaagcgttttttgtgtctatttccttcagttctgctctgattttagttatttcttgccttctgctagcttttgaatgtgtttgctcttgcttttctagttcttttaattgtgatgttagggtgtcaattttggatctttcctgctttctcttgtgggcatttagtgctataaatttccctgtacacactgctttgaatgcatcccagagattctggtatgttgtgtctttgttctcgttggtttcaaagaacatctttatttctgccttcatttcgtcatgtacccagtagtcattcaggagcaggttgttcagtttccatgtagttgagcggctttgagtgagattcttaatcctgagttctagtttgattgcactgtggtctgagagattgttataatttctgttcttttacatttgctgaggagagctttacttccaagtatgtggtcaattttggaataggtgtggtgtggtgctgaaaaaaatgtatattctgttgatttggggtggagagttctgtagatgtctattaggtccgcttggtgcagagctgagttcaatgcctggatatccttgttgactttctgtctcgttgatctgtctaatgttgacagtggggtattaaagtctcccattattaatgtgtgggagtctaagtctctttgtaggtcactcaggacttgctttatgaatctgggtgctcctgtattgggtgcatatatatttaggataattagctcttcttgttgaattgatccctttaccattatgtaatggccttctttgtctcttttgatctttgttggtttaaagtctgttttatcagagactaggattgcaacccctgcctttttttgttttccattggcttggtagatcttcctccatccttttattttgagcctatgtgtgtctctgcacgtgagatgggtttcctgaatacagcacactgatgggtcttgacactttatccaatttgccagtctgtgtcttttaattggagcatttagtccatttacatttaaagttaatattgttatgtgtgaatttgatcctgtcgttatgatgttagctggttattttgctcgttagttcatgcagtttcttcctagtctcgatagtctgtacattttggcatgattttgcagcagctggtatcagttgttcctttccatgtttagcgcttccttcaggagctcttttagggcaggcctggtggtgacaaaatctctcagcatttgcttgtctgtaaagtattttatttcaccttcacttacaaagcttagtttggctggatatgaaattctgggttgaaaattctttaagaatgttgaatattggcccccactctcttctggcttatagagtttctgccgagagatccgctgttagtctgatgggcttccctttgtgggtaacccgacctttctctctggctgcccttaacattttttccttcatttctactttggcgaatctgacaattatgtgtcttggagttgctcttctcgaggagtatctttgtggcggtctctgtatttcctgaatctgaatgttgggctgccttgctagattggggaagttctcctggatgatatcctgcagagtgttttccaacttggttccattctccctgtcactttcagagtgacaccaatcagatgtagatttggtcttttcacatagtcccatatttcttggaggctttgcttgtttctttttattcttttttctctaaacttcccttctcgcttcatttcattcacttcatcttccatcgctgatagcctttcttccagttgatcgcatcggctcctgaggcttctgcattcttcacgtagttctcgagccttggttttcagctccatcagctcctttaagcacttctctgtattggttattctagttatacattcttctaaacttttttcagagttttcaacttctttgcctttggtttgaatgtcctcccgtagctcggagtaatttgatcgtctgaagccttcttctctcagctcctcaaagtcattctccgtccagctttgttccgttgctggtgaggaactgcgttcctttggaggaggagaggtgctctgctttttagagtttccagtttttctgctctgttttttccccatctttgtggttttgtctacttttggtctttgatgatggtgatgtacagatgggtttttggtgtggatgtcctttctgtttgttagttttccttctaacagacaggaccctcgactgcaggtctgttggagtacccggccatgtgaggtcagtgtgcccctgctggggggtgcctcccagttaggctgctcgggggtcaggggtcagggacccacttgaggaggcagtctgcccgttctcagatctccagctgcgtgctgggagaaccactgctctcttcatagctgtcagacagggacacttaagtctgcagaggttactgctgtctttttgtttgtctgtgccctgcccccagaggtggagcctacagaggcaggcaggcctccttgagctgtggtgggctccacccagttcgagcttcccggctgctttgtttacctaagcaagcctgggcaatggcaggcgcccctcccccagcgttgctgccgccttgcagtttgatctcagactgctgtgctagcaatccgcgagactctgtgggcgtaggaccctccgagccaggtgcaggatataatctcctggtgcggcattttttaagcccgtcggaaaagcgcagtattcgggtgggagtgacccgattttccaggtgccgtctgtcacccctttctttgactaggaaagggaactccctgaccccttgcacttcccgagtgaggcaatggctcgccctgcttcggctcgcgcacggtgcacgcacccactgacctgcgcccactgtctggcactccctagtgagatgaacctggtacctcagatggaaatgcagaaatcacccatcttctgcatcactcacgctgggagctgtagactggagctgttcctatttggccatcttggctcctcccccccatctgcttcttaattcagttcttgctccttggttggagcacttaggtcctccctatggtggcatgctttgttcacctgggcatgctcaaggtatgcgaactttaacctgggggtccacggccgctgaaaaacaactcacaactttgttacataaaaattaaaccaagctgggcacagtggctcctgcctgtaatcccagcactttgggaggctgagatgggtggatcacttgaggtcaagagttcaagaccagcctgactaacatggtgaaaccccatctctactaaaaacaatttcattcctctaaccaaggcctacatccctaatcagcaggaagtactaaaaatacaaaaattagccttgcgtggtggtgtgcacctgtagtcacagctattcaggaggctgaggcatgagaatcacttgagcctgggaggcagtgcttgcagttagccgagatcgtgccactgcactccagcctgggtgacaaaatgagactctgtctcaaaaaaataaaaaataaaaacaaagttgaaccagattattctgatgcagttacaaatctcccccaccagctttgtttgtttttgtttgtttgtttgtttgtttgttttgaggtggagtcttactctgttgtccaggctggaggcagtggtgcaatctcagctcacttgaaccctcccgggttcaggtgattctccagcctcagtctcccgagtagctgggatcacaggcgtgcaccaccatgcccagctaatttttgtatttttagtggagacggggtttcaccatgtcggccaggctggactcgaactcctaacctcatgtgcaatcacttgagtcagaaacctcaaggagtccccaaatcagtccctcgcccaggcctgagtgtggcctggggtcctcagcaggctagtgccctgagggtccttggctgtcacactccctggcccctgcaggctctcactggcctgttcctggcctcagccctgttcccttaccagccacaaggaggtcggtgcctcttccccaggggccccttggggcctcctattaggtgacaggtgcccagacccttaggctccctgggtttccacactgccccctctgctccccatgtcaaagcccaccttctccactcagctccccatgggactgtacaggtttagttcagaccccgtcctaggcatcctccaggtacggactcacggagccccacggcagcatcatgcagtaggggctataatcaccccctttacagatgggcaaaatgaggcatggcaaagtcccctgggggagccaccctgtgtgtgtgtgtatgtgtgtacacgtgtgtatatgcatgtatgtgtgcatgcacgtgtgagtgtatatgcacatgtgtgcatgtgtgggcatctgcatgtgtgtgtgcatgtgtgttcaagtatgtgtctgcatgtgtttttaaaggaaaagggagaatcacaggattgttttgtgacgattattcttgtctaccaggacacgggtggcaccagtctgaggctggacaggcagttgctgggcagatgtctttgcaaaagtgtgtatattttttgtgaaggttgccatggcctttgcgcaagtggttgtttgcagtcttttgtgatagttttcatcaggttttgtgcccgaggactctccactcatggcctttcctgcctctatttgtcagagtttttaagaaaagtgactccatttggtttctgacaactttcacaggcaagactggctgggatctgccttcctcagggaggagacggaggttgggattcggaacctctcacctctgccctttgcaccctcctgggccttctctctccaaggcagctctggccacagcctccacccccactgcccccagcccctaccgccaacacccacgctgcgtatccagctgcctcactcagggcttggctgagtttagctgggcaccgctgtggcctatcattctcttgcttgtgagtcaaggggtcactttagcaattaggggtgggggaccccaaaagagtgagggagccggagggctggctgcttccctttatgtgaaactgcagaagagccaaggagctgggcctcggagcccccaataaaggcagtctgtgcagggtgaccaggactgtgtggtcagaggctaaacccacgtcacctcctattggccgcgattgctgtgctctgggtcaactgtgcattggtaccatgggggccgcactcgcaggcccaggccttcttctggcagggctctccgttgctctccctggatcaggagctgggggaagggggcgaggccaaccagaagcccagaccccccggggagagctgatcctggacaaggtttcccaggaggacaaggaagctccctggtgaaggtgcgctccgcgcaggcgctgtgcgggcagcccgggcactccatcagggcccccttatcctttaggaggagtcctccctgggcggtgctccagggctgtgggctggggcatgacggcccccagctgcgtagctccagcccctttccagcaggctggtgggcggctccgagtggggacctgggatcggaggggactcctcccgggactacccgctgccttcacttgtcccgggacgcagctggaccccgagtcaccgactgcaacccgcgcacgaccctcgggagcctgtctccgcggccgccaacccacgtccgcgctgccgccgctgtgccaggcggcccgagggtcgcagaaggaaggaggggagcgcggggcgggcgaagaagggtggagccgccatcgcgtccccctcctcgggccgacgggcgggcgggggtgaggcagaagaggcagagggcgctgagagacacaggcaacggcgccgctccaggtcctgccttgggtgggcacctgccggctaggtggccaccacagcggccacctccgccgcccttgcggccgctgcgcggagcctcctggcttcatctacttcctcgcggctcaggctgcggctcccaggcttcgctctcgggctccacggactgagcggcgcggctccaggactccgggcgcacccggccagcccgcgccccgcgagggggtgaaacttcacccaagtttgggttctggggagaacctgttgaagccgggattggcccggggcagagacagagacgagggtcggggagactgagccggtctcgggttctccatcagggccgtccagagggtgggctgtgtattcgccaccctggggcgttggcgcgcgccggtgaggaaggggcgggtgagccgtcgggccaccgagtagaaggagccagcgagcggggttggagtggtcgatcctgcggacttctgcgaggacaaagtttggttctttggccactttgtggagcgtctgtctgggtccagcgcggagagctgaaagtgctgcatagacgggcccctgaccscacctcctcacttcagcctcggctccttccctctcaccccacccggccttggctggggtaggtcgtggacaagaaaggcgaagggaagagggatggcctttcaatgaaggcccactacgtgccaggccccgtgcccggcccctcccgcttcccatcaaggccctcccaacccagggaccgacacatgtgtgcagggaggggacaggggagaagactccactgtgcacgcggggttcgtggccccgccgagccctcctcgtccctggtttccgcggtgaatgaggtccgcagctggggcctctgtacccagacctgcgtccctcctcatggtgcccgggagctccgtcaggctgcggcgcctcctgagcttgacactgtttttcccgcagctgcgtcccggggccaagcggaggcccacgaggaggccggcggccgcgcgcatcccgtagcccaggtggcccagggctgcaccgcggcggcctcggcgccttggagtcccggtattcgctgagggcgcactaccacgagttccaggaggtcaagtacttgaggcactgggggcctgtgcggggcctctctgcccctcaggcttctctcgggaagcagcgccaccggggctgggccgggctgcagctctggaacccgcgcgaggtgagcctgctgtcggggctggtattcgccgccggcctctgcgccatcctgggggctttgctggcgctcaggtacctggaccggtcgcggcgggcggcggcgcctgccccgagtgsaaggccttcgcgcgcgccgctcgcttcctggcggccaacctggatgccagcatcgacccgtgccaggagttttactggttctcagaggaagaggaggtgctagtgctggcgacggactaagtgtagcaggtgacccagctcatccactccgcaccccatagggacggctgcagatccgctagcccctgtccaccggcctctaggacctgtctgctgggtgggctttgaattcccacctccacctgtgtccggtagccacactgagggaggcagctgttgarcactagaatagaaatccagagccctaggttgacatcctggctctccccgctgctctrcattttctgggatgacctcctgccccttctttgtggggttgtctgggtcctgggtccagccacaggctggggggcacaggtgggggtggtgcccttggtggcccatatgcacgtctgtctggacatccactggcttcacctggcccgaggatcctgcacaactacctagtgtggcgcgtggtggtggttctgagtgagcacctgtccctgccattccatgaggcactgcaggagttggcacgggagacagagggaagccacaagctgcaggagctggccgaggtctgcctgggccaggccaaccaccactttggtatggcacttggtgccctctttgtacatgaacacttctcgactgccaaggtgggttaccctggtttaacgtggggaggctggtgctgaactgagggtggatccctcctgaggccatggtcctaacaaggggagccccacacgtccccctgcagccagtagcaccaggccctgctaaaggctcagcctattctgaggctccaggctgctcctccacaggcctcctcctccaggaagcctacctggtctgtcagcggaaggtgacccactccacgaagcccctgcccagccttctcagccttgctcgggaggcatggccttaagggatgtccagggtggttactggggcagtttccycttctagcctctgagcttattgtcgggggtgcagggcctggatccccatctccagsgtttcctcttggtgctcagaaccaagctctgggctttgtaagtggtgcctaaagatggggacactcctcatgccaggagcgatggaccagagtgaaaggctgctgggctgayccttgctccccgacccgactctgcaggtgtggcagctggtggaagacatcaagtatgtcctgggccagcgcctggaggagctggactgcacagacgctgagattagagtttaaatcagggaggactgtgtcccggccccttcccttgttgccagcttgaccctgccccaggttggtgacctgaagccacactggctgaagggagtggcaggctgtggcttgcctggcctggggtcctgagaaaggcagctcagggtgggccccggtgtctgccaggcaagaatggggtgttgggggcagatgccatctgggtgagggcagtgtgcatcctgcagccagaagccacccccactcccactcactgtgtcttgtgtggaacaagacaccctgtcacttgttcattcacccattttttctgtatttcctgggagccacctacagccagaccctgttctggtgctgaagggaggtgaagctcgaagcacacagcccaggccacagtgtgggtttggcctcctaatgccatgagtcctggagacagcgggaagtaggtaggtagggtggtctggcagccctggcaccccttggtttctcaccagccatggcccagacaggtggggctggcaggagcctgggcccagagttccagtgctgtgggaaagggtggggcaggtggtgacaacattaagtggagccttgtctttgtcatgattgcagcctgggctgggccagccttgcccacgtgtacacgcctgtgggtgtgcacacctcttcctggaggaggaagccgggggagggaccagtgccctgggccagccaggcctgggctgcatcttctagagcagcttgtacacttgagtttgaccccgttcccttgcacaggtagatgaagctccagggagagtctattctccagcagccctgggcacacccagaggtgtagcctcaaccagagggtttggtaacctcaggctgagttcaaaagtaaatgtgtgaaaaggcgtccaatcaatgtgggataaagcacattggggtggggtggagaaggtatcacagactccaggttggcaaagacctaaaaatccacccatagtagggtggagggaggtggatgaataggcgccccacacaccagactcaagagcatcattcaggacgtcaagttgtgcacatcccaggatacagcaattccatcccgggaaagtgtcctgcagaaacttggcacacgtgtcccaggatgtaagcaccaacgtgtgcaaagtggcattgtttaaatagccagacactgaaaaacccaaatgctcatcaacagcagaaaaagtgtcaggagtttcataactggaatattatacagcaatggaaatgaccaggcttttctaacatacaacagattaaatctcacaaacataaagttgaacaaaatatacaaatcacaaaggaacacataggatagaatatatcttacacatacatgaagttcaaatggggcaaacctaaactatatgggggataaaacgatgaaaagaggctgggtgcagtagctcacacctgtaatcccagtaactaggctgaggtgggcagatcacctgaggtcaggagttcaagaccagcctggccaacatggtgaaacccccgtctctactaaaaatacaaaaattagctgggtgtgatggcatgtgcctgtaatcccagctattctggaggctgaggcaggataatcacttgaacccgggaggtggaggctgcagtaagccgagatcatgccactgcactccagtctgggtgacagagcaagactctgtctcaaaaacaaaacaaaaaaactatgaaaataaaatgagtatccaaatattcagtggtggtcgggtgtggtggctcacacctgtaatcccagccctttaagaggccaaggcaggaggactgcttgagcccaggagttttaagaccagcctgggcaacatagtgagaccccatctttaaaaagaaaaagaaaaaaaattcagtggtaagaaagaatagtgttttcgatgggaaaggtatggggtggtgtgggggaaccctggccacaatcaatttcttgatctgggtggcggttactttggtgttcaattctgtaattcttctttaggccatacctttctgttttctgcactcttcatcgtgtgtgacatatcttaaaaacaaagacagaaaaaggagtgaacactatgcagtgatgcagtgtgatccggattagatgatgggttccagccatgtttcccattttcatcgcaatcagcattttccaaaatgtgacacacacttatttccaaagtgtggtactccagattaggtggtatggggcatgttttagctgccatcagacaagacattaaatagtattaaacttcacgatgagaaagttattttttagacaggatctagctttgtcatccagactggactgcaatggtgtgatctcaattcactgcaaccttggcctcccgggtttaagccatcctcctgcctcagcctcctgcggagccagtattttttgtagagacgaggtcttgctgtgttgcttaggctggtctcaaacttctgggctcaagcgatctggccaccttggcttcccaaactgctgggattacaggcatgagccaccgctcccagctggttattttttgattgtcttccaacccttctgataatgtcaaggagagaatctcagttggttctatgtcttcactatcaccctaactttgccatcccccctttaacaagataaagcatgctttagactcagagcatctaaggaggctgtaagaacattgcttttggtgtgtgtggaatacacagttgcttctgtttacggcaagagatagtggtcttccatttttcagttataggtttcctaacagatttaaggaaaatctgagcttatgtagagaaaaatattcagcaaatcataccacaggcagtaatgtggctacggcaaaaagttgtcaaggtgatacgtgactagctgagtgctaagaagcatggatttaaaagaagtaaattaaataggctttggatctgagctgaaattctctgtccaccacttactgagtgtccttcagaacggaacctctccaagccttaattccctcatctatgaacgaaaagaatgatagtcctgtcaacctcaagaaacagagggaggctctccaaaactatggagtttaactgggaataagcagcagcactgcatgcagagccccggccttagtaaactaggggcgcatcggaggaggggaggcaaggggggctttgaaaggtgaaaggagcagtgcatggtcggttttttgggtggtggtggtggtggtggtggtggtggtggtgtttttcttgagttgctctgttgcccaggctggagtgcagtggcgcgatcttggcttactgcaacctccatgtcctgggttcaagtgattctcctgcctcagcctcctaagtagctgggattacaggcacccaccaccaagtctggctacatggttattttgaaaggaagagaacactggttccaggggcttatcccaggagtggacgtcaatttacgagtggacacagcgtatcaggcaagtgttcttgtgcagccggctagccgtccttgtgactcacgtagtgagctgcaaagtcctgtaaagtcctggcaaaaggtcttgttgcaggcatctgtgcccttcccagaggcttcggaagggctctgatcataggcaggtgtgcgggagggccctccttcagaacctcccggccgcatgattttgttgttgctcttagggttggacagaagtggctccattctgattctgacaactttcacagagcctgggtctcggggctgttgcggggacttaattagtccagggcctgctgcagagttagcaggggagcagggggaagaggcgacccctgacctttatgaacacgaggcaagtcctgaacatccttgaaacctgtttccaagctgcgggtctgcacagcacacagttggccaaatggtagcggaagcagctccttcctagagcacaaatctctaaattcctaattaagggctgtgtaggcaggacctccctctgggccatcccacctaccaaggagggacatccaggcattcctcatgcacaggagaacttgggtcaggtacctggggtgggaacaagaagggactgtcccacccccaaggcaggagacaccccaacctcctccctatgggcttcctggggaggcctctcaacaggccattcagccccctcagcagcacgagcagggcactggggcctcagcctgtgggaaattgggggcacaggaacgggctcagtggagggggcgctcagccaggcgccccgggccccaagtgggctgatccttcaccatcgctgaggtggcaggggccaggcctccccttggcccaaggatggtggcacaggcaggggcacctggtaggtgggtggttcagccaagtcctagctcctggttgtcctttgagagtgcgggacgaaagactaaattctgccctgaatggtgctttgggcatctatatggatgcatggaaaggaaagcttatgaagtcaaggatgctgtaactgtattcagtggtttaaccttgatcttgtatcataagaaccaggagaacaattgtattccaacagcaccctggtgggttgaaaacctgttaagctgaatacactaatggagagtttctctttcctgttctattttgcacttcaatttctggtgctttttaaattatttggctaactaatttccaaaaccaagcaatacacaatttgtgaatgttaaagaacacaactcagttcatgatcctcgttgagtaaaacaactttctgaagtaaaataaattatttaaatggatgtttctcctaaaatgactttttaaatattaaaaaaaaatgccactgaactgtaaaaacccttaaaaagagagaaggttcaaagagatgatcttacaataagggtttaaattcagaacctaaactcaggcatgtgcaaattgaagctcatcattccaagaatcatctctcttctccagaaccttcttgaatgtgaaaaccatcgcatcctgttacctccaccagggctcagatcttttttttttttttttaaacacaattactttattgatttcttacaatcaaatactgccaactagaattccttccactcacggatcactaaaaacaaagaagacttccttggtactttcaaatgatgccttatacaataaagttagaacttaaaatgcaccctcattaattatgtaaactggtaatttgtgttaaaaagcataactaataatttggtttctttcttcataacacggaaatttaaatatttctcctgatggtcttgaggttatcaccgttatgagtagtgcacagtgcggcacatatggtttcatctggaaaggtgtgtctcacaccttatacaaaacgccagtaacaaaatgcatacatacgtcaacgcctgagacaaagcatgtttcaaatacgaagcagcccctcaggctgccataatatttaggttttgcatgatcacttatgacataacagattaattatacataacatacttttatacattttaaccctgaagataagaaaaataattgttgcttgaaaaaattctttcaggcagccatttggttggtgtcaagagaaactgaccctccacgagtttagtgtctgccaggtcggcatcatcagctcaagtcagtgaatcaggtatgtgacacgcttcacagcgactgttccccacatcctggcaatgcgtcttctcctacagtacaccagatgacgaggcatttccaggattacccttgcctgtggctttcccttttcattttttgttgctggattaactgtatgacttagtattatttcctcttctcccttcttctatggccttccattttagttactcataaatcctttcagaatatcctcagaaagctccataaagggaagctctggagatggaaaatctgagggaaaagattgggtattggaatgtacttggctttcctggcatctgctgcaaacctctgcaaggctgaagagggtatagca

SEQ ID NO: 96525 - DNA, 14677 bp, Homo sapiens
gtgatgggggctggcgggtgcagggggcacagcagggggagggcagaggtgtggggctcggggctgtgggctgaggcctggctctctccctccccacagggtgcccggtacgtgtggaaccgcactgagctcatgcaggcttccctggacccgtctgtgacccatctcatgggtaatgacccccttcctgccctggcatccctcagatggcctcagatggcaccttctgagcctgtgtgcacatccgccagcacccgcccacccccagcctgccagtcaccacaggaccccttgtcccacaggtctctttgagcctggagacatgaaatacgagatccaccgagactccacactggacccctccctgatggagatgacagaggctgccctgcgcctgctgagcaggaacccccgcggcttcttcctcttcgtggagggtgcgtggtggcccctggggagtgggggttgggggttggagcagggcaggctcagcatctcccccctctggccttcctgcaggtggtcgcatcgaccatggtcatcatgaaagcagggcttaccgggcactgactgagacgatcatgttcgacgacgccattgagagggcgggccagctcaccagcgaggaggacacgctgagcctcgtcactgccgaccactcccacgtcttctccttcggaggctaccccctgcgagggagctccatcttcggtaggcctggggagagtggcaggtgctgctgcagcaattaagtgggtgaaatctgagcctcagtctcctcctctgtcaaatgggagtaatgctggcaccagccctgtagggtctcctgaggactaagcccctgaccaggcaaaacgtggcggtgcctagcacgtgggagacactccacagctgtgttcagctcaaccacagggacccctctctctgcagggctggcccctggcaaggcccgggacaggaaggcctacacggtcctcctatacggaaacggtccaggctatgtgctcaaggacggcgcccggccggatgttaccgagagcgagagcggtgagtgccgcggggtggccccctgagggggaccagggtgccaaggatggggggctggcgggaaggggtcacctcctgtctgcctggaactgaatgaaccctcctaccggaactgaaccctccaaccagggagccccgagtatcggcagcagtcagcagtgcccctggacgaagagacccacgcaggcgaggacgtggcggtgttcgcgcgcggcccgcaggcgcacctggttcacggcgtgcaggagcagaccttcatagcgcacgtcatggccttcgccgcctgcctggagccctacaccgcctgcgacctggcgccccccgccggcaccaccgacgccgcgcacccggggcggtccgtggtccccgcgttgcttcctctgctggccgggaccctgctgctgctggagacggccactgctccctgagtgtcccgtccctggggctcctgcttccccatcccggagttctcctgctccccacctcctgtcgtcctgcctggcctccagcccgagtcgtcatccccggagtccctatacagaggtcctgccatggaaccttcccctccccgtgcgctctggggactgagcccatgacaccaaacctgccccttggctgctctcggactccctaccccaaccccagggactgcaggttgtgccctgtggctgcctgcaccccaggaaaggagggggctcaggccatccagccaccacctacagcccagtgggtaccaggcaggctcccttcctggggaaaagaagcacccagaccccgcgccccgctgatctttgcttcagtccttgaatcacctgtgggacttgaggactcgggatcttcaggacgcctggagaagggtggtttcctgccaccctgctggccaaggaggctcctggggtggggatcaccagggggattttgacacagccttcggctgccccccactaagctaattccacacccctgtacccccccagggggccctctgcctcatggcaaaggcttgccccaaatctcaacttctcagacgttccatacccccacatgccaatttcagcacccaactgagatccgaggagctcctgggaagccctgggtgcaggacactggtcgagagccaaaggtccctccccagacatctggacactgggcatagatttctcaagaaggaagactcccctgcctccccagggcctctgctctcctgggagacaaagcaataataaaaggaagtgtttgtaatcccagcactttgggaggccgaggtgggcggatcacgaggtcaggagatggagaccatcctggctaacacggtgaaaccccttatctatgcgcctgtagtcccagctacccaggaggctgaagcaggataatcgcttgaacccgggcggcggagattgcagtgagccgaggtcatgccactgcactgcagcctgggcgacagagcgagattctgcctcaaaaataaacaaataaattttaaaaataaataaataataaaaggaagtgttagacaatgtaatgccagtactacttcctaggaggaaaatcatgagtgcctgtgggcacagtgtctggaggggtggataacgcaggccaggaggggctgctgaggagcagatgattgagcaggagacctaaacagagtggggcttgagcaaggcagaacagcagtgccaaggccctggggcagcgccagcaggtgctctgggaggccaagggctggatcagagggtgggtgggtagaggggtaaatctgagggtcaagagggtgggtagtgttggggagtgtgaagtctgagtagagggatgtggttggaggtctttaaggagtgctgtgacccgccctgggtggaaaataagtattctggctgctgccagaagaagggtcttgtcttttgggtggatggtgggggtggtagagggtagcagggagaggtgagaactggggaaggaactgactccaggtgtttctgatctccgtccgaaagcattcgggagcacccatcccaacacagccatgcttggtgagtaccacacctgccccaaaagaacattgaaaagaattttttttatttgaggcagagcctcactctgttgcccaggctggagtgcaatgaccttgtctcggctcactgcaacctctgcctcccaggttcaagccattatcctgcctcaccctcccaagtagccaggggtcaacaagtgtgcaccaccatgcctggctagtttttgtatttttagtagagacggggtttcaccatattggccaggcaggtctccaactcctgacctcaggtgatccacccgccttggcctcccaaagtttgggattacaggtgtgagccacgtgtctggccgaaaagaattaaaggtgaaatcagccacattttccagcaaagtttacactattacaaaaaatacaaaaattagccaagcctcgtggcccatgcctgtggtcccagctactcaggaggctgtggtgggaggatcacctgaagtgaggagtttgagaccagcccagccaacatggtgaaactaaaactggtctaaactaaaacacggtctctactaaaactacaaaaattagccgggcgtggtggtcggcacctgtaatcccagctacttgggaggctgaggcaggagaattgattgaacctgggaggttgcagtgaattgagatcataccactgcactccagcctgtgcgacagagccactctgtcttaagaaaaaaaaaaaagcaagcattttgtgctcactagaaatattagcatgattgaatgcttccttgcatatgaaaattattttaacattgtaaaacatctatttggcaggcatggcggctcaacacctgcaatcacagcactttggcaggaagagcgggtaggatcgcttgagttcaggagtttgagaatagcctgggcaacatagtgagatcccgtctctgcaaaaacaacaactgagtccagggaggtcgaggctgcagtgaaagaagattgctccactgcactctagcctgggcaacagagcaagaccctgtctggaaaaatatatacatgtatttgaggacctggctctctcaggacagttttttttcttttctaattctaggttttagtggctgtcataaaaatatgggaggtgaacagaaggtagacaccattagctggccttactaaatcatcatactcattgttacattccatccaccaaatatgcaaaggttttggtaaaatccagctagtgtatttctatcttcccagttgtcagtgggttagaaagttcctctttctaaccaatgtggaggtgctgcatgtttaggttttacatgagtgctcacacccaaggacttctatattttaaaagtgaagacattttaaaaacagattattctggccaggagttgtggctcatgcttgtaatcccagccttttgggaggccgagacaggcagatcacttgaggtcagaagtttgagaccagcctggccatcatggtgaaatcctgtctctactaaaaatacaaaaattagccaggtgtggtggcaggcactcgtaatcctagctactcaggaggctgagacaagagaatcgcttgaatccgggaggcagaggttgcagtgagccgagatcgcaccattgcactccagcctgggtgacgagagtgaaactccatcccaagaagaagaagaagaaggaagaagaagaaggaagaagaagaagaagaagaagaagaagaagaagaagaagaagaagaagaagaagaagaagaagaagaagaagaagaaggaggagaaggaggaggaggaggaggaggaggaggaggaggaggaggaggaggaggaggaggaaaagaagaagaggaggaggaagaggaagaggaggaggaagaagaggaagaagaagaagaggaggaagaggaagaggaagaagaggaagaagaagaagaagaaaaagaagaagaagaagaggaaaaagattattctgaaattaggtcattctgttctcaagcttccttttcctgtgtaggtatgagtgtttatgagtctaatacattgtttaccccaaaatcaagtgtcaaataaatattttcaaacttctgctcaaaaatttgctctttccttagcaagagttttgttttgtttgagacagagtttcgctcttattgcccaggctggagtgcaatggcgcgatctcggctcactgcaacatctgcctcccgggttcaagcaattctcctgcctcagcctcctgagtagctgcgattacaggcacccgccaccacgcccagctaagttttggtatttttagtacccaaagttgatgagtcgacctgctccacgcgtaatttcaaggtggtcacgttggggtcaccccttgcagcttgtagctgctgtgaacgccagagaatgaagtactcagacaattccagctgagtggggcaggcggcaactcctctgagagagtgccgccccaaaatccatccgccaagtatttattagaaggcttgttaaaccacaaacatccaccagatgggtttttgccgtggggtcatgaggcacatacggccttgtaaaagcactcagaccacattcctaggaggctgttttcagcgctccttatcacacattccactccttgtcctgttttcagtgtcaaggagttacattctcacgcacaaacaacgtacacacagtgcctcagtatttttccatgcctcgagctcaaatgccttgtacataagtttgaatatatcgtcgtgcaccccccacatctcccccttctttaattcttagagcttgctggttatccaacgcaaaataagcttctatccttcttccctggtcatagatgcttcgggtggcagcacagagccatttacagaagcctagcaatcagatacaaaaaagaatatagcggccatcaccctagcaatcagatacaaaaaagaatatagcggccatcacccaaatgcgtatgtttaacccagacaaccaagtattcgggttcagtcattgaaagccttcttgtaattgctgaagggtatttgtttgtaattgctgcgagaccattcttcaagttgtttcttcaactagacctcaaatgctttgtacataagcttgaatatattgccgcgcaccccacccgctccccactgcctgccagagggctgggaaatggctgcaccgctgaacaccgcagttaccccggggaaattacttatgacctcctcccgcgcgctgccactgtgcgctccctcccctcccctgctttcccttcctctcctctcgcgcaccctcctcccgccctcagggacccctgggcaaggccactgcgccycgggtctacggcagctggcggggcgctcaacgcgcgcactcacacggacgacgtagcgcaaagagttcctgtcgtccaggctgaccataagcgagaagagcgcggcggcgctgtacacgccctgcacttttttacagcagccagttgaggtcccatcgcgcagcaaccccccggcgctccgccgcgccgcgcaggtcccagcccccgcagtcctcgatgacctccagcatgagcagcgggttcagtcgttcgatctcgcgcatctcgaggcacaagcggaagaaggagcgcacctagtgctgggcagcgccgccgggtccacccttgggccgagccagcaggcgccgcaggcgctcctcgttctgctagccgatggccgcgatggtgccgtaggtgagcttgtcgtcggggatggcatggcgccgcagccagccgccgcaggcgaacgagtataagtcctggcatgggtcgatgctggcgtccaggttggcggccaagaagcgagcggtgcacgcgaagtcttgcgctcaggacagccttcaggacaggctccgccgccggccgcgaccgggcccaggtacttgagcaccagcatagccgccaggatggagcagaggccggctgcaaacaccagcccgacagcaggttcaacttgcgccgcttccagagctgcagcccggcctgggcccggtggcctgcgggcagaaagtccccgcaagcgccccccgcgccgcagtgactcacatacttgacctcctggaactcatcgtagtgcgccatcagcgaataccaggactccatggcgccgaggccgccggggtgcagccctgggccacctgggctacgggatgcgcgtggccgccggcctcctcgtgagcctccgcgtggcccctggggcctcagctgcgggaaggacagaggcaggctaatgagacgccgcagcccgacggggttccggggcaccgcgaggagagacacaggcctgggtgcagaggccccagccgcgagcctcattcactggggaaaccagggaccaggagggctcggcggggccaccacccccgcgtgcacagtggagtcttctcccctgtccccctccctgcacacacgtgcgggtccctgggttgggagggccctgatgggaagggggaggagccaggcacggggcctggcacgtagtgggccttcattgaaaggctgtccctcttcccttcgcctttctggtccaggacctgccccagccaaggccgggcagaatgggggtggggggyggagaagcggaggctggagtgaggaggtggggtcaggagcgcgtctatgctgcactttccgctttccgcgctggacacagacagaggctccacaaagcggccaaagaaccaaactttgtccttgcggaagtccgcaggatctaccactcaaccccgatcgctggctccttctactcggtggcccgacagcccacccgctccttccccaggggcgagcgccaacgccccagggtcgtggatacacagcccaccccctggacggccctgatggagaccggctccgtccccccacccacccccattcccagtctgtgaccccgacccgagccactcccggcttcaatacgttctccccagaacccaaacttgggtgaagtttcacctcccgcggggcgcaaggagacgaagccgggaggctccgcgcagcggccgcgatggcggcaacggctgcagggattcggcgccatttaccccgcaggtgcgcactcgagcaggaccaggactagcgggcccgctcgaaaccagagcctgagcctgagcagaactgcgtgggcagccgctgtctcccagcgcccgctgccttttctgccgccgagctgccagcccgaggggtccagccgtgtcccaggaccagtaagggcagcgggtactcccgggaggggtcccttcggatcccgcgtccccattacgagctgcccaccagccggctagaaaggggctggagctacgcagctgggggccgtcatgccccagcccacagccctggagcaccggccggggaggactcctcctaaaggataagggggccctgatggagtgcctgggctgcccgcacagcgcctscgcaccttcaccrgggagcttccttgtactcctgggaacgcctgtccaggatgaggtctccccagggcgtctgggcttctggttggcctcgctcacttcccccagttcctgatccagggagagcaacggagagccctgccagaagaaggcttggggctgcgagtgcggcccccatggtaccaatgcacagttgacccagagcacagcaatcgcggccaataggaggtgacttgggtttagcctgtgaccacacagtcctggtcaccctgcacagactgccaataaagaggggtccgaggcccagctccttggctcccctgcagtgtctccaaaagggaagctgaggctgtgggtgagtgggtgatgccagtggtccaggcccagttccaccttgcacaaaggccttcttaacctttcatcgaaaaatatttctgcaaggacatctgcccagcaaccacccgtccatcctcagactggtgccacgcatatccttgatccttgtagccaaggataaatatctcaaaacaatcctgtgatcctcctccattttcctttaaaaacctttgtcttccttcacctccctaaattcacacgtgctttcctatggcctgcttattcccaagcaatacctatttccaaagaaagttcattttattttagagtctttctgtatttgttatgcagtgtcacatagcggagccagaagtgggaccgaagtgaattcatcttggatgaatcagcgtgtcctggaatctaacgcagtgttgactgagccccccgcagactgcctttccaggagttgcttttctgttctggtgaatctcctcaaatacccagattccctccctttggtcagttcctttttactttatcctggatgtgatttgattataaggctcccttaaacaaaggaccttgcatccctcctgagggtataaaggttgggtttctttctttctttctttctttctttctttctttctttctttctttctttctttctttcttttttttgcttctttgcttttggcaagcactttctggtgtaaagagcagtgcccttctggtttgaggactctgagttctaaagaatttatgttctgtccatgaggcaagtctttcctggtgaattcacttttggttctggatgcctgactgaatattatgtttgatgtgtacaccttggttgaaattttgtgagcattctgatttgggtttgattttggtttggtttcccacgtctttaaatgatttggctcatttttttttcttgcttgttcctgaacatcttctgatcatcccacagcaaaaataaacataaatagtttagcaccataggaaatgttaaaacacacgtacacacggtgagggtcggcccctcgaggtggctcctgtctgtaatccctgcactctgggaggccaaggtgagagaatggcttgagctaaggagttggagaccagcctgggcaacatgatgaaaccccacctctacaaataacacaaaaattagctgggtgtggcagctcccacctgtagtcccagctatcaggaggctgatgtgggaggattgcttgagcccaggaggtcgaggctaccatgacttgtggtcctgccactgcactaaagcctgtttaacagtgagaattgtctcaaaaaatacacatatggtgagtgtgagaaagccaactgaaagaacccagggtgtcaccaccatctaaaacactggtccagactcctgacagtccctgacagggtttataggattttctttgcttctcagagatgaaaaagaaatggaatggcattctcagacactaaggcgtgccagattttctgggactccaggcagctacatggctttccctgtgcacatttcaaaatcaatggccatcattggaatcatttgaactcctcaaatttgctttttcctaatactgaatttttaaactgccaactacaaagttaaatggagagccttctaagttgtctacttctgtctctctcttttctgcctacttggaatctgctgacatttctgctggcattaagataaactgataatatcacactccagccaacataaaaaccactaaggaaggggtcttgaagggctttcaaattaatggctctataaattacaacagctccgtggcaaacaacaacctagagaccttttggaaatgtaaattcaggtttgcctaacagttgcttcgggtgatggaacagtccacggaaggattgatattagaaaagaacagaatgagagaaatgtttataaatgttaggcacccagattaaacaggtcaaaatcatgagctcagagcaataatgaaaaggatctctgtttctggcataaaaactgcttctctgctacacaggggccaggaagagctgaacgaactgctaaaatgcttcccaccggcacggagctgtcaagcaactgagagtggcaaacagaagagaaatttgttattggacttttcaaaactgctaggagattttgtttcttgtacaaaatccagccagtcctagctaaaattaaacagttagtatttaatccctaatctcatttgaaactgaaaaaggataaaggtgggctcaaagagattaaaataaaaaccagaaaactaaactgcttgccaggcgcggtggctgatgcctgtaaccccagcactttgggaggccaaggcacgtggatcacttggcatcaagagttccagaccagcctgaccaatatggtgaaaccctgtctctactgaaaatacaaaattagccaggtgtggtggcgcacgcctgtaatcccagctacttgagagactgaggcaggagaattgcttgaatctggaggctgaggttgcagtgagccgagatcgagccattgcactccagcctggacaacaagagcgaaactccatctcaaaaaaagaaaagaaaagaaaactgttttacccaaagttttggttgctgccctcataagattgcttatcaagacaaatgacaattttttttttttttttgagatggagtttctctgttgtcgcccaggctggaatgcagtggagtgatctcacctcactgcaacttccgccttctgggttcaagtgattctcctgcctcggcctcccaagtagctaggattacaggtgcacaccaccacacccggctactttttgtatttttagtagagacagggtttcaacatcatgaccaggcttgtctccaacttctgacctcaggtgatatgcccgcctcggcctcccatagtgctgggattataggcatgagccacggggcctggccctgaaaatcttaaagtttagctttgggacctctcccattttctcagaaatctcatttggatccaactgtgttttataaacctgtgagtccacattacaatgttttgctgtctcatgactacaattctaaaatgaaagctataaggtcttatttgtgtttctgtctatgtatgtatgtttttgcatgtcgtatgtcgtgtctccaagttgaaatctggcatggtcagctagacatcccttaagaaattctatttggggtggctggacatggtggctcatgcctgtaattccagcactttgggaggctgaggcaggtggatcagctgaggtgaggagttcgagacaagcctgggccacatggcaaaaccccatttttactaaaaaaaaaaaaaaaaaaaattagctggggctggtggtgtgcacctgtattcctagctacacaggaggctgaggcaggagaatcacttgaaccagcgggggcagaggctgcagtgagctgagatcatgccactgcactccagcctgggtgacagagcgagactctgtcttaaaaaaacaaaaaaagaaaaaaaagataaattaaacttgttaaaatatatagtgagcagggcatggtggagcatgcctgtattcccagctactcagggggctgaggcaggaggattacttgagactaggagttcgaggccagcctgagcaacacagcaataccccatctctaaaaaaaatatgtatgtaggccgggtgcggtgtcaaacgtctttagtcccaccactttgcgaggtcaaggtgggtagattgcttgagctcaggagtcccagaccagcctgatcaacatggcaaaaccccatctctacaaaaaaaaaaaaatacaaaaattagctgggcttggtggcgtgtgcctgtagtcccagctagtggggaggctgaggcaggagaatcactttaattcgagaaatagaggctgcagtgggctgtgattgcaccactgcgctccagcctgggtgacagcgagaccctatctcaaatatatatataatatatatatataaaacatatataatatatattacatatattatatatacacacacagatatatacacacacatatctatgtatgtatatgcatacatgtatacacacatacatatataaatacatgtatacatatataacataaaaatgaacccaaataccttttagttcacatgatctaactatatctttgataaataggctagttttaaatgtgttgataaaataaaaataaaatatatttagcaccttcttttctttctttctttctttgtttcttttttttttttttaggcagagtcttgctctgtcacccaggctggagtgcagtggtgcagtctcggctcactgcaacctccacctcctaggttcaaggaattttcatgcctcagcctcctgaatagatggtactacaggcacgcctccccacccccggctaattgttttgtatttttaatagagaatgggccttgccatgtaggccaggctggtctcgaactcctggccttaagcgatccacccgcctcggcctcccagagtgctgggattacaggcgtgagccaccgtgcatgtccatctttagcgtttgcagtgtacattttccactgggtttgcgggtcagatgggatcatatgtgtctctgctagatgcctcaaggttataaaaccttaaacccaacctaaaaacaaagtgatctttgtttgtggagttctttgataaataaaactaatttagtattgctactttaatgaaaatagctctgtcttacaagttactggcaaaatatctatttatttaattttaagattcttaggtgaacatctgagagtcacaggctacaaaagttgtgaacaggaaaaaaacctgaaatgacgactagctttgtgtaatatctcagtattcaaaattaatggggatatagttgttaaaaatataaattaggtaactgtaaatggcataaatgtctataaataagcttttcatagaatttgagatttttttgtttgcttgcttgttgtttgttttttggcagattctctcactgtggcccaagatggagtgcagtagtgcgatatcggctcaccgcaacctcagtgcgagtgattctcttgactcagcctgccaagtagctgggactacaggcatgtgccaccatgcacagctaattttagggtttcaccatgttgaccaggctggtctcgaactcctggtctcaagaaatcctcccctcttggccacccaaagtgctgggattacaggtgtgagccaccgcgtccagtcggaatttgaaatcttttttttttttgagatggagtttctctcttgttgcccaggctggagtgcaatggcatgatcttggctcaccagaacctcggcctcctgagttcaagggattttcctgcctcagcctcccaagttgggattacaggcatgcaccaccaagcccagataatttttgtatttttagtagagatggggtttctccaccttggtcaggctggtctcgaactcccgacctcagttgatcggcccgcctcggcctcctaaagtgttggaattacaggcaagagccactacacccagccagaatatgaaatcttaaagtcaggttatgttacattaagtgacagatactcattaaatataggggtcatttccaaataagacacaaaaacataaattgccgaacataaatataagtgtgtttgtggcttcttaaaatctgatagaactaccaaatatattggggttgtactgatacacataaaacagtgatgtttctaaaattataaacggttttcatctgtaaaatactgatatgtgacggtcagttggcca

SEQ ID NO: 96526 - DNA, 38715 bp, Homo sapiens
  misc_feature (1)...(38715): n = A,T,C or G
catctctactaaaaatataaaaattagttgggtgtggtggcgcatgcttgtaatcccagctacttgagtggctgaggcaggagaatctcttgaacccgggagacggaggttgcagtgagctgaaatcacaccactgccctccagcctggacaacagaagcaaaactccatctcaaaaaaaaccaaaaataggccgggcatggtggctcacgcctgtaatcccaacactttgggaggccgaggcgggtggatcgtgaggtcaggagattgagaccatcatggctaacatggtgaaaccccgtctctactaaaaatacaaaaaaaaattagctgggtgtggtggtgggcacctgtagtcccagctactcgggaggctgaggcaggagaatggcatgaacctgggaggcagagcttgcagtgagccgagatcataccactgcactccagcctgggtgacagagtgagactccatctcaaaaaagaaaaccaaaaaccaaaaataaactataatgagataccatctcagctctattaaaatggcttattattattttttgagatggagtctcactctgttgcccaggctggagtgcaatggcatgatctcagctcactgcaacctccgtctcctggatccaagcgattctcctgcctcagcctcctgagtagatgggattacaggcactcgctaccatgcccagctagtttttgtatttttagtagagatggggtttccctaggttggtcaggctggtcttgaactcctgacctctggtgatccacccacctcggtctcccaaagtgccgggattacaggtgtgagccatggtgcccggccttaaaatggcttttatccaaaggacaggcaataacaaatggtggacaggcaataacaaatggtggcgaggatgtgaagaaaagggaaccctcatatacttttgatgggaatgtaaatcagtacaaccactatggaaaacagtttggaggctcctctaaaaactgaaaagttgaggttccacatgatccagcaatcccactgctgggtatatccccaaaaaaaggaaatcagtgtatggaacaggtatctgcactcctgtttgttgcagcacagttcacattgccaaaacttagaaccaacctgtgtccatcagcagatgaccaggcaaagaaaatgtggtacttacacacaatggatactcttcagccataaaaaagaatgagatcctggctgggcgcggtggctcacacctctaatcccagcactttgggaggccgaggcgggcagatcacttgaggccagaagttcaagaccagcctggccaacgtggtgaaaccttgtctctactaaaaatgaaaaaatgagctgggtgtggtggcgcgtgcctgtaatcacaactacttgggaggctgaggcaggagaatcgcttgaatccgggaggcggaggttgcagtgagccaagattgtgccactgcactccagcctgggcgacagagcgagacccttttcaaaacaaaacaaaacaaaacaaaaaaaacatgagatcctgtcaattacaacataatgaactggggattattatgttaagtgaaataagccaggcacagaaagacaaacattgcatgttcttatttatttgtgtatctaaaaatcaaaacaattgaactcatggagataagagtggatggatagttcctggaggctggggagggtagttaggggctggcagggagatggggaaggttaatgggtaccacacacacacacacacacacacacacacacaaagaaagaatgaataagacatactatttgataacacaaccaggtgactatagtcaataataatggtacattttaaaataacttggcagggtgcggtggctcacacctgttatcctagcactttgggaggtcaaggcaggtggatcacgaggtcaggagttcgagaccagcctggccaatatggtgaaacccctgtctctactaaaaatacaaaaattagccgggtatagtggtgggcacctttaggcccagctactcgggaggctgaggcaggagaatcgttggaacccaggaggcggaggttgcagtgagccaagatcacaccactgcactccagcctgggtgacaccaggagactgtctcaaaaaaataataataacttagccaggcgcagtggctcacacctataatcccagcactgggaggctgaggcaggcgcatcaggaggtcaggagatcgagaccatcctggctaacgtggtgaaaccccatctctactaaaaaaaaatacaaaaaattagctgggcaggggcctgtagtcccagctactcaggaggctgaggcaggagaatggcgtgaacccgggaggcggagcttgcagtgagccgagattgcgccactgcactccaacctgggcgacagagcgagactccatctcaaaaaaaaaaaaaataataataataataataacttaaaaagattgtaactggattgtttgtaactcaatggataaatgcttgagggtataggggaaaataaagaaccaaaaccccactctagatttacccaggaaacagctcctttaatgactggttcctcatttttttctccctcccatccaggcccggaggctgtttgatgtcctgcacgagcccttcttgaaagtaccctgatgaccccagctgccaaggaaacccccagtgtaataataaatcgtcctcccaggccaggctcctgctggctgcgctggtgcagtctctggggagggattctgggggtgtcaccttctggtggcccaggtgggcaccttcagctttctttagttcctcagtttcccgggggcagactacacaggctgctgctgctgctgcttccgcttcttgtcccggcctgtgggagcctcctccccagactctgaattcagtggcggccctggcatctcctcttggggcactgtctctggcatccggctttcctgactctgcttcttcctcttcttggtggatcccggagttgccctggcttcaggctgtccctcccctggcagttcaggctctagtggctgaattggctcagtcactgtgtgacctctctctttcttcttcttcttcttcttggtggatgtgggagctgcctgaggctcaaggtcatccggcagctcaggccccaccacctctgtctctggctccactgtggcatcttgctgtttttctttcttcgtcttctttttgggagctgccagagctgcctgggcctgaggcttcgctccttctggctgttgaggcgccatggtcccccctggggactccagaggcttcatctccggctccactggctccatcgcctccgtccctggctccatcattgccatctgtcccttttcttttttcctcttcttcgtagggggcagagggatggcttcctccagtggctccaccttcacctgtggctgagactcaactgtcaccccctcctctggctccatcccttccgtccccttttgcctctttctctttttggtcggggacaggactgtgtcttctagaggctcagtgttaatctgttcctgcttcactgtcttgtcttctggctcgaaggtttctttccctttgggcttcttcctcttcttggtggtggacgggaacagcactcccagaggctccagtgtctccactgtgggctctgtccccacaggccctgctgcctctggttctttcagctgctgattttttttcttcttcttcttccgcacatccatttctggcgaccccaaagccatgtccacctccagggccccgtgcccattcactgcctcctgagtgactggggcctctgtcacctgcatctcctttttcttcttccctgaggtgagcaggttgggggccaaggctgacctaggccctgtgactggtgggttgcccccaaaggcacagaaccgaggcctcaggccaggagggatctgtggtgggggacttgctgggatgggctgcagagggctccctgacagggattgctggggaccctcaaggatccttagggtgccctggggggctgaggcacaggtgagtccacctcctgcctccgttgagggggccagcagggtcgcttctccagcttggggacagctgctgaggactcgatagcggtgccgcttgcctgccaatttgcccttgacgatctgggagccagagagaggcacatgccgcccattgaagctacagagagaaacagggagggcagaggcttaagtggaacaggagagggaaggttttttgattttttttttgtttttttttgagagagtcttgctctgttgcctaggctggagtgcagtggcatgatctcggctcactgcaatgtccacctcctgggttcaagcgattctcctgcctcagcctctcaagtagctgggattacaggcacctgccaccacgcccagccaatttttgtatttttagtagagacaatttcactatgttggccaggctggtcttgaactcctgacctcaagtgatctgctcgcctcggcctcccaaaggatgggattacaggcaccagccactgcgcctggctggcctctggtttttaataaaacatgactagagtgactccatcttaaagtgagtagctaggcacttacaaggttcatgcttatggcctgaaaataaccacatcccaggctgaccaccaattataattacagaatatttatggccatacagaacatgttccaccaagcctgcagaatgtccaaatgtcctaagaatgcagcccccattacttaaatataacataaatgagcaagcttaggttgcaggattaatggtcgtggataacaccaatagcccctacctttagtgagcttatctgcacactccaagtttaactatagttccttatagtttcttataagtagaaatactaacaaagggctgtgggtttctccccctgctttctgaggacactctactctgtaaaggagtagtttccaataaacttgtttctttcactgtgctctgtgactcacctctaattctttcctgtgacaaattcaagaacccgctcttggggtctggaccgggaccctcttttccgtcaacaagaccactcaccattctggggcaaagtctgcaggggcctgaataagccacagctccgtatctggacccgtcagcgcctccaaggagaaacgaggggactctgaggctgggggcttcgcggtaaagttggggggacaagagaaccgagcagcatctgcagcagaaggggaaatggggtcgactgacacctccttgccggtccaatcttgcagggcgcgcctatcggtccattggtcttaacctcgtgagcactccagtcccctcaacctggtttctcctttctgcccacctgttccccaggggcgacctcaatttcaccgatccaacccctgggggcgccttgctctccacgggtagccccccacaagataaccctctctccgttcgaattcccgttcgcccactgggaatgcacgctcttcgcaagtcctgcttgcaggtacgcctccttttccgcccgaaccctctcggacgcccctttctccttccaccaacgcaccctccgcaccccgtcaacccgcaccctcaccgccggcctggggctcctccatcctgggacccacacctcaggcaaccctgtagcccgggctgctcgcaccaggttgcagaccacgtggatccaaaggggtagggcatcatccgggagcgcccaactggtgcgggagcgcgggggtaggcattgctcgactcccgatctgcaggaaaaactggggaaaatttcaacgtgtgcagagcagaaaaccgaggaagaagtctttttccgaaaaatgtattcccgaaagccgctgattcgctgtattgctggagtcagaggcccgtcgggtcccgatgggtcgcccccatcgtctgtccaatatggtttgttgcaacgcctccttaaaggggcagccacactgctcttcctaagccttaaagagacaggacggtcgattggtctgaaattcttgaagagacaggtaagaatactagttagtagggctgtgctttctgtgttaaatgtcttctggggaggcccagatgcctcacaagttcagaacttgactgggagaagcgggaaaatggagaaataggggcaatccgtccggagggcgtgaagttccagccaggggcggggcttctggactccgggggagcgggaaacatagggggaggagcttgtggttctcgagggcggagcctcggacccaggagccccacacgcgtggagtggtgctgggcacggtgtagcgtttgtggatcaaatgggacttgtagatgccctcgggggtttagtctcatgcgtgggaaacctcgatgactttcaggaagggrcctgatcggcgactcctccctgccccagggagcgtgtaaacagcggcacgtggacacagatttgggggacgcacccacttcccttcccactggggccgccccgcgttgggcggyggttggarccgcgagacggtggctagacagrgtgacccgactgcattcctggccagtgtgtcagcgccacttcccgccccctctgccaagatttaggatcctactccagaattggggcaccccttctccccaggtgggagaggctttccagagcggagggagggtcaaggggaaggggaaatgtttcccctatccaggatctccagacggtttccttcgcgtgggcgagagagacaccggggtgcagcccctgcgggctccaggactacaattcccacaggacccgaggcaaagagtcgcccgagggcggtcgcggaggctgctgggggttgtagtccaaactaagattttgaactcttgctgggacatcctttgaagatccaacccgcgctttttatcgacggggagattcgggctcagagaccctgggggatactgatcaggaaaggggatagtgcgcctgaaggggtggggcaagggctcaggagtcagtctccagccacagcgaggcaggcgtctcggctcttctgtatctccctggcctggtcgctctcggcttctgggcctcgcccttcctgtctgtgaaatggactctgggtgaatccaaatgggatcgtctygggctacgtcctgtccctccgggactacaagtcccaaggtgctcgaggcgaccttggctccccctccccaccgggacccgcctccctccagcccaagtcacgtcgtctaacctgttcccagctcctgccccgccccgttctccgctccccaagccggagcccgagctggaggaagcccccaggtgccaggatctgcccggatccgtgagtttcaccctcctggggaccagaggccctgaaaaagcccaacacccgcgtccctgggaggattgggaggggactcggacgccaggtcccagggcggaatttggggcgcgccgacacctggatccttagaaggaaactccgttgcctgttttactggagggaaggaaagcgggttcggatgcctgaattcttggaatggagggattctaccccttcatcccggggagacgttggagctggaattcctgagtccctcgaactggggggctctaggaagccgagtctttgggtagyataggggttcgaatccccgagtcttggtcagaaatgagaggctcagactggtggggctcaaggtggaatgggtgaccaccctgccagcctcaagctgctrtctcgaccgatcttctaggtctctgagcagaattaagggtggggcagggatagtggagcctgggttcctgaagtggagcaggacaggtacccggggtccctccggaggctgtgtcccggctctcccccgacttttcggctcggggatgggggcggggtaggagagaaaacaccgaggcagatctccaacctcctctgtgccgctgagcgaacccaacatgtcattaacctgggcgtcagacctgcctaaccagagaagggacatccgccctagggcaccccctggcggaggtgggctcccctaytgccttatggggtgggaaacagctgggtttgcakrggtagttctagaacccagggcagaattccggaaagcggctattggattctgggaggtttgcatagccgggcatttaaccattacacggagaggaaggggtaaactgaggcttggagctcacacaggcagtagagtttgtagggtcaggattctgcctcctccttcttctgcagctctctgggggacgggattccatccgcccccgccagattttctgactaaccttctgcctcagggctccttgccctgaccctgaggtgagaaatgtcacctccacgcccatctgtctgacctggggtattgtgggagataagggagggacagaggctaattctggaggtgtctgtctgtccttgaggcggggggagggcaggaccaggcacctccctctgtctatctccccgttctctcmacccccatgcgtcctaagaagggggattaaaaacagaatgggggaggcgagcatctgatgagagaggagtgtttcccaatgtctgggcttgaagggcatttgatgataacctgaaatgaaattaaaaataataaccgtggttgccaaaacagggctctgggtgtaccaagctcagagctggtaggtaggtaggtaggaaagctcgcattgtctagaggaatcttgggtgactgagaggtctccctttgaataaggtttgctgaccccagggaaggactcctcattacgagtggagaaacggaggctggagagtggatattgcccacaccctgggcttttgccagcttctgtctggaatcttccagggctctcccagccctcccgtccctaagtgactgagggtgatcactggccagactcaggaatgtacaggggaaatttaggactctgagaggcaagggctcaggaagttgagaccctgggtgtcaaaactcagggcttgtatgatctcagaaagagttgaaagggcccttttaggggaaaaaaaaattacattgagtctggacccctcactctgttgccagaccctgtgttattataatgaacagccaaggacatctggtaattatgaatcctgtatgtgtgaactttatttcgcgcactgcattgttctaatcacggcttataaattatgtcactcaatcctcatacccctttgaggcgaaggtattaattcttcccatggtccacatgaggaaacaggcacagagaagctaaataacaagcccaagtagaggcttagagcaagaaaggccctagcccattccatagacgtccacaaaggaggaaaccgagtcccagagacagtggagcctctccagattcagtgtgacccgacagggctgtagragtccagcctgggtgttcccagctcagtctggctctctgacccggttcctactgaagatgactcctccaggaagtccacaggatccttagccctaaagaacctggctggggtgcagaggaggccagggaaggagagccaggggtggagcggagagaggagcccaggggagagtacctgcggctggcccagagcccgcgggagagctcggagctagagctagaggggagcacatgggagaggactcggaggcagaggtcaggggcagaggcctgggaacagacacacggcccgcgccacccccgcgccccgcccttgtaccccgcccggcccagctcccttgccccgggatgtacagcacctgcccgggcccgctgcgcattccccgggcctgagctcaggcgcagtccgccctcctggcgggggtccgggcgtgaccgccccctggtggctccgacgtccccaccgcctgtccccgcgacagccccacacccagggttggcatttcctgagagccagagaatgtcagtatggaatctgagaatcttggaaatttggggatcatggcgccgtggctcacgcctgtaatcccaatactttgggagatcgagccggggaggatcccatgaggctaggagttcgagaccagcctaaccacaggcgcgagagagactaaatctctaccaaaagaaaaaaaaagagtcacttacagctggcattagggctgcacagacttgctcatttatctattttaacagttaacaaagtattgtttgtgtatctctgaaattctaaatgcccgagtttttattcctgtagtctcttcttcctgaggcctcaattctcagagctctgaattcttcctgcaccttctgaccaggtggattcttacagtagtcctatgaggtgaactttcatccccattttacggattacgagactgaggtactgtggtcagggttggacggtggtgctgccagatttgatgattttattttaattttttttaagaaatggggtctcattgtgttggccatgttggtcttgaactcctggcctcaagtgatcctcccccctcggcctcccaaagtgcaaggattacaggcagaagctaccatgcccggccctcagatttgaatttttgaagtctgacttcttactcatgcttttaccagctgcactataccatccatctagacttccagarcagtgcaaccctgggttaggtagaatgtggtacagaaagactcagaattctgggttagacaaattggagaattctagaatgttccaaagatagaatcttggactcaraactttccaacaataggctctttagctgaggggtttaggctctgtagaactttagttacagtcctaaggtccttacagtttgaaagtctggggctcatagagattaaaggggcctttcagaatagctgrtttggccaggtgtggtggctcatgcctgtaatctcagcactttgggaggctgaggcgggaggattgcttgagcccaggagttcaaaaccagcctgagcaacaaagtgagacccctgtctctacaaattttttttttttttttttttgggacggagtctcgctctgtctccgaggctggagtgcagtggcgcgatctcggctcactgaaagctccgcctccctggttcacaccattctcctgcctcagcctcccgagtagctgggactacaggcgcccgccaccacgcccagctaatttttttgtattttttagtagagacagggtttcacctgtgttagccaggatggtctcgagctcctgacctcgtgatcctcccgccttagcctcccaaagtgtacaaaatgtttttaaaaaattagctgggtggccgggcgcggtggctcacgcctgtaatcccagcactttgggaggccgaggcgggcggatcatgaggtcaggagatcgagaccatcccggctaaaatggtgaaaccccgtctctactaaaatacaaaaattagccgggcgtagtggcgggcgcctgtagtcccagctacttgggaggctgaggcgggagaatggcgtgaacccgggaggcggagcttgcagtgagccgagatcccgccactgaactccagcctgggcgacagagcaagactccgtctcaaaaaaaaaaaaaaaaaaaaaaaaaaaaaaaaaattagctgggtgtggtggtgcgaggctatacctatagtctcagctactcaggaggctgaggtgggaggaccacttgagctgggaggtcaagaggctgtagtgagtcacaattgtagcctgggttacagagcgagaccctatctcaaaaaaaaaaaaaaaggtgatttgccttcttctttgatgttggggagactgaggcccagggagtggagaggactcaacgcccaaggtcacacactccctgttcatccaaatgagccgccagcctgaacaggttctgttccttcgacttcccagacagaggcgggtatcagcatgccccagcctgccctgctgcctatactgccagagctaagtggtcgatgcagcagggaggtggcagagctggtgggtgtggtggctagcatggggatagggatggtgctggcctgaccggttcctagtggcctagctccctcccactgggccagtgaccacagctgcccctccacmcctggccacctccctgttcctcttgctaacaatgggtcagtgagagccagacctccactgaatggggaccctagggaaaggaagctgagcagtcgcttccctctaggacccctctaatctgrtagagatgacccagaataagttagatgcgggtgtgaaaccgattactaccgacttcttgcagggtgaccttgaacatatgtttctgagccatgctttcttgcctgctagggtggttttgaccatcaaatgaagctttcggtgcacggcatttctcaccactctagaagggagtggcccctcaattaatttttttttttttaaatagagcctcgctctgtcacccaagctgcagtgcagtgacacaatctatgctcactgcaacctgtgcctcccaggttcaagtgagccttgtgcctcagcctcctgagtagctgggattacaggcacatgccaccatgcccagctaacttttgtatttttttgtagagacggggtttcaccatattggccaggctggtctcctggcttcaagcgatccatccacctcggcctcccaaagtgctcgggttacaggagtgaaccaccgcgcctggctggttattgttgttgttgttttaaacatacttatttatttatttgtttgttttaagacggagtctcgcactgtcgcccaggctggagtgcagtggcgcgatctccgctcagttcaarctccacctcccgggttcacgccgttctcctgcctcagcctcccgagtagctgggactacaggcgtccatcaccacgcctggctaatttttggtatttttagtagagacggggtttcaccatgttagccaggatggtctcgctctcctgacctcgtgatccgccctccttggcctcccaaagtgctggaattacaggcgtgagccaccgcgcccggcggatattgtttttactacatttactacattataccccaagcagtaggcatgggttctagtacacagcagacagcagaattattattaaaaaacaaaaacaaggccgggcgcggtggctcacgcctgtaatcccagcactttgggaggccgaggcagatggatcacgcggtcaggagatcgagaccatcctggctgacacggtgaaaccccgtctctactaaaaatacaaaaatttagccaggcatggtggcaggcgcctgtagtcccagctactcgggaggctgagacaggagactggcatgaaccctggaggcggagcttgcagtgagccgagatcgcgccactgcactccagcctgggcgaaaatgcgagacaccatctcaaaaacaaacaaaaacaggatctagcacagtgcgtcctggtccctagtaaacattcagtaattcatagttattccatcctatgtttaccggcacattgtaggtgatcaatagataattgttcaaggagtgattcaggtcttaggactgagataaagagatggacacggccgggcgcggagactcactcctgtaatcccagaactacaaaaattagccgggcataatggcgcgcgcttgtagtcccagctaggcagaagatttgcttgaacccgggaggcggaggttgcagtgagccaagatcgcgtcattgcactcccgcctgggcgacagagcgagactctgtctcacacacatacmcaaaaaaaaaaaaaaaaagaaaagaaaaaaagaaagagaaagtgaattccggaggttttagactgggtttggacttctccgtggcgcatggacttggctttggaggagttggcatttcccagctggggaggtgaaagggtaaagggcttccaggggaaggaactgagttgaggcgttgtcccgctcctgacggcgtctgactccctgagggcggggtctagaggggcggggtmttagccagctccctccctccccaccatgcaggcgcccgctccggccggcaccatggacagcgaggcattccagagcgcgcgggactttctggacatgaacttccagtgtaagctggagtagggggcggggctggcgaggcggggacctcggcagcgggcgaggggtgctgaggccggcccctgccaggaggccaggtccttacctccactcccaccttcccagcgctggccatgaaacacatggatctgaagcagatggagctggacacggcggcggccaaggtggatgaactgaccaagcagctggagtcgctgtggtcagactctcccgcgcctcctggcccgcaggccggacccccttctagggtaagcctggttcccaccttgatctccaaagccagcctctcgccacagtccagaccagaggcctggatttcaggcaaaattgccccatatagttatgcaggttgtgggctcttcaagggaacttgaaaaaaggggaccaggccaggcgcgatggctcagacctggaatcccagcactttggaaggcgaggtgagagaattgcttgagactaagagtttgagaccagcctctacaaatgattttttaaaaatctggctgggcacggtggttcacgcctgtaatctcaacactttcagagacaggcggatcacttgaggtcaggagtttaagaccagcctggctaacatggtgaaaccctgtctctactaaaaatacaaaagttagccaggtgtggtggtgcatacctgtaatcccagctacttgggaggctgaagtgggaggatcacactaagccagggaggttgaggctgcaatgagccgagatagaaaagaaagaaagaaagaaagaaagaaagaaagaaagaaagaaagagagaaagaaagagaaagcaagcaagcagggagggagggagggagggaaggagagagagagaaaggaaggaaggagagagaggaaagaaagaaagaaaagaaagagagagaaagaaagaaagaaagaaatagaaaagaggggaccagtggaagtggacatctaaagggaccctcagaaggaaagaggtgtttacctaagtggcataaaggtgacatagagtaatgggctagccacagtgctgattcagggctgtctccccaccactactcacctgggctctctgtgcctgaatttccatggccggtcagcctcctctgggttgacctccagtgatctctcttgacacccccgcccacacaccaacccttccactaatgtctcctttgatccatccctcaatgccctggcctccccacagccgccccggtacagctccagctcgatccctgagcccttcggcagccgagggtccccccggaaggcggccaccgacggcgcagacaccccgttcggacgatcagagagtgccccaaccctacacccctacagcccgctgtcccccaagggacggccgtcgtcgccgcgcaccccgctctacctgcagccggacgcctacggcagcctggaccgcgcgacctcgccccggccccgcgccttcgatggcgcaggcagctccctcggccgtgcgccctccccgcggcccgggccaggcccgctccgccagcagggtccccccacgcctttcgacttcctgggccgcgcaggctccccccgcggcagccccctggcggaggggccccaggccttcttccccgagcgtgggccgtcaccgcgcccccctgccacagcctacgacgcgccagcgtccgccttcgggagctccctgctaggctccggcggcagcgcattcgccccgcctctgcgcgcgcaaggtgaacccaggggcccctcgcggggcctttgactcgcggggtcaaagcgggcaggatccggggctcgccacccctcccgtctcatcctccctggaaacttctccccagacgacctgacgctgcgccggcggcctccgaaagcctggaacgagtctgacctggacgtggcgtacgagaagaagccttcgcagacagcgagctatgaacgtgagtggtggaggcccggggaatggaggacccggaggagaggcagccccacagaccctaatgattcccgccccgcaggcctggacgtcttcgcaaggcctgcctcgccgagcctgcagctgttgccttggagggagagcagcctggatggactggggggcaccggcaaggtgaggaggcgacgcctggggaggagaggctggggaaggtcgaggagtggggtgggggagcggggtcaaggccagtctccccctcggggctgcgatctgggtctcggcgcccgttcccacgctctcccttcactgtgctgggtttctgctccttcctcaccctttcttctccctcactcccagggcttccctcacctcctctcccttctcgtcttttgtctttacctcccctccaccttccctctctcacccgatccccttctcccttccctcttccccaggacaacctcactagcgccaccctgccgcgcaattacaaggtctctcctctggccagcgaccggcgttcagacgcgggcagctaccggcgctcgctgggctccgcggggccgtcgggcactttgcctcgcagctggcagcccgtcagccgcatccccatgcccccctccagcccccagccccgcggggccccgcgccagcgtcccatccccctcagcatgatcttcaagctgcagaacgccttctgggagcacggggccagccgcgccatgctccctgggtcccccctcttcacccgagcacccccgcctaagctgcagccccaaccacaaccacagccccagccacaatcacaaccacagccccagctgcccccacagccccagacccaaccccaaacccctaccccagccccccagcatccccaacagacatggccccctgtgaacgaaggtgagtcagcaatgagggccctagaggactgggtgaagggaggacaaatggcagggggaccagaccagccctgggaggtggggagatcacagccaaatgcctctttacaagcactgtccctgcagagagctaggccaggtgagtttgggaatttgggtaggagccagggatagctcaaaggttaagtgtggaccctgaagccagactgcctggttccacgctgtgtgaccttgggcaagtcacttaacctcactgggcctcaattttcttgagtgtaaaagggaaataatgggccgggcacggtggctcatgcctgtaatcccagcactttgggaggccgaggcgggcggatcacaaagtcagaagttcgagaccagcctggccaatatgaaaccccatctctactaaaaatacaaaaattagccaggcatggtggcgggcgcctgtagtcccagctacttgggaggctgaggcaggagaatcacttggacccgggaggtggaggttgcagtgagccgagattgcgccactgcagtccatcctgggtgacggggagactctgcctcaaaaaaaaaaaaaaaaaaaaaggcaaataatgatagaatcgatcctattgacatatgttattaaattcatataaagcctttaaaacagcacctgatgggccaggtgcagttgctcacacctgtaatcccagcactttgggaggccgaggtgggcagatcacttgaggtcaggagttcaagaccagcctggacaacatgatgaaatcccatctctatcaaaaaaaaaaaaaaaaaaaaaattagctgggcatggtggctcaccactgtagtcctagctactcagcttgagccaaggaggcggaggtggcagtgagccaagatcatgccactgcactccagcacaggtgacagggtgagactctgtctcaaaaataaataaataaataggatctgatacatagtaagctatcaatagctaccatattagccaggcaccgtggctcacccttgtaatcctagcagtttggtgggctaatgcagacaggattgcttgagctctggagttcaagaccagcctgggcaacatagtgaaactaaaatagactttactaaaaataaaagtacaaaaaatctgccgggcatggtagtgggcgcctgtagtcccagctactcaggatgctgaggtgggaggatcatttaagcctgggagatccaggctgcagtgagctgtgatagcgccactgcactccagcctgggtgacagagtgagacccagtctcaaataaatagctaccatattagttataataatttattaatattttgaggtgtgagatcagtgagttaagcagatgggctggagtctctcttcactgctaacttgctgtgtgactgaagataaattacttgtccgaaactctgtttcccgtctgtgaagagagattaataatatctaccctatagaattgtgacggggattcaatgaaataatgtgtatgtgtgtgtgttttggggtttatttatttatttatttttgagacagagtttcactctttttttttgagacagagtctcgctctttcttccaggttggagtgcagtggtgcttgctcactgcaagctccgcctcccgggttcacgccattctcctgcctcagcctcccgagtggctgggactacaggcgcccaccaccacccccagctaatttttgtatttttagtagagacggggtttcatcatgttagccaggatggtctcgatctcctgacctcatgatctgcccacctcggcctcccaaagtgctgggattacaggcgtgaaccaccgtgcccagccaagatggagtttcactcttcttgcccaggctggaatgcagtggtgaggtttcagctcactgcatcctacacctcccaggttcaagcgattctcctacctcagcttcccaagtagctggggttacaggcatgcaccaccacacccaactaattttttgtgtttttagtagagatgaggttttgccatgttggccaggctggtctcgaacccctgacctcaggtgatccacccacctcagcctcccaaagtgctgggattacaggcatgagccaccatgctcagccgtgtgtgtgtgtgtgtattatttatatgtatatgcatactatataaaaatatatatacactatatatataatgtgtgtgtgtgtttgtgtgtgtgtgtgtatatatatatattttgagatgaaatctcactcttttgcccaggctggagtgcagtggtgcagtggtgcaatctcggctcactgcaacctccgcctcctgggttcaagcgattcctgtgcctcagccttccgagtagctgggattacaggcatgtgccaccacgcccagctaatttttttttttttttttttttttttgtatttttagtagagacagggttttaccatgttggccaggctggtctcaaactcctgatctcaagagatctgcctgcctcggcctcccaaagttctgggattacaggtgtgagccactcgactcagccaataatgcatatttttatttccacctgctttactgtcagaatgagtaagacagagaagaaatcattaaacaccaggattctacttcctgctggagttttctgcctgagatgttaggagaggaaactctcaggatctcagaaaatcacatctatcacggttggtagaagtagattctagagtcagccagaactgagttcaagtcccaactgcatggctttgggcaactgacttgtcctctctgaggcccagattccctttcggtaatgtggagatggcagtgtatctacctcacaaagcagtggtgagattacaataaggtaggcatgtaaagcgccaggcacatactaactgctcaataaatgggaggcatcataattgtatattattcacagcccaaggaaagtgtagcccagagagggcaaggaacttccctgaggtcacacagaaaatcawgtgctggttgtatgccctggaagttgtggagagggagtgttgggtgtctcctggggacctgtcctctgatgggctcttgttccggctaggaccccccaaaccccccaccgagctggagcctgagccggagatagaggggctgctgacaccagtgctggaggctggcgatgtggatgaaggccctgtagcaaggcctctcagccccacgaggctgcagccagcactgccaccggaggcacagtcggtgcccgagctggaggaggtggcacgggtgttggcggaaattccccggcccctcaaacgcaggggctccatggagcaggcccctgctgtggccctgccccctacccacaagaaacagtaccagcagatcatcagccgcctcttccatcgtcatggggggccagggcccggggggccggagccagagctgtcccccatcactgagggatctgaggccagggcagggccccctgctcctgccccaccagctcccattccacccccggccccgtcccagagcagcccaccagagcagccgcagagcatggtaagtaatacaggaggaaaccggggtatgtttgctacatgaatccaggagctgtagcaaagagccccccaaatatagtggcttagatgagatcgaagttttctcctcttttgagtagaagtccaagagtttgcagcccaggactgtaggcacctcactggagtcaggacccaggctctatctacctggggctctgccatccatcggggagtaagcctgccttcatggtcctagatggctgtcaccaagtctgccctccagccaggaagagagaaagaagaagagaaagtgccctttcctgtttcaggcagaacctgggagttccatacatcactctgcctgctcccactggccaggagcctcattgcaatgggatgctgggaaatgtagtctttaggatagctgtgtgtgactatatggagggccatctgggagtcttggccacatagagatgttctctgctccttctctccaataacctgtgcctgtgccctgccccgggcattccttcagcaatctcgagtcatacacctggacatgactgagtcttggcacaacagtgggttcattctgggactgagaagtcttgcctgaatcaaagcagtcaccctctcttctctccctctctgtctctgtgtctcttgtgtctgctctgctctctcctctatttttttttttttccaggcagagtcttgctccatcactcaggctggagtgcagtggcttgacctcggctcactgcaacctccgcctccyaggttcaagccatcctcccgctttagcttcccaagtagctgggattataagtgtatgccaccactcctggctaatttttgtatttttagtagagatgaggtttcaccatgctggccaggctggtctcaaactcctgacttcaaatgatccacctgcctcagcctcccaaattgctgcagttagaggcatgagccactgttcctggctttgctctctcctcttataaaatagtgagtctcggccgggcgcggtggctcacgcctgtaatcccagcactttgggaggccgaggtgggtggatcatgaggtcagaggttcaagtccagcctgaccaacatggtgaaaccccctgtctactaaaaaaatacaaaaattagcccggagcggtggcgcgtgcctgtaattctgtagcaggacgagccacagacaaaactcctcagacaccggattaaagaaggaagaggtttttattcggccgggagcatcagcgtcttaagagccgagctccccgaaaaagaaattcctagcacttttaagggcttacaacgctaaggggtccacgtgaaagggccacgatagatcaagtaagcgtgaggaacgtgactgggggctacagacatcagctaacagaacaaaacgttttacagtgctttctcatacaatgtctggaatttacagataacaccagtagttttggtcagggrttaatawtattattattattttaaccaccaggaccagatggtggcgccaaggtcatctagctatttatcgtacttctgtttttttccagcgttttgctttctccctttttttcctgtcttataaactagggaaaaggggaggtgggggagaagctgggaaggacaacaggagaagtggtggtctcattccaatcccagctamtcaggaggctgaggcaagagaatcgcttaaacccggaaggcggaggttgcagtgagccaagactgcaccactgcactccagcctgggcgacagagcaagactccatctctaaataaataaataaataggccgggcgtggtggttcatgcctgtaatcccagcattttgggaggccgaggcgggcggatcacgaagtcaggagataagaccatcctggctaacacggtgaaaccccgtctctactaaaaatacaaaaattakctgggggtggtggcgggcgcctgtagtcccagctactctggaggctgagaggagaatggcgtgagcccgggaggcggagcttgtggtgagctgagatcgcgccactgcactccagcctgggtgacagagcaagattccgtctcaaaaaaaataaaaataaaaataaataaataaataaataaaaacaagtgagtctcggctgggtgctggactccacctcctgggttaaagtgattctcctgcgtcagtctcccaagtggctgggattacaggcatatgccaccacgcttggctaatttttgtatttttagtagagatggggtttcactgtgttggctaggctggtcttgaactcctgacctcaagtgatctgcccgccctggcctcccaaagtgctgggattacaggtgtgagccaccacaccccgccaagattaaatacattaatgtagtgcttagcataatacctggcacataactgttaactgctcttactgttgtcaccattggaccaggggatggtctcctgctgatcttggtccctgcatcttgactgggaagagggttgtagccacatggaacagtcctgaacactccgtgtgcgtagacagcgggaagagatcacttctcagagaagcaggggtcaggtggacccccccaaaatgcctattcctaggccctcctgaaagtaaaggcaaggaaccttgaggctcaggattttgaaatcaagaggggatgaataacaacatgttgaaatggctgagcatcccattgtagaatcacagagtcctggccacagagaaacttaaaaaatcatagaatgtaagaatcaaacgctagtgtcaccgtcttaggatagtaacattttagagccctagagcatttaaaggtttgaacacgatcttagaattataaagttaggctgggcacggtggctcatgcctgtaatcccagcaccttgggaggccgaggcgggtggatcacttgaggtcaggagttcaagactagcctcgccaacatggtgaaaccccgtctctgctaaaaatacaaaaattagctgggcctggtggtgcatgcctgtaatcccagctactcgggaggctcaggcaggagaattgcttgaacctaggagacagaggctgcagtgagccgagattgcgccactgcactccagcctgggcaacagagagaaactctgtctcaaataaaataaaataaaaggaaactcttctcttaaaaaaaataattataaagttagtatcatagactgattattactgattcttgaagtcaccaaatctgacaattaaagatgctcatattttgaattataaaatcacaaattcatgcactgatatgttgtaatagagggttattattatcgagacagagtctcactctgttgcccaggctggagtgcagtggcaagatcatggctcactgcagcctccacctactgggctcaattgatcctcatgcctcagcctcccctatggctgggactacaggcatgcaccaccactcccagataatatttaacattttcagtagagacagttctcattatgttgtccaggctggtctcaaaccaggcatgagccactgtgcccagctgagatttatactttaaatttacacattccactatagagaaatacaccaacaccatagagagcttggggaaaataaataaaaatagaagaaagaggacaaaatcacaccactcacagggaaccatcattaacattttgaatatttccttctagtctttcttttttttttccttttttgagatggagtctcactctgtcacccaggctggagtgcgatggtgccatctcagctcactataactgtgcctcctgggttcaagtgattctcatgccacggcctcctgagtagctgggattacaggcgtgcaccaccacggccacctaatttttgtatttttagtagagacagggtttcaccacgttggccaggctggtcttgaactcctgcctgacctcaggtgatccactctcctcagcctcccaaagtgctgagattacacacatgagccaccgcacccagccatttccttctagtcttttaaaatgaaattctaggtcaggcatgatggctcacacctgtaatcccagcactttgggaggccgaggtgggcggatcacgaggtcaggagaacaagaccttcctggctaacacggtgaaaccccatctttactaaaaatacaaaatagccaggcgtggtggcgggcgcccgtagtcccagctacttggcaggctgaggcaggagaatggcctgaacccgggaggcggagcttgcagtgagctgagatcgcrccactgcactccagcctgggcgacagagcgagactctgtctcaaaaaaaccaacaaaaaaaagaaattctaacagaaaaatattaaagttctccatcatagaatctttggattccaaagtcctggcccctcagcaatttgaaatagcacagcctagcatttctgcaatcacaacatattggaaacttgaaataactgagcatctgggaattttgaattcagtggctgttgggatctctgaattccagaatcttaaaatcactgaaactctggaaacagcaaagaccagaatcacaaatgctatgcactcacacacttggaataaataaatgcatttttttttcttttgagactgggtctcactctgttgcccaggctagagtgcagtggcatgatcatggctcactgaagcctccttctcttccattcaagtaatcctcctgcctcagcctcccaagtagctgggacgacgggtgtgcgccaccatgtcaggctaattttttattttttgtagagactgggtctcactatattgcccaagctgttctcgaactcctgggctcaagtgatcctcccacctcagcctcccaaagtgctaggattacagacatgagccacctcgcccagcccagaataaatgaatcttacaggaggaaaattaaaaataagaaagcccatgaggctgggcacagtggctcacacctgtaatcctagcactttgggaggctgaggtgggtggatcacctgaggtcaggagttcgagaccagcctggacaacatgacaaaaccctgtctctactaaaaatatgaaaattagccaggcatagtggcgcatgcctgtaatcctagctactcaggaggctgaggcaggagaattgcttgaacctgggggatggagggtgcagtgagctgagatcacaccactgcactgcactccagcctgggtgacagagcgagactccatctcaaaaaaaaaaaaaaaaagagaaaaagaaaaggaaaatacaaggaataataaaatgctcaaattccaaacatccggaatgaacactcctggtaacattttgtcatgtgtgtctcattgcattcattattaacaaaagaaatgtgagactgtgtgtgaattgcataactggcttccacaatcattgttttgaactgatagaattactttgccaccaatcccatggccccccagctttctcccaagtttcagggcccaakattctcaaatcacaggattccctgtctatggcagggaactggaggctctaggaggagatcgaaggcaccccctcaccccatcccgagggaatcccagttctacccctgtctagatgggtgccacaagtccctggacctctgtttcctactctagatcatggatatactaacaatccctccaagtcgctgacctctgcgccctgtcccccaggagatgcgctctgtgctgcggaaggcgggctccccgcgcaaggcccgccgcgcgcgcctcaaccctctggtgctcctcctggacgcggcgctgaccggggagctggaggtggtgcagcaggcggtgaaggaggtgagcgctgctgagcgggaggtgggcacggcgggggcatcgcagatgccagccgcgggactgagtcttccccctcccccggtgcactcagatgaacgacccgagccagcccaacgaggagggcatcactgccttgcacaacgccatctgcggcgccaactactctatcgtggatttcctcatcaccgcgggtgccaatgtcaactcccccgacagccacggctggtgagccccgacccgcgcggtgggctgggtcccccgtgggcggacgcgcagcctctcacgcatcgttccccgcaaccccccacccccacgcctaggacacccttgcactgcgcggcgtcrtgcaacgacacagtcatctgcatggcgctggtgcagcacggcgctgcaatcttcgccaccacgctcagcgacggcgccaccgccttcgagaagtgcgacccttaccgcgagggttatgctgactgcgccacctacctggcaggtgcgaggcagggctgctggcgcctgggtacctggcgggtgcgcaggagcggggaggggagcaactaccccctactagggagagaagggtatgggggctgtaccaaccacttggcaggattgccgaggaggaggatgagggatggaccgcttgcgggggtggggggactatgccctcctaagggaaaaggggacatggaggctgtgctatgcgagctggacacctttggggaggagagtggctgtgaagattggtctgctcacctttcacatcttcaagggtgaggagctgaacgtttcaaccctgccatctacctggcatagggctctgggcaggtgggctctgccacttgtgggagaggcattgccacaccactggcaggtgagcaggctacagctgccagaaaggggcttgtaggaagacacaaggctgtaccctatctctccagggggcaggctacatcacctggttccccgacgggcagggcgaagtaggctgtgccacggggattgtgcacagggtcatttcacacctggaggagccagttgtatctcggtgtgggcaaggaacttcacggagagttggagtgaggcaggtcctaggacttatgggtgagacagagggttatatatttgaaaggtgagcctggtcaggctacaagacattgtagagaccccctgtctctacaaatatttatttattattatttttgagacagagtctcactgtcacccaggctggagtgcagtggctcaatctcggctcactgcaacctccacctcctggattcaagcaattctctgcctcagcctcttgagtagctgggactacaggtgctcaccaccatgcccgactcatttttttgtatttttagtacagaaggggttttgcggtgttgcccaggctggtcccgaactcttgagctcaggcaatctgcccaccttggcctcccaaagtgctaagattcaggtgtgagccaccacacctgacctctacgaaatatttatttatttttatttatttattttttgagacagagtcttgctctgtcacccaggctggagtgcaatggcaccatagcccactacaacctctgcctcctcggtgaaagcgattctcctgcctcaggctcccgagtaactgggattacaggcaagggccccacggcccgctaactttttttttttttttttttgtatttttagtagagacggggttttgccatgttggccaggctggtctcaaacccctgacctcagaggatccgcctgccttggcctcccaaagtgctgtgattataggtgtgagccactgtgcccggcctacaaaatatttaataataacataaagaatcaggaggaggctgaggcaggaggattgcttgaatctggaagttcgaggctgcagtaagcttgatctcaccactgcactcccgcagcctgggtggcagagtgagaccttgtctgaaaaaaaaaaagaaaagaaaagaaaaagaaagccaggcgcggtggctcatgcctgtaatcctagcactttgggaggctcgaggcgggcrgattgcatgagctcaggatttccaaaccagcctgggcaacacggtgaaaccccgtctctattaaaaatataaaamaatttagccgggtgtagcggcgtgggcctgtagtcccagctactttggaggctgaggcaggagaattgctggaacccaggaggcggaggttgcagtgagccgaaatcgcgccactgcactccagcctgggcgacagagcaagactccgtctccaaaaagaaaagaaaagaaaagaaaagaaagaggcagatgagccaacttaaaggaccctatcattcaaggaaggtgcgaatcttccttagagactgtaccacttaagctaagcgccagggtagggcaaaagactggacctctagggttgacacgggcattcagcaatgtacaagaaggaaatgagggccgggccaggtggctcacgcctgtaatcccagcactttgggaggccgaggcgggtggatcacttgaggtcaggagtttgataccagcctgaccaacatggtgaaaccccgtctctactaaagatacaaaaattggccaggcatggtggcgcacacctgtaatcccagctacttggaaggctgaggcaggagaatggctcgaactccggaggcggaggttgcagtgagaccgcaccattgcactcctgcctgggcgacaagagcgaaattccatctcaaaaaaaaaaaaaaaaaaaaaaaggccgggcgcggtggctcacgcctgtaatcccagcactttgggaggccaatgtgggcggatcacaaggtcaggagatcgagaccatcctggctaacacggtgaaaccctgactctactaaaaataccaaaaattagccaggcgtggtggcgggcgcctgtagtcccagctactcgggaggctgaggcaggagaatggtgtgaacccgggaggcggaggttgcagtgagccgagatcgtgccactgcactccagcctgggcgacagagcgagactctgtctcaaaaaaaaaaaaaaaagaaagaaaagaaatgggagcctctgaccctgcctcgggagtgggtggcccactggcatgcctcccccagtttcctcgaacgctcaaagacggccagtcccggcatctgactccagctccggttcccatccacagccatgggcacacacaacatttcaggtggttgctgggacaggcgccaaattccagggtctgtcctggaccccacgtggcccctgttcctggaccccctgggccaggctctcaccttcccctccgtggcatgtttcagacgtcgagcagagtatggggctgatgaacagcggggcagtgtacgctctctgggactacagcgccgagttcggggacgagctgtccttccgcgagggcgagtcggtcaccgtgctgcggagggacgggccggaggagaccgactggtggtgggccgcgctgcacggccaggagggctacgtgccgcggaactacttcggggtgagcccaggggagaagtcatggggacctcccgacagttgggggttggggaaaagggggatcccacaggaaaaagaagaggcaacaggaacaaaccgttatattgggagagggaggtctgaaaagctcattattgctcatggggaggagacgaaaagtccgttatatttaatagtaatgtcgggggtaagggtcccttatagttagtggagtaggtgaggaaaagccctttattttatttttaaatttctattatttttttatttttatttttattttatttatttatttctgaaacggagtctcgctctgtcgcccaggctggagtgcaatggcgccatctgtgctcactgcaacctcgggccccccccacccgggctcaaccagttctcctgcctgggattacaggcgcccaccaccaccacgcccggctactttttgtatttttagtagagacggggtttcaccatgttggccaggctggttttgatctactgacctcaaawgatccacctgccttggtctcccaaagtgctgggattacaggcatgagccaccgcacccggccaatttgtatttatttatttgagatggagtcttgctttgtcacccagactggagtgcagtgataagatgtgggctcactgcaacctctgcctcccgggctcaagtgatcctccctccttggcctccagagtagctgggatgacaggcgcatgccaccacgcacggctaattttttttttttttttgtattttgtgtagacagggtttcatcacgttggccaggctggtcttgaactcctgacctcaggtgacctgcccgcctcagcctcccaaagtcctgggattacaggcatgtgccaccgcacctggctggaagcgccctttataaagctgtcaggatgtagggtgctcgccagtactgccttactagttatttgattggtttctgctcaatccaatgtttttattatcatccctggttgtattggtggagaggttaaagaataatccattttagccaagggaagcgacaaagaagaatctcattttaatgatggtgggtgggttacagaattgtagattaaggctgggagagggcaaaagactggacctctagggctgacacagggattcagcaatgtacaagaaggaagtggagggcccggccaggtggctcacacctgtaatcccagcactttgggaggccaaggcgggcggatctcctgaggtcaggagttctagaccagcctggccaacatggtgaaactccatctctactaaaaatacaaaaaaaaaaagttagccgggtgtggtggcgggtgcctgtaatcccagctcatcaggaggctgacacaggagaatcgcttaagcctgggagattgatcctgcagtgagccctgatggtgccactgcactccagcctgggtgacaataaaaatatatgttatatataaatatataatatataaatatataatatatatttatatataatataacagatggagaggaagctttcattacactgcattgggcagaatgaggaaaaatccattaataaaattacagtgtaactgaggaaaattctctattagggttaggggagaaggcaaggaagattccgttacattcctgagaagggagatttttttattttggttttttttttctgtgtgtgtgtgtgtgtgtgttttgtttttggagacacagcttcagctgcgtcgcccaggctggagtgcagtggcgcgatcttggctcactgcagcctccacctcccggattcaagtgattctcctgcctcagcctcccaagtagctgggattacrggcatgcaccaccacgcccagctaattttttgtgtttttagtagagacagggtctcgtcatgttgaccaggcttgtcttgaactcctgagctcaggtcatccacccacctcggcctcccaaactgctgggattataggtgtgacccactgctcccggccctgagagaggagattttttaaatatggaggtgggacccaaaaagacaaccaaggtgttagagagaggtgggcttctccttatggcagttaggagacactggaaatattccatttcatcagtggaggctctgattggaaggttccatctggttcttggaggtgacacagaacttggattctggagcagtttgggaggtgctgagaggtccccttaggaaggggtgggaggatagagacaggcagcggatttgcatgtgggatgaggaggtgggagctcctgatgtctgaagatcctgtctctccccagctgttccccagggtgaagcctcaaaggagtaaagtctagcaggatagaaggaggtttctgaggctgacagaaacaagcattcctgccttccctccagacctctccctctgttttttgctgcctttatctgcacccctcaccctgctggtggtggtccttgccaccggttctctgttctcctggaagtccagggaagaaggagggccccagccttaaatttagtaatctgccttagccttgggaggtctggraagggctggaaatcactggggacaggaaaccacttccttttgccaaatcagatcccgtccaaagtgcctcccatgcctaccaccatcatcacatcccccagcaagccagccacctgcccagccgggcctgggatgggccaccacaccactggatattcctgggagtcactgctgacaccatctctcccagcagtcttggggtctgggtgggaaacattggtctctaccaggatccctgccccacctctccccaattaagtgccttcacacagcwctggtttaatgtttataaacaaaatagagaaactttccttataaataaaagtagtttgcacagaaattgactttcttctcttttgattctgttttgactcaatacatgctcatcattgtggttatgatttttggcaaggcagtctgaaagtagccctttcttcttcttcttctttttttttttttttttttgatctcactctagtgcccaggctggggcacgatagcgcaatctcagctcactgcaacctctgcctcctgagttcaagcgattctcctgcctcagcctcccgagtagctgggattacaggcatctgccaccccacctggctaatttttgtattttcagtagagacggggtttcaccatgttggccaggctggtcttgaactcttgacctcaggtgatccacacacctcggccttccaaagtgctgggattacaggccattagccaccatggccagcctgaaagtagccctttctaagggattcttttcacacaagtccaatcctttattttatatttcggattcttcttttgtgtcctttagtttcaagtacatgcctgataattctatcacctgaagtttggaggcagctaatcctatagtttgttgtgtctgctggttctcactcatggtgggctgtttccttgggtgttgaaattgtaggttgagaggccaggcgcggtggctcacgcctgtaatttcagcactttgggaggtcaaggcgggtggatcactggaggccaggagtttaagaccagcctggccaacatggtgaaacctcatctctactaaaaagcacaaaaattagcctggtgtggtggtaggtgcctgtagttccagctacttgggaggctgaggcaggagaatctgttaaacccgggaggcggaagttgtggtgagccaagattgcaccattgtactccagcctgggctacaagagcaaaattccctctcaaacaaacaaacaaaaatctctgccagcttggacaacatagggagaccctgtgtcgatcaaaaataaaaaaattaagccaggtgtgtggctcacgcttgtaatcccagcaatttgggaggctgaggcagatggatcacctgaggtcaggagtttgagaccagtctgaccaatatggtgaaacctggtgtctactaaaaatacaaaaattagcccgccgtggtggtgtgcacctgtagtcccagctacttgggaggctgagaaaggagaatcgcttgaacccgggagatggaggttgcagtaaaccgagatcacgctactgcactccagcctgggtgacagagcaagactctgtctgaaaaaaaaaaaagaaaaaaaaaattgccgggcgtggtgcctcacgcctgtaatcccagcactttgggaggccaaggcaggtggatcacctgaggtcaggagttcgagaccagcctgaccaatatgatgaaaccccgtctctactaaaaatacaaaaattagctgggcgtgatggcatgtacctgtaatcccagctactcaggaagctgagacaggagaatcactggaatccaggaggcagaggttgcagtgagctgagatagcaccattgcactccagcccgggcaacaagagcgaaactccgtcacaaaaatataataaataaataaataattagctgagcgtggtaatgtacacctgaggtcccagctactcaggaagccaaggtggaaggatcgcttgagctcaggaggtagaagctgcagtaagctgtgatcacgccactgcattccagcctctgccacagaatagactttgtctcaaaataatttttatttattttattatttttatttttttattttatttttatttttatttattatttattattatttttttttttttgcgacggagtctcgctgtttcgcccaggccggactgcattggcactatctcggctcnnnnnnnnnnnnnnnnnnnncattatctctctcatgatgaatcacggagtgcagaggtttggttttatttattatttttctttttctttttttttgagacggagtctcgctctgtcacccaggatggagtgcagtggcgcgatctcagctcactgcaacctccacctcctgggttcaagcaattctcctggcctcagcctcctgagtagctgggattacagacgcccaccaccacgcccggctaattttttgtatttttagtagagatggagtttcaccatgttggccaagctggtcttgaactcctgacctcatgatccacctgcctcggcctcccaaagtgctgggattacaggcgtgagccgccgcgcctggcctcaaaataatttttaaaaatgaaaaataaataaagaccaggagccatagctcacgcctgtaatcccaacactttgggaggcccaggcaggtggatcatgaggtcaggagttcaagaccagcctggccaagatggtgaaaccccatctctactaaaaatacaaaaaattagccgggcgtggtggtgggcgtctgtaatctcagctactcaggaggctgaggcaggagaattgcttgaacccaggaggtggaggttgcagtgagctgagatcgcgccactgcactccatcctgggtgacagagcgagactccgtctcaaaaaaaaagaaaaagaaaaataataaataaaaccaaacctctgcactccgtgattcatcatgagagagataatgattcaaatgaaatatattgctatgatgactgtttccaaattgctaacatagtttatgaccaatttttggtttgtcaaattcataatctgtgaatgtgaccttatatggtaaaagggaggttgcagttgtgctgaccttgaggatctgaaaatgagacaataatcctggagtatctgagtgagccctaaacctggtctccagtgttcttttttttttttttttttgagatggagtcttgcattgtcacccaggctggagtgcagtggcacgatctcgtctcactgcaacctctgcctcccaggttcaagcgattctcctgcctcagcctctcaagtagctgggattacaggcacctgccaccatgcccggctacttttttgtatttttttagtagagacggggtttcactgtgttggccaggctggtctcgaactcctgaccttgtgatccgcctgcctcggtctcccaaagtgctgggattacaggcgtcagccaccatgcctggctccaatgttcttataagaggaagattggataggaagacagagacaggccatgtgacacttgagccagaggctagctgccagctttgaaggttagggaaggggttccgagccaaggaatgcaaggtatgcaaagaatttggctctagaaactgaaaaagacaaggaaatgattctcccgtggagcctccctggagatcatagtgcaacctagcaggaagggccctcccactacccgcaaaccccactttagtttttttttcctctagtgatcgccattttttttttttttttgagatgagtctcactcatggttcactgcaacctcaacgtcccaggcttaaatgatcctcccgcctcagcctcccaagtagctgggactataggcaccacatcccactaatctctctctttttttttttttaattttccgtagagacaggatctcaccgtgttgccgaggctggccttgaattcctgggctcaagtgatcctcctgccttggcctcccaaagtgctgggaatatagacatgattcactgcacccaaccaacattggattgatattctcttaaattctccaactttttctcccattaagggacatagtgctgtttattagatgggtaatatcatagataattcgacttggaccatggagttcattcaaattgtgtatcttgacaattttagtattggctgatgtaacatgacaatctaggagagtatttccttggtatttaattcatgttctgcttggtttagcaattttataaaccagcctaggccttgcacagtggctcatgcctgtaatcccagcgctttgggaggccaaggcaggtggatcacctgaggtcaggagttcgagaccagcctggccaacatggtgaaaccccgtctctactaaaaataaaaaaataaaaaaaaaaatagccgagcatggtggtgggtgcctgtaatcccagctcctggggaggctgaggcaggagaatcacttgaaaccgggaggcggaggttgtggtgagccaagatcgtgccactgcaatccagcttgggcaacaagagtgaaaatccatctcaaaaataataaaataaaataaaataaaatataaaccagtcagtttcttcattagagttctggaaattcttacccagtccaaacaatatgatcctaaaatttatcagaaacctatactcaggctgggtacagtggctcacgctggtaatcccagcactttgggaggccatggcgggcagatcccttaagcccaggagttcaagaccagcctgggcaacgtggcggaaccatgtctctactaaaaatacaaaaaattagctaggcacggtggtgcacacctacagtcccagctactcaggaggctgaggtggcaggatcacttaagcctgggaagttgaggctgcactgagccatgttctcaccactgcacttcagctggagcaacagaagtgagaccctgtctcaaaaaaaaaaaaaaaaaaaaaagagagagaaaagaaacttttatgcaacagtgcttgtcagggtccttccatcctttctctctttctccctttctctctctctctctgtctctttctctctttctctctttccttctttcttcctttctgagacggagtctgttgcccaggatggagagcaatggcgcgatcttggcttactgcaacctctacctcccaggttcaagccattctccagcctcagcctcccaagtagctgggactacagacatgtgtcaccacgcccggctaatttttgtatttttagtagagatgaggtttcaccatgttggccaggctggtctccaactcctgacctcaagtgatccgcccgcctcggcctcacaaagtgctgggattataggcgtgagccatcactcctgccatggagctgacttttgtttttttcgagacagagtttcactcttgttgcccaggctggagtgcaatggcgcgatctcggctcagcgttaacctctgcctcccaggttcaagcgattctcctgcttcagccttctgagtagttgggattacaggcatgcgacaccacacccagctaatttttgcatttttaatagagatgaggtttcaccgtgttggtcaggctggtctggaactcctgacctcacatgatccacctgttccagcctcccaaagtgctgggattacaggcgtgagcccccgcgcccagccaggagctttctaaacaaaataaataagtaaaatattcagcatgtcacatggttaaatgagctctcaagaacaataaagcagggaaaggggatatagtgtgtgtgtgtgtgtgtgtgtgcgtgcgtgcgtgtgtgtgtgtgcgtgcgtgcgtgcgtgtgtgtgtgtgtctaggaggtagatttaatttggtggtcaggaagccctcattgagaaggagacttttttttttttgagacagagtcttgctttgtcacccaggctggagtacagtggcatgatcttggctcactgcagcctctgcctcccgggttccagcaattctcctgcctcagcctcccgggtagctaggattactggtatgtgctaccatgctttgccaatttttgtatttttagtagagacgggatttcaccatcttggccaggctggtctcgaactcctgatctcaggtgatctgcccacctcagcctcccaaagtggtaggattacaggtgtgagccaccatgccgggccgagaagttgacaattgagcaaagagctgagggaggtgagtgtgtcagccacatggctatcaggggaaacagcattccaggcagacaaaatagctggtgcaaaggccctgagatgggatgtgcttgtt

SEQ ID NO: 96527 - DNA, 14514 bp, Homo sapiens
attacaggcatgagccaacacacccggcccgtgttcagtcttttcccgccacattttctctctaggtgctccagtcttatagcattaaaagacgtctatctcccaatcactccagcatatttaccctccagctctgatccccaaacttgtatatccctaacctatgtgtgacctccacctagatatcttttttttgagcggagtcttcctctgttgccgaggctggagtgcaatagcgcagtctaggctcactgcaacctctgcctcccgggttcaagagattctcctgcctcagcctctggagtagctgagaccacaggcgcatgccaccatacccagctagtttttgtatttttagtagagacggtgtttcaccatgttggccaggttgatctcaaacccctgacctcgtgatccacccgccttggcctcccaaagtgctgggattacagaagtgagccaccgcgcctggccaggatgtcttaactaatatggctaaagtataatgcttgatttctcttcctaaacctctccccgaccccacaggttttcccatctcagttaaaagccaccaccaccgtctacccagttacagtcatgcgctgcataacaatgttttggtcaatgatggactgcatatatatatatatgattataatggggattgccggatgcaatggcgtacgcctgtaatcccagcactttgggaggccaaggcgggcagatcacttgaggtcaggagttcaataccagcctggccaacatggtgaaaccctgtttctactaaaaatacaaaaattagccgggcgtggtggctaatgcctgtaatcccagatattcgagcagctattcgagaggctgaggcaggagaatcgcttgaacccgggaggcagaggttgcagtgagccgagatcccaccattgcactccgtcctgggcaacaagagcaagattataatggggctaaaaaaaaatccttatcgccaggctcggtgataagcacttcgggaggccgaggctggcagataacgaggtcaggagatcgagaccagcctgagcaacatggtgaaaccccgtctctactaaaaatacaaaagttagtggggtgtggtggcacgggcctgtaatcccagctactcgggagcctgaggcaggagaatcgcttgaacccggcaggcggaggttgcagtgagccgggatcgccccactgcactccagcctgggcaactgagtgagactctgcctcaaaacaaaaaggaaaaaaaaacccgaaaaattcctatcacccaaagatggcatagctatcataacattgtagtgccatgcgttaccttttaggtacacaaatgcttacaattgtgtacaattgcctccagcattcagtacagtaccatgctgtagctgtacaggtttgcagcctaggagcacaataggctgtatagtgtagcctaggtgtgtagaagcctctaccatctaggtttacatcactacactctgtgatgtctgaataatgaaattgcctagcaacgcatttctttgaatatatccgcacgttaagcaaatacatgatcttacctaagacaaagacctaggagtaaccccttcatgttttctctccccaccaccacctcaaggcattgcctaaaagactgcttcagccccctgaatgagccctctgccttcattctccaaatagcaacaaaagcgatcttttaattttatctatctatctatctatctatctatctatctatctatctatctatctatctagagtctcgctctgtcgcccaggctgtagagcagtggcgcgatcttggctcactgcagcctcccctctcaggcgcggaccatcacccctggctaatttttttttcttttttcttttttatttcattgagacagagtctgggtctgttggccaggcgagagtgcagtggtgcgattacggcttactgcaacctcgcctcccgggttcaagcgattctcctgcctcagcctcccaagtagctgggattacaggcccacgccatcactcccggctaatttttgtatttttaatagagacagggtttcgccatgttggccaggctggtctcgaactcctgggctcaagcgatccgcctgactcagccacccaaagtgctgggattacaggcgtgagccacagcgtccggtccaaagtgatcttattaattattattattattttgagacggagtctcgctctgttacccaggctggagtgcagtggcgcgatctcggctcactgcaaactccgcctcccgggttcaagcgattctcctgcctcagcctctagagtagctgggattacaggcgtgtgccaccacgcccggctaatttttgtatttttagtacagacggggtttcccatgttggcaggctggtctcgaactcctgacctcaggtgatccacctgcctcggcctcccaaagtgcggggattacaggcgtgagccaccgcgcctggccccaaagtgatcttttaaaacatcagtcagagaatataactttgctgatgaaaatcccccactggcttccaattgccgttataatccaaattccttcaatactctccaagatcctgtgggatgggctacgcctgactctccaatctgatctctgccactctgcaaatcctccatcccgagttcgccggacctctttctccagctcccaccagcaaatagctctcctgcctcagagcctgtacttgcagatccttttgcctggactcaaggctgctgactacgctggcatcaaatatcacttcttcatagaggctgtctcttaccacccagagtaaagtagcccttcactttcaagtcatcgccatgacctttttgttgttgttgttgttgttgttttcttcccacagccttataaccatctgaagctatcttatgttattttttgctttcgtagttattgtctgtctttccctctgtaatataagcttcaggaaagcccagacccaatgtactccttacagtactcggcacacaggaggcaccccataaatatgggctgaccgaataaatccagcagctgcgcacacaggcatatagatagatgcactttttttttttaacagtttccttctggaggccacggttactacttagcgctaagaacagagcattggcagtcacagatacaatccgaggacgagacagagacccagaccctggcgcaaataaaacaggttgaaagaaacgggagggacagctccagggtgagttccagagacagagacccagatagactaaggccgagacccagattcactcagcgaacctgagccccgagcccacaggccccggcagcgaccgcggacagagccaggaggaggcgagcggtgggaggcggagcgcgccggaagggagcggaccgcggggagccccgccgccccgcccagccggcccgccccgccccgctcacaagtggtcgccgcaggtggctgtgcgcccacccgcccgccctcgggccgacgcgtgcgggatcaaagcggccgggaaggggcggggaggggaggtggcaggaacctggaagtgtcagcgagcttcccaggggatggcaggagcgtgggagcgcagagtcccgggaggcgacagagactcggagagacgacgagataccagagacccgagagagccagaggcggagatgcagacgccaagacgcggagagacgcggaatcagagatgcggagggaggagaccaccaacaccagagagacccagggcagaagtcgctgaagatctggaaaaaacgtgagagatacagagatggaggagctaagagacactcagagacccggaaaggaggcgagacaaaaaaggcatagacccatagacttaagaaaagaaagcgtgcttcagagagaacggaaaataacagaggaagagaggtggaaagaacaagggatgtagagtggggggcggggagacctggcccttcccccgcggggggccgagatccgagcactgtgtcctttctcagggtcacgcctgcggaggtgcgggccggggacggagggaggggggtgtggaggctgcaggacccccatgctgggaggaggggagtgcgagggcgtgcggaatcgtttaggcctggggctgcaaactctgctatagtcaaaaggttaagattaatatttggtagaaatatttaagtgaagatgtttcttagaaatgctaccaaatatattatcctttttttggaggggagaaaagaaaactgtactcgtgcattggccgggaatcgaacccgggcctcccgcgtggcaggcgagaattctaccactgaaccaccaatgcgcggcttaaagattctgcggggatcctatctgagattgtaagaggttgaggcggacccggacaggcaacggtgtaggccagggaagtggtcccgaatggttgccgtgggtggagcgccaagtcatccttcctctcgtccggatccggccaccgggccataaagccgccccatatggccaggggcggccccacacccgggtgcgaacagccgggggcccccagcctcgcgtgcaggtgagaaaaattcagcccgagcccaggttcccaaggaggggggcggcgggggctgatggggacacacatttgcgttcccatttggctgaaggacggagaggtgggatgtgctgggggccctgatcccaaatgggagccccctcctcaaggtctgtgcctctcccggctcgggctatgatggcaagaaaggcttcgtgacaaaaccaaggtgcggagggccgttgggagggcttgaaggaaaccccattggtctctgatttcacagctgtcttccgtctcggtctgcaaccctgtctttccgtgtctttatccctggcaacctggctgttcccttcagtttctgatttatcttctcagacactttgtcctgaagccctcgagtggtcaggcatcgttctgcggagggtcatgctcttggtttgaggtgggtgttgatcccttttttgtaccccttgctttccccttagtaaactgcctgctccctgctaccctacagtcaccaggggcctccagaagcaagcaatgcgggcacacttgcgtgaggtgtcctatcagccacactcctgaatctcctatgactagttttgaatcaaatacttgtactgtaagtggaaagacctctccactcatacctatgtttcaaagacttgctccctctgccttgaagatcctcctcagtccagccatccttaaggagaccttttcccggagcacctacttcactgggcttctgtaatagctacttggtgtcacatggtcttttccattagatcctgcagggataagctgggtctctcctgcgtatctcactatgactcgcccgagcctagacaagtgccctgtccgcagagtgggcgcgcagatgttcgcggacttgaatgtaactggcttagatagaagagagcgcctctccaacctcccggcagagcttcggttgagtcggacagattcacccagcgcactcgggttgctccctgtctcgactaggaagcgaacttcggagatgatgtataaaattcagcctgggggctgagaggtgctaacttctatttcagggttagtgagggtacagtaagcctcccagaaagctgcaattctggaggaactctgaatttcatccccaagcgagctctgccccaatagcctcctcctttcagctgggtcccgcctccttatacagccttatggtctgtaaaccagccagtgcccccattcacccctcacttcccgcactccaaggccagtttctctccttcccctccccccttcactcctcctctttccgggagcctcgtgccgggtcctagaggggcagaatctggatgtcgaagggggcggggtcgggtcctatccctcctacccttgggccgcggaatataaggctccaggcgagcagggaaccggtccacacagggtccggaggagcaatggtcacccgggatcgagctgagaatagggacggccccaaggtgagaggcgggaggggagggagcagaggtccctggtttggcyaggggactgggcccctgacgccgtcggtctggagagaggctggggacgcaggggtggaaggggagcggtgctccagaactccaggagccagaagctggagaggaagctgcaaaatatgaagaaggggacaggggtcagagccagacctgagtgggcggcgggaacataggactaggggcctcggtaatgggtgtcggcaccttgtggcctggggagggggccggtgttggagtaaaataagcaattagagggcagagccaagggaggagggtgggaacgaaaagagaagaggataggcacttgctccactctggctgtgagccgggcggggctggcccaaggcggtcttgtacagaaggtcccggggcgttggttccagaggccccagactggtggaagattttaggagaaccgtggagaaggtgaaggcctggagggttttgagggaaaagaggcggcgcggtcgcgctaggtatctccctttctatactcagggccgccaggtctgagcccggcaccgtgcggcgcacgtgcgtgcgcgcagagagtccccaaagttctccactgagacaaagagaaactgcaccagacggagacgtagagagaaaagaggaggagagacacagagaggggaggagggaggacgagactgagagaggagaatgcgaagatccggggaggcgagctacagaaactgatctaggggcattgggagggggagcggagagggatcgaatgggkccggccctaggcaatctggggtcttgtggccggggtggaagccgggctctcccagcggcgggatccgacgccggggcggccgcactgagtctcggtctggtcggcccgctctccttttctcgctggtcgcagatgctcaagccgcttgtggagaagcggcgccgggaccgcatcaaccgcagcctggaagagctgaggctgctgctgctggarcggacccgggaccaggtcagtccctccgctagccctaggtccccaagcttcccgtttccgcgtcccagggcttcccactggggtggggacacaagcttggttggcaaccctggccccaaggcatcctcacccgagtcccgcctttggaattccatcccagacccccactcgctctcagaacgcgatcttcttcgccacccctcgggtctgtaagtttcacgcctggttctgtaaatttcgctcccggggtcggtcagtttcaccctttgggtctctaagtgtccgsttccccctcccccacagccagcctctgatgagccagcctctgttatgtcgggtggttaatttcattccctgggttgcggtttcaaatctcctcctcackcgttgggcattggttccaacccctaggattggacagtttcgtctcagggtgggccaggactttccttggtcatctccactccgcatttggtcgcgcgttctgtgggcagtgcgcaaatgcgatcgggggcaccaccagctcccgcatccgtccctcccttcttccccctgccactttccccctttctccccacccctttctgtctctgcgccctcccctcccgtctgtagaacctccggaacccgaagctggagaaagcggagataytggagttcgccgtgggctacttgagggagcgaagccgggtggagcccccgggtacagcgcgggggtggggcagcggagggagggaggggggacgccaggaggctccggccggggcagagtgggcgggccctgcggtggatggtgggcttggggagtggccggttctgctccgaggcgaggttaataacacccgcgcgtgtctgtctctgtgtctccctcattttctccctctttccgtccatctggcttcctgtctctgtgcgcctgtccggccttggtatctctgcgccccgccccttccctcacccctgccgggcccctgccctgcccacctgtgctcccgccggccgcaccagccgccgcggctccaggggttccccggtccccagtccaggacgccgaggcgctcgccagctgctacttgtccggtttccgcgagtgcctgcttcgcttggcggccttcgcgcacgacgccagcccggccgcccgcgcccagctcttctccgcgctgcacggctatctgcgccccaaaccgccccggcccaagccggtagatccgaggcctccagcgccgcgcccatccctggaccccgccgcaccggcccttggccctgcgctgcaccagcgccccccagtgcaccagggccaccctagcccgcgctgcgcatggtccccatccctctgctccccgcgcgccggggattctggcgcgccggcgcccctcaccggactgctgccgccgccaccgccgcctcacagacaagacggggcgcccaaggccccgctgcccccgccgcccgctttctggagaccttggccctgagccttggggggtggtgggggcggggtctaggggtggggtagagactccagcccgagggcagcagagggacccgggcgtccgggcgagcaggtgttggggagggcagtggggcgcgcgggctcagcgcgcgggtgagatgtggtctatattagagtatctatataaatatatatttccctggttcctgtcccttttccctgccccaacttctcccttgcgtctaggattgtactctctctgcccctcagcccagtcccagtcccttcccgagtccctagtgcatggaataaagtggttattaaatccccgtgtgtccccgagccaggggcctgcctttatctcgacgtccacgcccactttcccttcccttctgtctcccaccctcagtcctgctctccatggcccaagccccggggcagacaggtaagtaaagaagagagcagagcgggaactgagatcgaaattgaaaccaggtggaaagagagagatagggtagggggagaagggatgggggcctttaagaaaaaaacggataaaaaggaaaaattgaaataaaatcgactctggtgggattcgaacccacaacctttgaattgctctattcgtcactagaagtccaatgcgctatccattgcgccacagagccacccggcgaacggcggcgtcttgttgcttacgggtactagagtgggaatggggcagggttggggagcggggctaagggacttgggcgggacatgccaggagggcgcggtttggatctcagaggccaagccaggtagaggtagcgggcgcaaagcatgttagccaggtgagagagagggcgcacatgggtcgaaaaaacagggagggagagcaaccgaaaatggctgagcgagcgagtgcagagctccggctgcccgcttggggggtgtttccggctcaggcgctccccactcccagatatagtcccacccaaataaactagttttgttgtaaatttctgtgtgtttttgtctcttctcgtttatctgttctgccatctgctgctatgcggtccacagtctcgatggttcttcatttccagtctaaaagatgtggaaaaggagacgaatcaatttggcactcttaagctttgccccattccttacttctagtctcttaggaggacaacggggacagtaagttttcgtgcaggtagcgtggccgagcggtctaaggcgctggatttaggctccagtctcttcggaggcgtgggttcgaatcccaccgctgccaggctggagtttttctggtggattacgcacctgctacagttctgttaacagttctgttaggttacacctatttacatgcagaaagtaattttacgaattcccctggtaatggtttcaccatcatcttccgtgtttggtcttccagagagatcataggcctgcatccatcccagaagctaagacctgatggtaactgctgaagcaatatttcgtttcttcataacatctctattatttcgtttcttcataacatctctattttaacatgttttcaaatgttagctcaacttccaacatatttaaataatttattgtacgttctcttaacactgtgttataggactcaattatccggtaggaaaagcacaaataattggtagtgtcctagtttactttttttttttgtcgtattatcttgggtcataggagtatcccctctgtgaaaatcaattaacaatattcaacatgctgatattaaaagaaaagctttaaggttccaccgagatttgaactcggatcgctggattcagagtccagagtgctaaccattacaccatggaacctccctcgtgggggctttcaagattgtgtacattactggacattctattttgcgtgtcttccacacccgtcacttaaaacgaaaacaaaacaaagtctgctgttggatatggtagacaccgttatcgagcacttgaaatatatgaattcagatgtattgccagcttctaaatacacatcttcttttgaaggaaggctttgtacaaacaaaaagacttaaaatttcattaatatttttagaatgttgattatatgttaaaataagattttggtatattagggtaagtaaaatagatccgtgaaattaatttcgcttgctttttattctttgtaatgtggctaccagaaaatgtaaattcgataatacggctcgcgtttgtactgttttaaagtatgtttattaccctccaccgtcgtttgctgtattttgtggaaatcaagtttctgtatcacctagctttaaaaactagtaactatttttgttaccattttatgcgaagtgcggtacccaaaagcaaagacatgccgcccgaacagggacttgaaccctggaccctcagattaaaagtctgatgctctaccgactgagctatccgggctcttcacgagagctttactttttgcttataagagggttctctataggaaaagccaggcttgtagaaccgacagaggattttatctgtgcagcatagaatattttggcacagatttggaagcagcgggtgaagctcgcctgctgctgattgagctttttctgcctcccgttcttagagcccccgccgaggctgcgacgcagggactgtaccatagtagaggctggaacagtgcggcgccggaaccggccgcgcggggccgctgcgggctatgggcttctctgagaggttcctccccagtccctagtggcccagatcccggacacctgggctcccgcccaggatcctgcaggcccagggcggtcctggagcggaaagaatgccacgcggggcattcagaccctgtttgccggcgctgtatttcgctttcctgacctgccctactccagagcagagaatgaggtcgggcgtgccaaaggctggggacaaagagggccatgcgtggggggatcggtgtatggggtgacagggagctgttcctgaccatttgacatgtgctggaatgcgtgtgcgactcacctgcgtgtggctgcagtcacgtgtgatttatgaccaagtgcaactctccactgtttagtgattcacacggatgattcacacgtaggaatgcaggtgccctgtgctcatctctgcctgggaatggggaggaacagatcttgggggacattggggagtgggcggacaagcactccagggcatcagtccgggccgctgaccaggcggagggcagtgtcccaattatacaggcgttacctccttttctccatctcagcatctgatccctccctccgcagtggaacccaggctcctgatatccatctgggtgagccagccagagggaccggctgtgtcagaggcaagcaaacaagtattagagtgcaagactgtgggcggagagaggaagcccgagccgccagcagggagcttcggagagagaaagcccaggaacatcccagagagagctgggcccatcctcagccctacccagccccgcagcccctagccctccgcccagaaacccagccctgtccggcgtgccgctcttctcctccaggccggctgctgctgcggccagcgttgccggggcatcccttcctccttcccatcatggcagtgtaccgcctgtgtgtgaccactggtccctacctgagggccggcacactggacaacatctctgtcacactggtgggcacgtgtggtgaaagccccaagcagcggctagatcgaatgggcagggacttcgcccctggatcggtgagtacaaaggagacagggaagcgcgacctcagaggggcaggggccgcaggcgggaggagtattcctcctggactcttgagatcctgctgaactcaggataccggccctgacctcctcaccttccctattgaggtccctgtctttcctggagatgatgaactccatccaggcaggactgtggagaggaaggagcgttggacagggagtagagggacttcccctggctcctaaactcctcccataattgaccgtgggctttgggcaagtcgcttcccctctctgagcctgggtttcctcttatcgaggggatctgcctgcctctgccagccccaggtggcctccacaagagttcccagccggcctaggaagctagtgaaatgcagtgcccactgtgctcgggcacctttttcttttctttttgagatggagttttgctcttgttgcccaggctggagggcagtggtgtgatctcaggtcactgcaacctccacctcccgggtttaagcgattctcctgcctcagcctcccaagtagctgggattacaggcgcctgccacgacgcccgactaattttttgtatttttagtagagaagcggtttcatcgggcaggctggtctcaaactcctgacctcaggtgatccacccgcctcggcctcccaaagtgttaggattacaggcgtgagccacctctcccggcccggggaagctttttctaattcatacaaaagcccggtatgggctgggagcagctcaggtttgtatgcccgaataggcttaggtgtagatgcatcttgcaaggcgcaaggaccgccttggcagttccccgcctctcacctgcttgctgtcttggtcccctcaggtacagaagtacaaggtgcgttgcacagcggagctgggtgagctcttgctgctgcgtgtacacaaggagcgctacgctttcttccgcaaggactcttggtactgtagccgcatctgtgtcaccgaaccggatggtagtgtatcccacttcccctgctatcagtggattgaaggctactgcaccgtggagctgaggccaggaacaggtgggccagagacgaggactacactgtactgcagaaggtgtcctttgggattaggagtggggtctcacagagccccagagtatagggaataagattgaggtcagaaactctgggctcccaagtagatgttttctgaaaaaagggagcctctcaagccctgaaatgcgagggttttgcagacggtattgactcttctggagactcacatagacacatacactcatataggcaggcacccttctctcatacacataggaagcactttgctttccacagcctccctctgcacttctccagagtgagttcctccagaccccagagaggaactaacctgcaccctgagtcattagattttaacaggtagagaagccctggctgctcagagattttagctggagaggccccattccctcccctactactagcttttctagtgtggatgaagtccctgagaggtgctgctaggattccttgttgaatttctggggccttctgcagatgctgggcttgagcatcttcagtttccagagctatctgatctggagaggcaacagtagggctgctctgggtgttgggaggaggctcaggatgaaggagggatattctaggtcaaagtgaggcaaatgaatattaccccatggtccgtaataagttttccatagacctcactataaactctcatccatctccacagcacatccatccatagcttcacaaaatatatttgttcatcagtcatttaaagtgcatcttatacacatggtgccaggcaccatgctagaagccgggaatacagaagaagaaaaagaagaaaaaggaatacaagacgacttctgccctcagggagtttatagtctggaggggagataaacatgccaacaattgggaagattgctataatttgggggtgaagctgtcttgaatcccttctactgatgaatacacaaagaacgtgggggcaccgccacgtgtttcacagggatgtggctgtcggattgggttcaagggtcagggggttcaggcaaggtttgcagaagatgttgttggaaaagagacttataccaagagtaattttcattccccacagcaagaactatttgtcaggactctcttcccctcctcctggatcacaggacacgggagctccgggcccgacaagaatgctaccggtgagggtggcctaatttgacttctttccccatcttt

SEQ ID NO: 96528 - DNA, 12965 bp, Homo sapiens
ttatctcagaatgcttgctcagcatatatctggggctagttaatcgatccaaagtaatacatctgaaagaatatacgcatgtaaaagtcccactccaatacacacctgggatagtggattttggtgaaggcagttgattccaccaacaaaaaccatattgggcatgatgggcctagggtaatccttcacaaagtcacttctaaacagccagacagatgcagagctcaataggtcctggacagtcacctctctctgaaggaattctgaggcaagggttgcatacggggaataaaccacgtcgcacagaaagttctgtgaaaaggcaatgagcatgttcttcacccgctgcaggaaggtcatgtgatctgaatgagaggagagaggcctgggcacgtaggagaatgggttggggcactgggtagcctcaaattccaggctgcatggcagtgcatgcaagaagaatacagtgggcagagacaggtactgggccacgatggggctgcaaggaaggaaagggtccgtcagcatgacatcaaagctgctttctgccagggaggccatgagctccttgttgtgcagtaagtgggaacagccagacaaaagcatagcagagtccttttttattttcttgtatgttttgatcacacgctgcaggaaagaatcattctcaaaaacattatgcccgagactaacaaaagactctttcacatcctccctttggaatggcacagggtacgtcttcaaggtgtaaaatgctccgtctctgatgtacaacgaggcgtcaggtgctaggacaactatttcatgtcccctctgctgcagctgctggatggccccaagcatgctcagccagtggctgccatccactgggatcaacagtatcttcccagcatgggacaccactgggcccagcacacacagcagcaggcccaggacaagtgggcgtccgccctgggactccacagccatggcgcctttgctcctgccagaggttcgccctctcctacttatatatatatatatggcaaaaaccaatcgatacaccaagttaatgtttgactgtgtcacgtgactataaaaagctgtcagtccacaaaggtagcagggagttcactttcagagataaagaaggtggagctttattaggtttcttaataggcaacaacagttgaactggctggaatttcatactcaaatcacattcttgagtgaacacagcaaagtacttccagaacctcaggatccattaaattagtatttccacagaccaacaagtgttaccagagaggaagaaggacgactatgtagtgaacaagttaggcttcttttccagaaattaaacagaaggctttttagaaagccttttagaaagaaaagaacacaactgtacccccgctttcgccatggaaacctgtaagagtgcccactccacagctcccccggtactgcctgctcacttgtatcatgtgtttcattccttcgtccaacaatatttattgagtccagcacagtgtggggtcttgaggctgcagcagagcccaccacacgagcacgcgccatgaggtgagccagactcacaatttaaacacatgagcaggaacttagaaatcgtgaagcatgctaagaaggaaatgaacaggtgggtgggtggggcgggtcgggggtggggggcgtgctggggtagagaatgaccagaaagggaaattcactggagcgcatgtgaacagaagtcttccccaaggacaggcctttattagtgtgaacctgaaagagccagtcctgtaagatagatcttgagtggctaactgggcctggatttaaaatagagccaactggccctttgcttactacaggtcacacggttactctgagtatcctgaaaacctgtacctttttatagttgagattttcagcgctcacctgaaccaaccaattaaagctcacccacctcagccactcagggctcagcttcatcaaccaatcagaatgcagctgcagtgaccaataagaactaagcaagtttccatccttcatttgcataaatggacctgattgggaacctgggaaggaactttttgccgtgaaacctgcctgccttgtgttctgtggaactcaccttcattgcgtaccagaggctgtaactccctggtttgcaaactgttcactagaacaaagtctctttcttccaaattccttttcagagaacttttgttcacaacaggaaaccaaatagataagcaaattcaattaagttaaattgtactcattccactggcccaagatccaggggaaaggcatttggggaaattctgatgactgatttgaagtcaaaagggaaagatgagcaaaaacaactcaaatttgtatttattgaccatggactatggggcaagtattgtgcagccagaattggaagtattacactctttttgggggggatatactgctgtactatacaattccaagataactgcacagatcccaacatttgaaccatacacatcactggccagccatacttggggatgtgcttagaggatcatagagaaacagctaactagagttttggtgtcctatgggacatattaacaggtaattagggtaccctctcattcttctccttagagtaggtactttgcatgcacatgcacactgaagctcctccccacacccaaacactcttcattttttaggaccaagattctgggcaagcagaatagacatagcaatgctttcactctttgttgtgtccttattagaaattctgaaattcacagtttaatttaaaccttaagggtgataattcttccaaagtcccaatgctgtgtgagttcatttgcagattatagacagtaaaggggctataaacacataagtcaccactgtaatgattttatgactttcctgcatcatgcagagcttccaagctttttgaggctgcttctgctgtgtacctggatggtttgtggccacagctctgcccttgaccaagaaatacttactaatctgaatagtgggcaatccacattcatgctcatgaattacaacagagaaccactactaagcaatccaattaatatctgctctgaaaccaaagcagaacccattgctaattccctcatctgccaaatatttatggaacgtgtgagccctactggatggcagtcactatgctaggaactaggcccagaaagtcaagttagaaatggtccttgcctgaaaggaggggtcaggtagacagagacaaactcatgaccaggcaattacaggggatggtgctctaggggctgagaaatcacacagcagggcagcaatatgatggtcttgctttgggggctgctaaagagtgacacgtccatggaaagtgtttctggaacccttttgaagctactttctttttaagctgaagacataagttagtaggccaccatcagacacactaccagctcctttcatctcctttcatcaaatcagaatgacaggcttattactaaaggagcaacataaacatgtccagtgccctgtagatcatctacaggaccctcccgggaagcaaagccaccttccttgaatcccttgaattccttgaatttccaaaatcccagaaaaacagcattttgttctgttctgccttgtatcttttagcagtttgcatatctgtccttgctattagactatagctatatcatatatacatatatatatatatatatatatatatatatatatatatatattccttacaggcaagattttggctttggaatcatgctatcactcaggtgccagtccatggttttggagacagtaagcgctctggacatgtttctgtatagaagtgacttttcttctcttttcgttctagaccctgcatccaagccagcaagtaagtgctgaatctggatgtttctaccactgtctctcagacccagctgtcatggtcccatttcagggccccagcccccctgtcccccaacccccagctgtcccttctgaatcattgcatcggctgccacctgaataaccccacctcaccaccacttctggaaccttggtcagcagcttcctgggcacagaaaattcagagtcctctgccttgctctcaaaactctgggatagaccccagcccacctgtccaagctcattcctcctctctagcccttctgcttgccccctccctctgcctcttaccctctagccattctggatcccttgctgttccccaaacttcctttgatgttctcaaattgctttgttcacactgaactctacccttggccagcttactatgactgttcattgcgtgcttaccaagtgccaagtccgggtttcaggttatgtaactagaggttatataaactcagaagtttgttctggtgagataacacatcctcattacacctaataccctttatgaaccgttagaatgttctttggttaatcattttccccttggaattgagtgacctttactagtgtattgccccacaatttatcaaagcaaagaatccagtgtcaaaaagagaataaggaggaggtgaagagaactcagatctcaaaaaaagtccccccaaaattcatcgtcattatatagcagttctagcggaaataatcactgcatcccatgtttatccccagtgctatacacacggcctgcaagtcttaatggtttcgatacagtaaatagtgctgtatttccttttgtctgagaggatctccctggttgttttagcagtcaagaaaagtgaataacatgcacatttgaccctccatatacttgggcttcacatctgcagattcagccaacagcagattgaaaatatttggggggaacaacaatgaaaaaaaaacagtacaaataatacaaataaaaaaccaatactgtaaaacaactatttacatagcatttacatttattaggtaaaagtaatcaagagatgactagaggtttaaaggaggatatgggtaggttatatacaaatactgtgtcattttataaaaggagcttgagcatctagattttggtatggggaaggagggttgtcctaaactaatcccttcagaataccagggactactctgctagactagcgattctcaaagtatgagccaggaaatcctagggatccccagtaatttttcaggagaattttacaaagtcaaaactatttccgtaataatgttacttgattttctcattgtcattctcccacaagtgtacagtggagttttccagaagctacatgggggatgtgtaatatcacaatagatagaatgcagaagctgacatgagaatccacctctctatagagccaagtactaaagagagatgcaaaaactgtaaaacgatgccactcttctcactacattttgtctcaaaaaaagttacataaaaaggtttgttagtgtgtcatgggtttattcttcttaaattgcccaatgaatatgtctttttaattctgttttaatctctaatgcagtacatatgataggcataatccagatgaacaaaagcaaatgggcaccggggctggaacgttggagaaccgcagtcctaaacaacaggatgtcttcagccccggtcagactaaactcactcccaccaccctcttccctcctgtggccgaggaaaaagactgatataaagcctactttaagaaaaacagttcttcaggcagccaaagtcaaggccctctcttttccccaacctctttttcccatcctttttggagaccatggctggttggaggccggagtgggcggggcctggtcttggagcatcacagggcctcacagagcctcacagagagcagggccagtcccaggagcactgcatcttgggatgcgaggcgctcacaggcctcggccaatgagatgtggctgcgtcataaggggcggccctccaggcggcccaggtcgccaagcctctgacctgtgcgcgggtgctggcagccttgccgctcgctgtgccagtgccccgcaggctctttggcagtccagcatagtggactactacgaggtgctgggagtaccccggtaggcctcgtccgagggtatcaagaaggcgtaccgcaagctggcgctcaagtggcaccccgacaaaaaccccgaggacagggaggaagcggtgagaagattcaagcaggtggctgaggcctacgaggtgttgtcggacgcgtagaaacgcgatatctatgaccgctatggcgaggcgagggcggagggcggctgcgcaggcggcaggcccttcaaggaccccttcgagtasgtcttcagcttccgtgaccccgccgaggtcttcagggagttctttggcggccrggacccattctcctttgacctcttgggaaacccgctggagaatattttggggggtcagaggaactccctgggaagcagaagcagagggtctgcaccccttttctctgccttcagtgaatttccagcttttgagggtggtttttcttcttttgatacaggatttcgttcctttggctccctgggaagtgggggcctttcttccttctgcatgtcctacggtagtgatgggacaggcagcttcaagtccatgtcgacttccactgaaatagttgatggtaaaaaaatcaccaccaagagaatcattgagaatggccaagaaagggtggaagtggaggaagatggagagttgagttaaagtccttcataataaayrgcawagagcagttrctccscattgacaccaagtaattccagtccacatttgmctttaagcacatctggaggaatagcggactttttttaggattgaaagtgaactttactttcagaacagctgtacccaagaatttataaacactttatgccaatgcctgtctttattgttgggactrcacggataggacctctgtttgtctttcgatcattgtaaatatctgtatgcaatttgctatttattaaacttaagcctgaggcagacaatgattatttcctagtgctaggacagaatgttcatctcagcactttgagccttacctttttccgttgggaaagtgtgagccaggtggtttgctctaaatcatttgacttcaatgttttactgtgtggtggtgaaatctatgaatatattaatactctggcttaatttaatgatggcttttaattgcacataaatgctcgtgatgtaggaagagttgaccattatttagataaaaggttaaacccaggctttataaaagcaggtaaacctggcaaagtggatgcattcgtttcctatcatggctgtaacaaattacccaaacttggtggcttaaaacaacacacgttattctcttaatattttggaggtcatacatttgaatcccatatcactgagctgaaatcggtgtaagaagcatgttccttctgaaggctgaggacagaccttggggttatgtggttggtcaatgatatactaggactgtcttcagccctaacgtggttctccaactatggtaggtcctggaaatgtaaagaaaagcgtttccaaagggccacgcaaaactgtcctattgctgtgcttggggcatatcaaattaggttgatgaaagccaagtgcatctgtaatattgtttgggtgaggcaccatacacacaattgagaaagtacctttgtgttggcacgggttatgccccaaatgaagaccttttggggcatattgccttggggtagtccatcacaaagggtcccatcttctagggtcacctctgaggaaaagtttgcatgagagcaaaagggcaacaactagacaggctgaaaaaaattaagagcagcatgctggtaattttttacagaaaaatcatggcctgaacacatcattaaccaacaaatactgtgacaatgggtttggatatgctctagtaccctcagagtccaatctgcatggaatggcacccaagtaataaacagcaggaaaatggcagtcagctggcaccatcccacaggggcacacggggtctcacactgaactctgaaatcaacatgctccaaggtgcctgggtagttgcttcttaaataataactatacaagaagtatcaaaataagacagactgtcagggcttttgaaaaatgagttcattttttagtgatccggataagggaacttacatgtgtgaagatactcactgagtagtttgctggggatgggtttgcttatggagccgttcaggaataaaaggagttttgaggtgggaggaaggcatgggaacagtttcatggtagttttttgtgttgtaaatcaccactctgggtaggatagaatgagtgggtttgtatctacacaattggttacataaatcccattgttcagtggtcagcaaagagtggcataccagtgtcactcagaggtggatctgtaacaacgctggctagttttaacagttgaaagctaacacaaagttcaaattttgatatatcctagattactgatgtcataaatgggaagtgttccttctacagaagtgtaaagcttgtttggttattgtttgtttgtttgtttgtttgttttagagacagggtctctctctgtagctgttgcctaggcaagatcataccccactagtaaacatgaatttctgggctcaagtgatccttcctcctcagcattcccagtaactaagacaacagctaccacacctagctaatgtttttttaaaaaaaatcttgtagagatgggaatgatgttgacccactatgttgtcccagcaagagcattttatttaaagaatttttagaattgaaaaatcgctttttaaaatgtctcatctcaaaaacataacactgctagaggcctatatgtgggtattcatcttttataaaagggttcgataaatcaggttttcagaatggaaaaaggggcatttcctctgttgcaaagatgaccctcttgagacccctaaaatgaatttcctccatggaaacacttgttccttctcaccaagcacaccgggcaaggaaaggcatgaccctgtgagccccaagagacctggagtcctgtgaccatcacagtagggtccaaaaaaccaaaatgccagatattttttctggctggagttcaacacagctgattttaattcagcttacatcacacactagaaagcatctagaagagggaatgatcctttctgtccatcatcttcttctcctctgattctactttctgtctccaaacaggtagagagacttccccatctcgggaaatcattcacacaacagcttacctttctaggaatttctaattccactttctcatcaactttctcaataaatgcagattcatttccttttctcagactctcctttaaaccctttcagtataacttcaatcaccaccaatcttgtattagtctgttctcacactgctataaagacatacccaagacggggtaatttataaaagacaaaggtttaaatgactcagttccacatggctggggaggcctcaggaaacttacaatcatgacagaaggtgagagataagcaaagtcatgtctcacatggcagcaagcaagagagaaacagagaggaagagttcacttgtgagtgaaggaggaagagccccttataaaaccatcagctctcattagaactcactcagtaggatgagaacagcaagggggaaactgcacacatgatccaatcacctcccaccaggtcccatccttaacacatgggaattatggagattacaatttgagatgagatttgggtggaaacacagagtcaaaccatatcattctgccctctggcccctcccaaatctcatgtcttttcacatttcaaaaccaatcgtgccttcccaacaatcttccaaagtcttaactcatttcagcactagctcaaaagtccatagtccaaagtcttatctgagacaaggcaagtcccttcccccatgagcctgtaaaatcaaaagtaacttccaagacacaatgggggtacagaaattgggtaaatattcccattccaaatgggagaaactggccaaaaaaagggggctacaggccccatgcaagtccaaaaccaggcagggcagtcattaaatcttaaagctccaaaattatcacctttaacttcatgtctcatatctaggtcatgctgatgccagaagtgggctcccacagtctcaggcaacttggacactgtggcttgcagggcaaagccctcctcctggctgccttcagaggctggcattgagtgtctgtgtcttttccaggcacacagtgcaagctattggatctactatttgggattctggaggatggtggccgccttctcacaactccactaggcagtgccccagtggagactctgtgtgggggctccaacctcacatttctttaccacccttctctagcagaggttctctataagggctccatccatgcagcaaacttctgcctggacatccaagcatttccttacatcctctcaaatttatgtggaggttcccaaacctaaattcttatcttctgtgtacccacaggcccaacaccacatcgatgctgccaaggcttgaggtttgcaccctctgaagcaatggcctgagctctaccttggcctcttttagccatggctggagccactgggacacagggcaccaagtcctgaggctgcacacagcagggggagcatggacccagcccacaaaacaatttttccttcctaggcctccaggcctgtgatgggagggtctgctgcaaaggtctctgatgtgcactgaagccattttccccattgtcttggcaattaacatttggctcctccttacttatgcaaatttctatagccagtatttctgtagctggtttgaatttctccccataaaatgggtttttcttttctaccacatggtcaggctgcaaattttccaaacttttatgctctgcttcccttttaaacataagttccaatttcagatcatctctctgaagttcaaagttccacagatctctagggcaggggcaaaatgccaccagtctctttgctaaagcatagcaagggtgacctttgttccagttcccaataagttcctcatctccatctgagactcagcctggacttcattgtccacaacattatcagcattttggtcaaaaccattcaacaagtctctaggaagttccaaactttcccacatcttcctgtcttcttctgagctctccaaactgttccaacctctgcctgttacccagttccaaagtcacttccacattttcaagtatctttatagcagtactccactctccatggcaccaatttaatatattagtccattctcacactgctataaagacatacccaagactcggtaattcataaaggaaagagctttaattgactcacagttccaggtggctggaggggggagcctcaggaaacttataatcctggcagaaagtgagagagaggcaaagacacgtcttacatgaaagagagaaagaggaagagcttgcaagtgaagggacaatggccccttataaaaccatcagatctcataagaactcactcactatgatgagaccagcaggtgcgaaactgcccccatgatccaatcacctcccaccagatcctgtccttgacacgtggggattatggggattacaattcaagatgagatttggtgggggatacagagccaaatcatgataaatctagtgtgacttcatgttgagacagagtcagtggcctcactattgaatacattagcctgttctttaccacactcgaaaattagccttgctagtgttctctaattctctaaggggcatagcaagagtgatctgtgccacagttcccaattcgttctgctccactgagatgacagtgaagttttgagcaatgtagttaacactagagaatatgttcacattgaaaaactggaagaaaagggcaagagtcactatttaaattccatcccacttttcaacattgttacaaatctaataaacacatattttataattgaataactacactgcataagggagaaaatcaccaataaaaaaatcatgtggtttgattttaaaaaatgaagcttagagtgtttggcaataatacctatgttaataaaaagaagtacagaaataaaaatacaaaaggatcaagtcatggaagttcatatgcattcagtgaatatgacataaaaaggctgaattctctcatgaaatacatggcacaccaaggaataagaaacaatattcaggtcccagagtaccacatcaatgaaccccaaatattctggattaaagaaagctgcctttgaaattgttggtaaagaagtagatcccactatagaaacttggagtgggatagggtgggtttggtgatatgttcagcttcacctgagaaacacttcccttcttggacacatgtccattcatcaccgtccccagcttaactgggcttatacgctcacagttttatctcctccctagacccttccacaatttcttgataatttcagcattccaagtagaagacccaattgacctgcaaccaaaactatgccttccgaactctgagatgtccccacatcatgcaccagaccccaaatcctgaccagaaaaatcttttgtcagcacagatccctctctggaaactgaactcagtgtgtaattctataatcacagacatatatcccacgttcgttgctctacttccactgaactgagtcaacctctttaacacttctacttcctgcgagtgcttaggtctcctgtggtcacctctctatcattcgcaagacaggaccactaaaaattatcacattaacaattgtaatttgctgttgcatcatctttcccctgaaaattgtgcaaacaaaaaatccagatgggtcaagtctcaatgtagtgtccctgctccttcccaatgaaggacatgcacaaccatgaagatggtgcctttacaaacgaacagtctccatgagtcacatcagtcctagtccatc

SEQ ID NO: 96529 - DNA, 14113 bp, Homo sapiens
ccaaatggcagatgaaatacccatttacccaggaccctcgggaggaacccattttgcatcagagaattctccagtattcagtgaaacttttttttttttgagtcagagtctccctctgtcgcccaggctggagtgcagtggtgagatctcggctcactgccacctccgcctcctgggttcaagcaattctcctgcctcagcctccctagtagctgggattacaggtatgcgctaccatgcccggctaatttttgtattttttgtagagacaacctccacctcccaggttcaagtgattctcctgcctcagcctaccaagtagctgggattacaggcacgcaccaccgtgcctgactaatttttgtatttttagtagagacggggtttcgccatgttggccaggctggtctcgaacccctgacctaggtgatctgcccgcctcggcctcccaaagtgcaaggattacaggcatgagccaatgcgcccagccttcagtggaactttaaatgcctgaagtttttttgtatcgtctctttaaaaaattaaccgtccgtctcagtctcaggtaggttccctgccctcctccatccaaccgtgtcatggtgacgaggggtcgctgaccagcagctcaccagagctgggacacacggccctcatgccctgcgctggtggccgagggtgctacactttttcaggactctccttgttcagtgtttctggcccctccttccagtgtcacattgctgcttatggtgcctggtgcctgtcccgtgcccctcctgttttgctgctgcttatctgctgttcggggcatcctgtgacaggccagttggaatcctacgtagagtgaaagcatctcagccccagacaggcccgaccactcccacgccagcttgtcttctcatcagggactgggctgggctgctgtggaggcctgcaagcccgcgccagcttctccaccctgctgggcctcagaggcgcctgtcagctccagctcaccaccgtgtgtggccctctgccccttgcctctgggacaggtttagtctgcagttattatgttcaaaattttaaaattttaagcagttaacactgatgcgtgatgaaaattccaacagcacaaaaaggcagatagtgacaatgtgccccttgaatccctttcccctgaacccctttccggtgtcttgggtcccttcctgagatgttctctgcagccttctgcatggcgttcaacatcatttccttcatcaacagtcgaggattacggtcccataataacaacagtaattaacgtttattagcatttcccaggtgctgacctttgcacccgttctcccactgatggtcatttggtttatttccaacttttcctactatgcacagtgctaaattaaaccacctgataccaccaatctgcacacgtgggcaggtacatgcaagatctgcagcagggtctggaataacgtcctttagttacaacgttgatgataaaaagttgattcccttctgcacccactgcctgtgtggagtttgtgtgctctcacgactccgtgggctttctctgtactctgctttctttcacatctccgagatgtgcacattcagtgaactggacatctaagtggtcccagtctgaccaggtgtgggtgcgagtgtgtcctgtgatggaacggcgtcctgtccaggctttgtgccctgggagaggctctagccacctgcgaccttgaactagaataagcgggctggaaaatgaatgaatacaagtaattgtcaactaaaaactgttgaagtctacaacaatcacacaaatgcatgacaataaatgatgggatccgaatgcagcctgagcccgacacttctgttcttgtttggttttgaactgtgtggtggtaggaggtgctgtggcataccctcgatagctgcggggagtggggggaaggggggtcctgaagcagaccgttcaggtgtggcttgtgcacacaccccttgacacccaagtgccacaggggaccccaaattccgtcccagctgtgcatctgcaaagctcaaatggactcttgtttcaaattcgacctaatcggtggcacagaaaagctgtgaagatcgtccccagagaaaccgagcggcagcaggccctggaacaggcagagattgtgctgttctgtcctgtccctccctttgggtgacagagaaccacgaacgtctgtgtcctcagagggtcacgggacacgttccagaggggggtggtggggagcacagtgagcacagaacatggtattttcaatccaggctgtactggcgaggagagagagtctctgtgcccagccctgctgatcccccccgctatcagggaggaactgttttcagggacagtctcaccaccctgtgaagaaggatccatttccgtcagcaccctgcctttcatgctcctccctgctgttgagcagcgtgtgctccctccctgcgcccacgctgcccaccccctgttggcatggcctctggaagctgcggacttgcagggactgaatgtgtgtgcaggtacagagtggcccagacgaggacgtgcctcccgtctgctgggctgaaaagctgtggcagccccagacccgcctgaaaagcactgcttttgcccaagaggatggacagattgtcacagctatagttatcataagtggcctgtggctttgtgaggtattagcctcagggagctgagtggagacacacaggcctgccctgtgctgtttttgcaactttcctgaaaatctaaaagtgttctaaaataaaaggtaaaaaatgccacggttggctgggcacagtggcccatgactgtaatcccagcattttgtgaggttgagtgaggcaggtggattgcttgggcacaggagtttggaagcagcctgggcaacatagcaagaccccatctctacaaaaaaatataaaagtcacacctgtgatcccagcactttgggaggctgaggcgggtggatcacgaggtcaggagtttgagaccagtctggccaatatggtgaaaccccatctctactaaaaatacaaaaattagccaggtgtggtggcatgtgcctgtagtcccagctactcaggaggctgaggcagaagaatcacgtgaacccgggaggcggaggttgcagtgagccaagattgtgccactgcactccagcctgggcgacagagtgagactccgtctcaaaaataaacaaataaataaataaaaattttgttaaaaagggcatggtggcacatgcctgtagtcccagctatttgggagtctgaggtgggaggatcatctgagcccagggaggtcaaggctgcagtgagctgtgattgtgccactgtactccaatctgggttaccttgtctcaaaaaaaaaaagaattccatggctgcttgtcactgcagagggttggtctcacagcctggtcagggtcctgctgaggagatgtggcctggtcactgtgccttctggacacacaccacctagtgtggacacttgccaccctccacacactgcccagacaggctctacctcctgtccttcaagacctgtactcggccggactcggcggctcacgcctgtaatcccagcactttgggaggccgaggcgggcggatcacctgaggtcaggagttcaagaccagcctcaacatggagaaaccccatctctactaaaaatgcaaacttagccaggcgtggtggtgcatgcctgtaatcccagctactcaggaggctgaggcaggagaattgcttgaacctgggaggcagaggttgcggtgagccgagatcgtgccattgcactccagcctgggcaacaagagcgaaactgcgtctcaaaaaaaaaagacctgtgctcaccgtgaagccgtcacagactctggtatgaatttagccacagacttgatgttctgatgcctcgaggagcttctgggtccctcaagggcccaggtgacatgatctccagtgcagcctagagctttggaatccctcttcctcccccagacccctggtctccagaagacccctaggagcccagggaccattctagaatggcatgttgtatacacgctgtccctccccactggatggtcagccctcaggggcagcacggcttggcccagcctacccagcccagggcattcaagctttggcctcacctagagccaggctggacgccagcagggctgtgtgcagcttggccagctttggagctcccatctgtggactgccgccatgacaatagctacctcaaagtgttcttgaggaccaaaggaagtcattccttcccctcgagggaggctggaacctaatgggtatcccgggaggtggggggaggttcggatagaacatcccgctgctgtgcgtgcagcagagtggctgccatcagatttctttggggtggcctgcgcactggctctgatttgatgacgttctctgtgttttccaattttcttcttgctctttagctccttccttctggcttctccatcttcacatttcccacagaattcagttgtgatttagattttccatgcccctcactagcgtgttctggctcctgtcatgcagacaccttacacttaaataccaagtccgagataaacctgctttcagttcacgggcgcttggaggtcctgggagttctgtccttgagcatgaggaaggagatgcacagggtagggccctgtggctgtgccccagacaggaggaggaggacgaggaggatgaggaggaggaggaggaggaagaggagggaggctttccagacacacaggcagggctgggggagccatgcaggagataagccaggctgaacttgggacttttgcacacaatgcttctctgcctggaaggcccttctttctgtgttctgtgtggtgtctgcttttcatcctgcacgccacagtgtgaaggtcacctccctgactgccctcgctccaggttattctttctcccagcaccctgttctttggcgagcgcatctctggcatcatcacacagagtccatgcggcacagacaggaggcccccttgggcagaggccctgaacgcctcgcctgcttgccctagtgccccagggcctggcacttggcagccctccatagctacctgaagaacagatctgtgtgtggagaggggtcgggagctctgcactttgggaggactatggctggcatttgcttgcagttggggctggtttgcaaatatttctctctgcctcagcaggtgagaaatagcacctcggagctccttgcctgttcaattatttccgattgaattaattatcctgcagtaacagcggagctgctaatagggaacattgggtgccccccaggcggagcatgtggctcgagagcacgcctggagctggagaccagtgggcagcccagctcttcgggggcgcaggccccctggagctcttctgacgatgggcagcttcatcctgcagtcaccagtgcatgcagaggtccagccacggccacctctttcttttctgtcctttaaatggagagggtcagcacgtagcaaatgaaccaactttgctttgactgcagctgtgaagataatgaggcagccttggttgtcatctaaactcagcaatggtcgagagctatttgggatttcctggcctgcttccaaattgcaagccctgttgggctactaatgccccaccttgtcccagcctctctttggccataggctaggccagccccagggtggacagggaggctccccagggtcggacgaaggcaggcgcctgtgagcagaggcctgggggctggatgggtggcaggtggccaggccactcttcctagcccagctgatgccatcccgttatcttgtaattttcttcccggggccttatcagccttattagcaaatgtcagaaacaatgagagtcacttaaacctgatcatgcccactgcaccccccaccagcctggcaccagtttgaaccaagcctgcttctgaaaatgtggtggagaaagccctgctgctcctgggaggggctcaggccatttgattctgcctggtgggttcagggctgcctggctagccaccaagacacgggagagcaaagcccggccaaacccaggggcagtggtgtccagcaggcatcaggacatgccgtggcccacacatgcccttctccacaggtgccatcatctcctttcttctcctgttagtgatggcttcattggcctcaggtgacaccgccttctagcccaggccactggatccagccagagcgtctgtgcatcgccccagggaggtgtggggaggctcggccccacctggcaagtttataggctgcttgaggacataagatgggtacagaagaggcttcagggctcagcagatgctgtgctgggagtgagcccaggcaaggtggcccagggacagaagatggaaggtcagtcgtggcctccttccagaaggaaagagattttagcaggaagagacaggcaaggaaaggaattggtttttcaggcagagcggtacttttttaaattgacaaattttaagcatacagaaaagtagagaggacgaacctccaaacatcagcccttagattccagtmcatcctgccttggtagctgacgtcacgaacgctgtgacctgtccctctgcactccatcatagcatctctaaaacggaggacatttcctacctcagcacaacttcattatcacaaaagagaacattttgagcaaaagtttggaagcaggcaaaagtagggtttgttctggaatggcatgaatgaatgagtcatgggctggacccggccccgcagaaagagcagaggaggccgtctctggtgtaggagttgaagccaagactcagcatgcaggacaaggagcccagcctggtggcatgggctgtggcttctccagtgggcccataggaatggccctggggctgggacttgtggggacggcggccacaagaggaggatcttcagcatggcctgamagcacctgtaatgtaggcaggcaatgggctcctccaggtggcaggaacacygtgaggagcatgcaacgtgctggagaccatggggcatgtgacctccgggcacaccctggacagacctgggtgagaggtggkctgggacgccaggacrgtgargggcttcaaggtgtgtttgtcctttgtccttatacaggtgacctgcatgggcgggtgaggtccatcagaatgctctagaacaggacaactgaggtcccggctgccccgctcaacacgccatgattcctagactgccctgagaggtcaggttttaaatagggtgtggcccggcaaggaccctgagggatgtgaggccagacagctccttggtggccgcctgcacgggaagctgagtggccctttggaacaggaagtgccttgtccaagttaacccgggcccgggcccaccttggactccctctggagagaacggctggcctgttcgcctcctttctccttccttccaaaataacatgtccaggtcccttggtaagaatgctgcagctggggtcagtctccaaactggagtttggtggctaaaatgcccgcctttctgcccccaatttcacacatggatgatggtcctggttcagcagggaagattctcttggacccgtgtctgctggttgggaagtggagaaagccgccctgttctgcctccattttgaaacgtcttttctgttcggaggactaaaggaagccagagctggttcagatgttcatgagcacctgtgccagcccctgcccgtcacacttgaggacaccaaggctgtggtctgtgcagtgaatcggggcagtggggggacttcatggttagaaacacaagctggaggccggatgcggtggctcctgcctgtaatccctgcactttgggatgcctgaggtcaggagttcaagaccagcctggccaacatggtgaaaccctgtctctactacaaatacgaaaattagctgggcgtggtggtgggcacctgtaatcccagctactcgggaggctgaggcaggagaatcgcttgaacccgggaggtggaggttgcagtgagccgagatcacaccattgcactccagcctgggcgacaagagcaaaactccgtctaaaaaaaaaaaaaagaaaagaaaaagaaacacaagctgggcttcctgcttcccagctgtgtggctttgggccagttactcactgtctgggtgcctccatgttcttgtttccttatataaaataaagttctttcctcgtggattgtcaggaggattctgtaataatccacaggatgtgttctgcatgcactaggtgctcaactttcctgacccccgtccagtgcccccctcaccgaccacgtctgccctctaagctgccagtcctataggaggcattaagacgtctagcaaggctgtgttctcagatgcctcgaaatgggacctcagccttggagttctctcctcccacatggaggcaagtcactgacagtcatctagcaaattgtatgcatggtcaagctcagaggttctattttgggtcaaaaaaggcatgagctggctgggcgccgtggctcacgcccgtaatcccaacactctgggaggctgaggcaagcaggtcacctgaggtcagcagttcaagaccagcctggccaacatggtgaaaccctgtccctgctgaaaatacaaaaattagctggatgtggtggtgcatgcctataatcccagctactcaggaggctgaggcaggagaatcacttgaacctgggaggcgaagtttgcagtgagccgagatcgtgcccctgccctccacctggggtaacaagagcaaaactccatcttaaaaaaaaaaagcacaagctggattttgccctttgtcgtgagagcatttcatgccttcatgaaagtcactgcagctgtgcttcaggcagagggcccgggatccaggtggcgtgcgctgccttccgtggccccttcaaagggcagccaccttcccagtgccgcaggagctcctggtctggggccacatgcttggaagggccactgaatgtggtgaagggctgggtcctggtactgagcctgttgagacttctgcaggattcactgccgtatgcctgaggaaggcagacgaaggaaaggacagtgtggagtgctcagcagagtccccatggtcgcacttgggaagaacgccctggcagtggacggtcagtggtcacatgcacatgcgaggccctcaggactctgtaggacacgacgtggcttctccacagtcctggggatcggaagcagatgcagaatgtggccgagtggcccgggccagggcctgagagtctgcattctgacatgcttccccggtggtgctgctggtctgggaaccacactgggtttaagtaactgatttaagtaactgatgcgaggaggccatgctctgggggaaggcagctggagaggagaagaatgatgtccccatgccccttccagcctcagagtcctctagacccggcagtgtgcaggaacggcagcttcactgcccatcccctggggtactccctgcagccttgggccctgctcctgcaacggtggccgaacggtgcaaaggagggggcggcccagtccctgcaggctgccctcagcctgggtttgctcatctgtgagatgggatcacatgtataatcctggctacttcacagagcccaggcgaggatctcatggacttgtgcatgtggaaaagccctgaaactgaaagattctagaaacaccaggattgtggtcactgtcattactggagggcataacccattcccctgtttttcctccatgaaagacaatcccaccaaaacacgaaggccctgccctcaatctgtttgtgtccttggcatggttcagcctgctctccccatggcctgagaggaaagcgttagccaggagggtagttggaggtggcgggaggtaatcccaggagcccgtggtgagctgaggatatggagaaggctcatctggggtgacctgagcaagcaccctctatcccaagccagtccccagaggccacgtaggcccctgtttctggattaactgagcgggagctcaatcaggcaaaccaggttgcttggcacggtgtttgccttaaagaagaacaaggtgggccaggcgtagtggctcacgcctgtaatcccagcactttggaggccaaggcaggcggatcacctgaggtcaggagtttgagaccagcctggccaacatggtgaaatcccgtctctactaaaaatacaaaaattagctgggtgtggtggtgagcacctgtaatcccagctacttgggaggctgaggcaggagaattgcttgaacctggtaggtggaggtttcagtgagcagagatcatgctgctgcactccagcctgagcaacagagcaagactgcatctcaaaaaaagaaaaagaaaaaagaaaaaagaggaaggtgggctgtgcccttctggctcaggcactgatattcaggggccagtaccaggcagatgagccctgggtgttgggctcacatgtctgtggcctgtcgttttagccttggggccaggggtagcagccgtttctctctgggcaaggggctcatgaggaaacgtttctgccttggcagcccaggccacagctgtgctggctgcagacaccctgggcaggccccggtcgctgaggagccttcttgggcaggttgcttcatctctgaagctcagaatcctttcctggagcacagatatcaaaatatttatccccagaagcctcaacaaacctgtgctcaccgctgctttaggccctgcagcagtcccaggtctgggcagatgtttcaagttcagtgtgtgggctctggcttgctggagctgggcccagggaactggcgccttgggatgaggcccgccatgtccgagcctgcccatgccccgctgctgctgcggccggtggtcttggggctgcctgccagccttctctcctgggagctaagtggggacaggtgctgcgggccacggtccacgatgctccctgcttcctgtttggtgggcagcctgggttttaggaatgtgtagagctggaggagctgaaagagctggggctcgggatcaggtggttcagctgactcgggaaactttgaggcaccaccgcacatgtccgtgcgtgagggagacatcttccttgcagggctctgggaggatggggtgcttctgtaatgcccagtcttgggcctggcgcctacctcatatgggtgctctatatagcagcaggcggagcacaattctgctaacgtcagcaacaatcctgtctgttggaataaacatgcagatgcatctgtgaccccagaatcccagtggtggctctgtcctcgtctcagccgagcactcatcggccagggtggctggactcagcacggggctggcactgaaactggcagtcactgctgtcagtgcccacagaaagcaagaagagaatagacaaataccaggcagtggagacactccctgcccactgcagatttataatcagcgaacatttactgagtacctgttgtatgccttgaggtgctcacaggggagcactcgggagcccattcactcgccagtgatgagtgggcactgtgccaggtgctgtccaaggtgggggagcgagggggtcactgcaggagagggtgagaaggaggctgcatgctgcacgaccctctgaaccctgagcctgcctggagaagtgggctgtgctgcggggaccctgttggagaggggcagcatggggaggggcggagcctgcctggggcctctcatcctgcagctgcctggaagttgggctccttctgacagtgtcctcaagtagacgcgggttctgggggtctggctggtggaggccagctggtgctcctgactcactggctcctctccttgcacagtggctgctgccacctgcctagggagtcttcctggggctcagttcccctgaccccctgggacataatgccagaactcatgctggctggccaccctccctcacgtgtgctgtgctcagcccgaagttggtgctttcacctgtgtgctctgggcaaagcaggcgcagaggaggcactgggatagagcgcagagtccacctggggcagccccctcctcgtcccggccattgccccatgttgggggtcttctgtcgggggagggagggttggagctgggattggaaggcccctctgaggctcttcttccttcctccatgagccctccaggccccaccctccatcctgcgcccctgccccatccccacccacggccagggctggctgctgcccattttggccccttcccttggggcgttgcttccaggttcaactcagattctgtcttttccagaagatgtctctgtccttccatgcccccagcctttgttccttgtcctcccctgtccctgcactcctggggtgggccctcctgctcccgagcctcctgcgtggaggctgtgagctccctgccacctgcgtggtcagtctttcctgcaccagcctcccaggacccctcctgcccacgctcctgagagattcaggcgccagtgcatgggtggggcacaggggctgcggcagacagagggtggtgatacaggggtggagtcccacaggccggatgccttgacacttctcagctgcagggctgtgcccggggctctgtgcccctgaatgagggcaatggttcccctgcacagtgaccttgtgagctgattcaggccccatgatcgtgattagctgacagcacattggccctcagagaaatgaaaatacacagttacacagtagcaaaatcccacgagcagtccctcagctggggcagggacacacggactgtggcacgtccacaccaaagaatcctgcgtagccacaaaaaggaacaagctggggatacatgtgacaccctgggcgcatcgcagaggcatcataccaagtgcaggatgccacagcctgcgcgattccatttctgtgacacttgaggagggaaacgggatggaacacaggacaggagtgtctggggtgggacagggaagggcccagctctgggttggagcctggagctggctggaagtgctgtgtcctgatgtggtggtggtatgcatttgtcaagactcatagacctggttggggcacagtggcttacagctgtaaccccagcattttgggaggccaaggcaggaggattgcttaagaccaacagttggagaccagcctgggcaacatagcgagaccccatctttactaaaatcaaacaacaacaacaaaactcacagacctgtgcattaaaaagggtacattttactttatgtgttaccttcataaatctgacctaaaaatgatttttaaagtccccccttctaaaatatactaatctttaagaaacaaaaacaaaacaaaaagctggctgacagtgggtcctactactagcacatgggcgttgatgatggtgataatgtctctcgcccataaaaggccagcttggaaacctgagccccagctgcttatcggcctgtgtagccagacaaccattctgccactcgccaaatattttcaaatttcctttccgaggcaggctgaagtccaggtaaatattgacccaagaaggcggatcacgctttgtgctatatttggttaatagttggagtcactcctaagctactttttcagttgctttgtacaggtgggtttgttttatgtaaaaagaaaagacactttaaaaagctgcgcataaatcagacatcataaatgcagtagaaagcctccctatttaaatgactcagcgaatcttctgatgaaacaactgcctcttcccctttaatgtatttattaatttttttttctttttttggagacagagtcttgttctgccacccaggctggaatgcaatggtgtaatccaagctcactgcagcctcaaattcctgggctcaagtgatcctcctgcctcagcctctcaagtagctgggactacaggcatgtgccaccatgcccagagaatttttcaattgtttgtagagatagggtctcaatttgttgcccagcctgaggcaaatttttagatatatattttatttaagtgagagctgtgacagcaatggcacaatact

SEQ ID NO: 96530 - DNA, 56816 bp, Homo sapiens
gtgcggtggctcacgcctgtaatcccagcactttggaaggccgaggcgggcagatcacgagctcaggagatcaagacaatcctggctaacacggtgaaaccccgtctctactaaaaatacaaaaaagtagccgggcgtggtgacgggtgcctgtactcccagctactcgggaggctgaggcaggagaatggcgtgaacccgggaggcggagcttgcagtgagcggagattataccactgcgctccagcctgggcaacagagcgagactccgtctcaaaaaaaaaaaaagaaaagaaagaaaaaaacattctttgaaggctggcgcatgctctgccttggtccccactctacccccagtgcctagaatcgtgcctggcatggaatagctgctcaataaatatttgggggacgaagtttaaaaagagagagagacagaaataccacagaaaagaagctaaaatagactaagaggctgggagaagagcagagcggaagatggaaacagtgaaatacagtctccccaggacacccagagatgggttacagggctggctataaccgacgcagtaccaagggtcaaccacccaggggaaaccatgctgagaactggaaccgtgagatccacagacacaatgatgaaagagtggccgggtgccgtggctcatgcctgtaatcctggcactttgggaggctgaggcaggtggatcgctggagcctaggagttggagaccagcctggccaacatggtgaaaccccatctttactaaaagggcaaaaaattatccgggcgtggtggcgggcacctgtaatcccagttactcgggaggctgaggcaagagaattgcttgaacctggaaggcagagtttgcagtgggctgagatggcaccattgcactccagcccgggcaacaagagtgaaactccatctcaaaaaaaaaaaaagaaaaaacaaaacaaaacaaaaagacgaaggagtgagagagagaaatagactgtgatagaacacagcagacacaggggaaaggagatagccgcaaagagacgatgaaacatggggtcttgtggttcacatctataatcccagcaattcgggaggcccagccaggaggatcgtttgagcccaggagtttgaaaccagcctgggcaacataatgagagcttgtctcttaaaaaaaaaaaaaaaaaaaaattggccaggcgcagtggctcacgcctgtaatcccagcactttgggaggctgaggcgagcagatcacgaggtcaggagatcgagaccatcctggctaacatggtgaaaccccgtctctactaaaaatacaaaaattagccgggcgtggtggcgggctcctgtaatcccagctactcgggaggctgaagcaggagaatcgcttgagccccgagagatggagcttgcagtgagccgagatcatgccactgcactccagcctgggcgacagagcaacactctgtctcaaaaaagagaagaaaaacaaaacaagggctgggcgcggtggcttacacctgtaatcccagcactttgggaggccgaggcaggcggatcacgaggtcaggagatcgagaccatcctggccaacacggtgaaatcccgtctctactaaaaatgcaaaaattagccaggcgtggtggcatgcgcctgtaatcccagctactcgggtggctgaggcaggagaatagcttgaacaagggagtcggagcttgcagtgagccgagatcgccactgcactcgagcctggtgacacagcaagattctgtctcaaaaaataataataaaaaaaaaaaaaaaaacaaagactgagaccacaggaagtgggagagaggggaagggaaaggcccaaagaggagagacaggaagcgaggtaaaggtgaggcagaaatgcagagagcccagagaagtgagacgacagtcataaagggagacagagatgtgaagggagggacagagaacagagagagaatgagacagggtgacagaggtccagagagagacagcctgggagagccagagagacacaagtgagagacagagagatacgaaagggacaggagaaacaggaagagagagggagcttgagaaactgagagaggacggacagagggagcaaggcaaagagagagagatccatggaaagctgctcgtttctttcctctgttaagcctggagcatgcagaaatgcagaagtaggttttttgttttgttttgtttttgatacagagtcttgctctatctcggctcactgcaacctctgcctcacaggttcaaatgattcttctgcctcagcctcccgaggagctgggactactggcgcacacctccacgcctggctaatttgtgtatttttagtagaaacggggtttcaccatgttggccaggctggtctcgaactcctgatctcaggtgatccacacacctcggcctcccaaagtgctgggattacaggtgtgcggcaccgtgaccagcctagaggtagttttgaggggcaggggtgtccatccctccttgttcacaacgcccttttcccaataattaataataataataataataataataataaggaaatatgccactcactgcagaaagctgcttcatgtccattgcctcatccaaggaggctcagcagccccatgacgcaggtaccggcatgttccctatttcccaagtgaagaaactgagatacagagaggttaagtcacttgcacaaggtcacagaggtaggaagtggaggcctgggactccaaggcagcggaagtctgtgtcctgggtggggctgttggctcacagtgtggcacagctggagagtggtgtgacccctgcgtctaacccgtatggacatctgcagcaaacttgctattgaaaaagatgtaaaaaacgtaactcaaaataaagtgtgaaaaaaaaaaatacatggaccttgcctggatactgaacttctctaaaggaaactatagcattttttagattagcagggaaattagaatatgaactggggatgagatagcatcaggaaatcattattaattttgttaagtatgacaatggcattatgcatttgtaagaaatgtgcatatttctagaatgtgcactgtaacctggaggggtgagatgacatgatgtccaaggtcggcttgtttttttttattttaatttaaatttaattttattttcttattatacttaagttctagggtacatgtgcacaacgtgcaggcttgttacatatgtatacatgtgccatgttggtgtgctgcacccattaactagtcatttacattaggaatatctcctaatgctatccctccccctccccccgtcccacaacaggccccagagtgtgatgttccccttcctgtgtctaagtattctcattgttcaattcccacctatgaatgagaacatgcagtgtttggttttctgtccttgctatagtttgctgagaatgatggtttccagcttcatccatgtccttacaaaggatattaactcatccttttttatggctgcatagtattccatggtgtatatgtgccacattatctgagacttttttttttttgagacagagtctaactctcgccaggctggagcgcagtgacacgatcttggctcgctgcaacctctgcctcctgaattcaagtgatcctcctgcattcaagtgatcctcctgcctcagcctcccgagtagctgggactacaggcgcgtgccaccacacccagctaatttttgtatttttagtagagacagggtttcaccatttcagccaggatggtcttgatctcttgacctgatgatccgcccgcctcagcctcccaaagtggtaggattataggagtgagccaccgcgcccggctgtgccacattttctttatccagtctgtcattgatgggcatttgggttggttccaagtctttgctattgtgaatagtggtcggcttgtttttttgagacagaatcttgctctgtcgcccaggctggagtgcggtggcatgatctcggctcactgcaacctctgcctccagggctcaagcgattctcctacctcagcctcccgagtaactgagacgacaggcacatgccaccacactgagctaatttttgttttagtagagatggggttttaccatgttggccaggctggtcttgaactcctggcctcaagtgattcgcccgccccagcctcccaaagtgctgggaatccaggtgtgaggcactcagcctggcccccactctaggatctgataagtgagcacagtgctcagggcagtcgcgggccgccagtcacatcctgatagcaacacggccagctgctccaccctcccttcccaagtccctgtcttaggcagcccactcccatctcccctggatgcccctctagcgtcctgcgctgagtgtgagtccagcactggagtcattacctgcccccatgccagcctgtcttgcctgtgttctcagagaagacagtaccgtccaccccggctcccaggccagagacctcgctgcttttctctcctcctctcagccaatgagtcaacaagtctcacggagtttaccttctgagttgctcctgaatccatcccttccttttcttccctcccactgtcctagtccacctgcacctggacatctgcagcagcctcctcgccggtctccctgcctacgctctggcattccatcccctctgtccacccaaccactagagtgagccttcgcccaggacacccgctcatgtcactgctcagagcccttacatgccctcccaccgcccttagggtggactccaaataccttatcatcgttcaccaggaaccctcccctattgagctgctcagccctgaaatgttctgttccactcacttgtcagttctccaaatgcaccatgctctccctcttgcctccagcctttgcattcactctgcctgctatgctcttctccgaagccctctgcagatctgagaatctcttcctccaggaagccttccctgactacatccctgacgctcaattaggtgcccctccgtgtaatgccgctaagcctgtgtctcatttctcacagcccttttcattcttttttttttttttttttttttgatgcagagtctcgctctgtcgccccagctggagtgcaatggtgcgatctcggctcactgcaacctccgcctccagggttcaagcgattctcctgcctcatcctcccgagcagctgggactaccaccaccacgtccaccaacacgcccggctaatttttgtacttttagtagagatggggtttcgccatctggtctggaactcctgacctcaggtgatgcgcccgcctgagtgctgcattacaggcatgatgtgcctgggattactgccaggagccaccgcgcccggcctcacagcccttttcttttctttttttttttttgagacgaagtttcactcttgtcccccaggctggagtgcaatggcgcgatcgcgatctcggctcactgcaaactctgcctcccggtacaagcgattctcccgcctcagcctcccgtgtagctgggattacaggtgcgtgcctccacgcccagctaatttttgtatttttagtagagacggggtttcatcatgttggccaggctggtctcgaactcctgacctcaggtgatccgcccgcctcggcctcccaaggtgcaaggattacaggcgtgggccaccgcgcgcggctattaatattttttgaaacaaccttttcctgggtctcaattccctcaaccggggaggccccccagccagcacccgcgtgcatccgtggcggttcacaccgaggacggtgacggacaccctagtctgctccgccttctgccgggtctggccccagccgcggggccccacctcggaaccgacagcgccgccgcggcccacttaaggacgggagggcgggcctgggaaggctcggccccgcgtgacgtcagcgcgcaccgcggcgtgtgacgctctggttgccgcagagacgccccgcccccgcgcggcgctgcggaaccggagctccgggcggcgtcggcagcggcgcgagaggcgacgaggcccgggcggcaggagccggcgcggcgaccgcggcgagggcggcggggacggagcagagcacgacgaagacgcacaggcagccgggccgggccgggccacggggagagcggccggcgggcagcgggcgggaggccgggcgggccgcgggcagccaccgagccgcgaagcgacatggtgctgctcaaggagtagtgagtgtccggcggccgtgcggaagcggggaggagggagggtggggacggccgccggggcgacggcgcggcgagggacgcagggcccggatggacggaggggcagcagggacggagggtgcctgaggcgggcccagcggggatggaggggatccggggcgggcggcacgtgaggcggggcccacggggcacggaggggcggccggggcgtggaggggcggccggggcgtggaggggcagccggggcgttcggcatctgagccggggcccacggggcatggacgggcagccggggcatggaggggcccacgggcacggagggacaacccgggcggacggctcctcaggcgccccgggggcctcggaggcccaagtggacccgaggagaggccggggacagcgagggcgaggccaggcccgagacggggtcagggcagggagagctggcccgggactgggggaggccgaggggacgccgagcgctgggagtgctgtggggtcgctctgcgcgggccgagggcgcgggctcagccgggactgcaggcggcgctgagaggccccgcggcggccgaggaagaggckcaccggggcaggcagggcctcccggcggtggggaaaggtggagggccgaacagttcacacggagagccgggtggatgggtcagaggctccgcgatggagttgggatggggatggggaggagtggccgccttaggcatcgggtgaggggtggtggtaagtggacacaggaggaggactaggaagtcagggcctggctggggagacaggtgaagggtctgaggacatgcagagggrgmtgagatgcgggccggagtaaccgtggtgcccaagcagctggtgcggaagaggaggcttttggaacaagcttgggatgactgcttgggacgtggggagacttgggcgaggaggccagaaaatgttgggtagggtccgaagtggagaaggccgggaagttaccggggtcgaggctggtccggaaagagagtatgttgggatgagtatacctgccgttggagatgggggagaccagggcagggccagcttgtttctaggggattctcagtcttggtgcaaagagatggggaaattctttgaggaattgaggggtccatggagccgtgaactgaggagagatggtggaaggggtggggagctcttgagtagtgaagaggggtgcgtgggaaactggtgacttctggaaggagttgcaggatgacgggtttgctcctgaaatccaggggactgggggacaggtggagatgtttggtgtgctaaatctttcaagtacaagatgagccatcgttgaagctcagggttccaagtaagcatcacaggacatttttctccccaaagaggagagataggatgggtgtgtgtgtgtgtgtgcgtgtgcgtgtgtgcacagaatttacagtgaaactgctttcctggagggagggccagaagccccaggagtgggagatggtcaaacagagagcaacttgtgaggcagccaggcaggtgtgcagagagctcttgccactttgtcagcgatcgcactttgaccatccccaccaggctggctccttggaggtgcttaggacatttaggacatagagtggagtttgggtaacagagggagctgagacccacatgtcatcccagctaaacacctcatctgaagagcattattttgaggcctcatcccctctgtttcttgacatccagtctgatgttaattcagccagggctcggagcttttcctggtgaggaggaagaactttacgatgccaacaggagaacgtggtgcactttagattttaatcttcagtgtccagactgacaggcttttcccatccttctgattctttttcctgttcccaaatgaaccctagaatctgtagaaatctgtggttttgaaatgaaggtcaggcagggaaaggaagggaccttcagaggagatctgagtgaggtttgaagagaggcactccttccctgtctttgttctcctccccttgaagcctgcaagggaaaagtccaaggtgccggagatgcagggcctgcctggtatctgcgtttccttcctgcccgactcgtgccccgtgtgtgcatccctgggcgggggacgggggaggagcaggggcatccgagacactggctgtggccgcagcgttgcagccctggaaagggtgcgagtgaaggtcacattagagtgagtgccgctccaggcccagcccggcagttcctctgtggccctgtcctttggaattgtaccctattgctgccgaagtggttttgttcctaaggagcaagggggcagtgtcagagtgtgcagccgtcacgtcagcagcctcagcgcatcccgtcaggaattggcccatggcattctcttttggggtgagacttggttcccacccagcgtctgcaggttgcccctgttgatttttccaacacttcctctaacaggattctgtttaatttgatttctgcaaaatcttggatgtgattttgactgctgctcttgaagataaaaggcttattgttttctaggaagtttcttctgagggtgcagaaattctggcctccaagttgggagtatttttctgcaccactggctttctgtaatgggaggggaggctcactggcagcattcagtaaactggaggatttatgttgtttgagttgctctggaggaagggagttgttagcaggcagtaaagacttggagcccattttgtttttcctgctactttcctgcttggtgtcttgcctttgaggtgatgttttcctcagacccctctgtgtccttcttgcttcctgggggacctttgtggaactagaaaatagctgtttactagcctggagcaaggagcctgagtggtgagccggctgcataaggaaggcacagcagctcatgcttccctaatgcttcactaaacatgcaagacwcaaaaggacccagagggctccagcaagggtctggggaccgaacgtctaagcttggaaactggctggacttgtatgggtaaaaccaagagtttttgtcttagctctcccgcctcacagctttgaactgggggtggctcttggtctgcatttcacatgcacggcacctggagaagtgctgctagccctggcacctctgtggggttctggccctggcggagactttgccggccacggcttctccaataggttgctggtggcatctccagcaattggtggtcattgagttggagaagaagaaaagaaaatgataaattgggattcctttggacagctcctggaggtcaggacataagttgaatgccctcttggtggctttgtggtagcagcttggattgtaatatccagccccgagcagagatgccyggtgtgtgttcttaggcttcaaggggcttggtcccttcctggcccttcccctggagggctgttgttgggaggttgggtccacagaaatttaagtccccagggcctcttgtttgggtctgaatcctcaccatgataggtcctcctgtgttaacctgtcttactagactcactggcaagtcttgttggggggacgactcattggcaagtttgggtgaagtttatcatccatatgtccagttccgaatgtgaggtggaggcctgggaagtagctggcgggaggataggtttggactgaatcacagggttctaactgggatgcctcaaggtacagagggtcctgtcctcagagcactaagagggccattctctgggggggggggcggggggggggtgttgtcacagagtttagtgtcttacacctctagggcacagagggtcctgtcctcagagcactcaaagggccattctctgtggggttttcgtcactgaatttagtgtcttacacaatagaatgctgctgactgttttaggatgatgctttaaagagccttgagcagattgcacagmctaaagttgatactctcttttccctttcttatagtcgagtaatcctgcctgtgtctgtagatgaggtaagtccttttactttctggtccatagttgtgtgtaactgtttgtgaccattggctaagctgggctctgagtggttatcctgtttatatagttttcttatttgttctaacataaatatttcaatgtgaatttcgtggtgccactttcagttgaaaaatggcacttactttgtatatctgggtaactgtgtgcaacctgtcccaagctgttggtatgctggatgagtagagattaaaccagccccttttatctgctggggctgtgcatgtctggggacccttttttttttttttttttttgagacggagtcttgctcagtttcccaggctggagtgcagtggtgcgatctccgctcactgcaacctctgcctcgtgggttcaagctattctcctgcctcagcctcccaagtagccgggattacaggtgtgtgccaccacacccggctaatttttatatctttagtagagatgggctttcaccatgttggccaggctggtctcaaactcccgacctcaagtgatccgcccgcctcagcctcccaaagtgctgggatgacaggcgtgagcccccacacccggccggggacgcattattgatgggatcaagtgtgtgcatttctgggacgtccgtgactcggctggcaagtgtgcgtggctctttctggttgtgcaacaaaccagcagggcaggaaatctctkgaggctctccctagccacgataggtgactgctggaaagaccaagacacagaaccctccttttacgaagggcagggaataacacataggcttggcttgtcctctgtccttttayggttcctgggtctgacatccttgtatgtggggatctggcagcaggatttgctgtaagaaggttcataggccatgctgactcagagtcagtctcttggacaacggaaaactgtcacggaacctcccttgkctcactctttctctgaacttcttccactctcctctcctggcgcagccttgttctttgcttccttctgaaatcacagccccaccccgccccagcttccagttaaactcgagtttgggtgaggttcgtcagccagtatagtgcctccagtcactgggctccgtctctctttcctgcagtgtcagcatgaagctcctgtgataacttccactctgttcccaatatgaactgcacctttgaaaaatgaaatcaggccagcagagcctgcagcacatttagttgagacagacatccaggcttgttggcccccgagaggggtgggcagacactggccctttagaggactgcctccaggggtgggctacatatctgataagagctgtggggacctggggagggggccagaggtgggccttgaccgtgatcttggggttctgggaagggcagaaaagagaaacgagactggggaacctgggaaccagggagaatgagggaatggctgggtagatggctctaatccctgtaggcactggggatgtacctggggcctgagaaccaggtgcctgggctgacaggtgttggcttggaagggtcttgttaacccacctgctttggccatgctgtctttattttttttattttataatatttattttaaatagtggagatagggtctcactctgttgtccacgctggtcttgcctcaagtagtcctcctgcctcagcctcccagagtgctgggattacagatgtcaaccacttcacccagcctgtgctgtctttattgaaaatagcaagcgatgattttccaaaccagaaggccaagcaggaaagcccagcgcgtcccttgccctcaaactcagctcttggggaggtgtccagtgacgtcctctctgctgtacaggatgatcccaccccgatcgttaggaagatgtgccccaggaactcgggatttccttagtgtggtgattaggggtgaaatggatcctttgatagggagtttcttgatggaacgaagggcgagagtgtctctgagaagtgctgcagaccaaggagggccagcctgtcctggagcacctggggctgttcttggagtaaggctgaagggccagacactgatggcttatggtggggccaagactggaaggaaaggggaacttccaccttgagagcatccacagttggcgggtgttcacttgtgatggtttttytgcagcattgaggaagtggtggggcggagttgagtaatcagagcctgaagtctaagcagaagcttgggaagtgagtgctgatcaggattcacctgtctgcctggcagtggtcagcccgttstcagcaagaaaccattgacaagaaagtaccacgtggcctgggtagggtcgaagcggaacttagtttcagagaattagaaaaatcttggaggggaaggccgaagaagaaacaattcatgatcaaccttctcagagtctttgtcagtaaccccatccccatcctgacttaacagtttctatgggaacagctcagcatcttgtgactggtggattcacttcctaaattggaggccatgacttgaggcctttgcagttttctgatttaggggaaagtgaagaaagggaaagagaaggtcatgcctttgtaatcattccgatggcctgcatcaatattttgggggcagaattagcttctgggtggccagagcctttggtctaaccctgagtgtctgggcgttgkgcagcagagcgagaaagccctggctgtttgacggggtgtgtccaccagtgcttcctggcacaggtcggccgggctgcttcacttcttgtttccagagattcacggcaccagtccccctctggtacccagcctgacagggccatgttggtgggaccaaagctgtactgttgtttatgacgtgtttcatgtcagtatttcaggcccacccactgggctccccctcccagattgccaaagttgtggagtctgtttttcttagttgaatgtcttagttctctgggayaggtgaacagatctcaagagcaaggaacatcatcgcaggtctgaggaggctagattcccagtcctgttggagttttttaaatctgatttaatgatctgaccctcccactcctatctctgccccatccgagtctggctgctttcccagggggcagagcagctgtgccaaaaggaactctaacgtgaaaagcgcccttcacttgtagcttgtgcaggccagtcttgcttacccctttagattaacaaaactgccttcacttgtctcattgggattaaaggatcagaatatcaagagagattgaagggggaagatgccagccaacaggctgatcctcttagaacctgccctctgattcctgcagctgaagagaaaccaaatgaaggcgattagtctctgcctggggtcccccttcccaagtggtaccactagctgggaacctcgccccctccaccaggccctctccccagcctgtcctttaggattgctgagtcagtggttagatgttcttacggctcttctctgaaacggagttactgctccttcttaggcacccctggctcagccaagccctgacccacctgacgggttttcatgtgtgcctagctgggtggtggacttggagaggcacagggacagcttggggctccaggggggcattgaggcagcactgatgcagcttargattagcaaggtcaaggtgactggctttcacccatatgttcctctgtatggatttcactgagcctcgattgctgccccttttcatggcattttgttctgggattttgctttgaaagttagggctctttcagccttgtggtgagcagtgaattgtcctcgtcctctgcttcactttccagattttgcccagaaatttccctgcagtgcttaggaagctgcctggtagagcaggtttctaagtttgaggcgaagcagctctggaagctgcctctgtccttgctgttggaggcagtgatttaagtagcagttgcctagagatacatcctttctgttttaatctcaaagagagaaaaacccagtccctgtaatcccagctacttcggaggctgaggcaggaggcaggaggcaggagaatcacttgaacccaggaggcggaggttgcagtgacctgagatcgcaccactgtgcgatctctgtctaaaaaaaaaaaaaaaaaaaaaaaaaatagagaaacacccttgtcttccccccgggggtgccaggagttgggcatagagctcgaggaaaccctttgtccccctccaccccccagcatgttgggtaatcccatagcttttttcctttttctcatactccctaagcagccatgcctgattagcaccggcagcggtaggaaagacacatccgttggtgtagacataatttcctgcctcaaatgttgctgttcattttcttttcaccttgttttctcctctggacagcttctcagagaagaaggcggaagggctaagtctgggcactgcctaggtcattggcccatcctgacagggtcagaggaggccaatcatgttgactggtgacttgatagggtggcatgtgacccaaataaaggaaaactaggtttttgccatgtagtaagtgccaacacagagggtgcacccagccggcacagactgtggggcaggaatctgtaatatctcatgtgggaagcaggaatacttgcttggccccaccaggaatctggaaaatgtcaagaggtttcattgcctgaaagagctacttgcggggtgaggagaggcctaagactagagaagaagcgagtagatgagccagttttacgatagaggttgcggatttcacagagcgctgagcacctttctttgacaagaaatcaagtcttaggatctatttaaatgggtgagatccagtgatttctagcaaccaacctaggtcttctggggtcttaataccagaagcaggcttagcacaaaagctcctttggactctaatctgttttctgcgtggtggtgtcaggttaagtagactcacctgcctctttaaatcctgatggattgactgggaacggtggctcatgcttataatctcagcactttggcaggccaaggtgggaggatggcttgagaccaggagttttgagaccagcctgggcaacatagcaagaccctgtctctaccaaaaaaaataaataaataaaaataaaccctgatgggtggtgtgaaaatgagaaggatgaactaaacacgtctgatgggtcaagaggggccatggagcagcactgtcagttgctttgggtgggtttgggcaaggcctgatgtgaaactccagaaccagctcctgcatgaggagaccccagggagatccagttagacacttactggcagytggattacgtgtaaccgttgagaagggtccgtgttgagaataacatctgtctctgtcctttagtatcaagtggggcagctgtattctgtggctgaggccagtaaaaatgaaacgggtggtggcgaaggcgtggaggtcctggtgaatgagccctacgagaaggacggtgagaaaggccagtacacacayaagatctaccacctgcagaggtatgcggcatgagcagcggggccggatgctggcttttgtgtgtgtgtgaatgagtgttatttcctttattgttttatatagatgggattatactaattgttatatcctaacaattaatagttatatactgactgtataaatgttatactcacatttatatagatgggamtatactattccttttttgttgttacttatcatggcctcctctcccagcctgttctgtctgcctcggtctctgaagtccgtgtaggattcacagtatcatgggggacagaagtgctataggttgttgaaccctcctgtcttgacgcatatttctagtcatttccagatgcctacataatccagtaaaactccttctgtgtagatcttctgatgtacttgtatatgcagatttttagcaaatattcctaaaattgaattcctagaattgctgggctggtagggtttttaattctgatatcgtgaaatcgatcgctagagaaattttggtacctctctttggatcaaaggcatcagcatttttaaatgaagcttgaactgatttgtgtactggaatccatatcaaactacacaaatttgctaaatccctaacgaaaacagtaatgtttcagcaaactgtgagcagacccaaagggcgttgatggtattaattatacatcagcttgagtggaagtcaaaccaagctagttttagaagctatccagaactggtaaaggtaaacctgaatctttttaaaaattgtgataaagtacacgtaacataaaattcaccattttaaccatttttaagtatacagttcagtgacatttaagtccatccacactgctgtgaaactgaaagctggatcttaatttctagtctctaaactgaactgaaatcaattgactttcatttggaaaaagccccacttcactgtggtctgtcactttgatggtgtcagagggtccaggacctcagtgccagggtgcgaggagagcagtgctgtgcagtggggaggaacctcaccatcacccagtctcctcgccagagggtccaggacctcagtaccggggtgcgaggagagcagcgctgtccagcggggaggagtctcaccatcacccagtctcctcaccgtcacccagtctcctcgccagagggtccaggacctcagtgccggggtgcgaggagagcagtgctgtccagcggggaggaacctcaccatcactcagtctcctcaccagcacactttttctccatgtctcgttttgctcctcctctggtatttgtatttcttaaagaggattttgaaaagagatggtgaagttggtattttaggtagaagggaccaattgtttcctcaagactaagttggtccaaccaaactgacagagacgaggtctctacatatgaaagatggaacctggccgggtgcttcgggggctcacgcctgtaatcccagcactttgggaggccgagacggatggatcacttgaggtcaggartttgagaccagcctgggcaacatagcgagactccatctctacaaaaaataaacaaaattaggctggtgtggtggcgagtgtctgtagtcctgtctactcaggaggctgaggtggaaggatcacccgagcccaagaggtcagggctgcagtaagccatggtcacgccactgcactccagcctgggccacagaatgagatcccgcctgtctcttacaaaaaaaaaaaaagaaaaaaaagaaaaagaaaaggccagcagtgactgccaccactacctctccccatggtgacaagagaagctttactgtgtcagccatctggctgcccaaagcagaaagcagagctcccctgcagtactctcactcgcccttcttatcgcatcaggccccgctgactccgccccgcaacactctcactcgcccttcgtgtcccatcaggtcccgctgactccgccccgcaatactctcactcgcccttcgtgtcccatcaggtcccgctgactccgccccgcaacactctcacttgcccttcgtgtcccatcaggtcctgctgactccatctcctcagcgtctccaacatgtcccttccttgccacctcttgcctggattactacagcagcttctaacgagtctccctgcctttcagttctccgcaccgcttcaagtgttcagtctggatggtctgtcactcccagcgccaaaactgctgacggcttccctttgccttcaggacgaagtccgtgctgtctgacataacttataggaccttttagccagcctgggcaacatagcaagaccctgtctctaccagaaaatacaaaaatgagccaggcatagtggtgtgcacctgtagtcccagctacttgggaggctgaggtgggaggatcacctgagcccaggaagtcaakgctgccagtgagccatgatcacaccactgcactccagcctgggccacagagtgagaccctgtctcaaaaaaaaaacaaaaaaatcttttaggatccagcttcaggtgtctccttgaattccccaccttgtacctgcaccggttactctgaacttgtccctcttttctccagcttttcccaccccactcccatctgtctcttagcttagccccactcattgtcccatgtgttggttcatcctgactttcctcgcagagcctgcccggtgcactgcatgtcccccactgtgttctcacagcactccgccacccagggccctgtgcccaccgcattatggcatgaacttacagtgttgtgcttggccttgtctagttacacgccccagtagaccggaaactccttgagggtgggagccacatctgtttggtttctctgtgtgtccccctgcctggacctagaaatactcgcctgaatggggatggcagtgagttcgtgaatcacagaggccgccccaagtgctccaggttagctctctgctctagtttgctcttctttcttaggcctgaggcactaaagctgatgaggttgccagagcttgccaaagactggacagattatctgttagaaaccaaggacggctgggcgcggtggctcacgcctgtaatccccgcactttaggaggctgaggcaggcagattgcccgaggtcaggagttcgagaccagcctggcctacatgacaaaaccccatctctaccaaaaatacaaaaattagctgggcgtggtggcgcatgcctgtagtcccagctacttaggaggctgaggaaggaggattgctggaacccaggagatggaggaagcaatgagctgaggtcgtgccactgcactccagcctggcgacagagcaaggctccatctcaaaaaacaaaaacaaacaaaaaaaaggaaaaggaatatatgtaccattttcattttaattttaaaaaatctttctaggccaggcacggtggctcacgccactgtaatctcagcactttgggaggctgaggcgggcagatcatgagctcaggagattgagaccatcctgtctaacatggcgaaaccctgtctttactaaaaatacaaaaaattagccgggcgtggtggcgggaacctgtagtcccttctactcgggaggctgaggcaggagaatctcttgaacctgggaggaggagcttgcagtgagccaagatcgagccactacactccagcttgggtgacacagcaagactgtctcaaaaaaaaaaaaaaaattctaaatgttttcctactccgtcaaaccacacacctaccaaaaaaaaaaaaaaaagcagggggcttatactgtacatgttgttctgtaacctgagataagaattgagtagaagagaccgggcgcggtggctcatgcctgtaatcccagcaccgtgggaggccaaggtgggtggatcacgaggtcaggagttcaagaccagcctggccaacatggtgaaaccctgtctctactaaaaatacaaaaattagctgggcgtggtggcgcatgcctgtaatcccagctactcaagaggctgaggcgggagaatcgcttgaactgggaccctggaggtggaggttgcagttacccgagatcgcagcactgcactccagcctgggcgacaaagggagactccgtctcaaacaaacaaacaaaaaaaaagaattgagtagaagaaaatactttgtcctgggaggcaaatggttctaggccctcctggcctctcagagctgatgaaagcagatcagataatcctggatcccaaacccaagttagtcggctagttaccctggccctaaaccgagactggttcatgcttggaggcatctcctttgtgtttttctcgcaccttgtagtataatgccctgggcccagcaagctctggaaaaatgtgtaatgctgatggaaggggtgatgagccacagcaggtagcctggggtctcttgtgtggtcctgtttctggtggctggtggggcacgtcgtgggtgtgtgttaggagccagccaaggtggggtgtcaggctctcatacgtaacttctcactcccaccagtaacctgctcattgcatggaaacttgcttgtcagctccccatgaagaagctggatctgaaaagcctcttgtctcctttctctctaccatttctctttatacccctttttttccccgctatagcaaagtacccacgtttgttcgaatgctggccccagagggagccctgaatatacacgagaaagcctggaatgcttacccctactgcagaaccggtgagtgcagcyggggccacgtcggccaggcaggggcgggcagcagagctgtgggtcccacctgcgtgttccggattaggccagggaaaggctcgggctgggtcccttccggctgatggtgggtatcagtgctgtgtccagcacagcttggtggacagcagggcgagaagcaccggtcgtcacggcctgagagcacagagccagtctctcacttggggatgctgcgattttgattattgttattcattataacattttagtatatttttctagtcatttttatttatttatttattttttgggagatggagtctcgctctgttgcccagactggagcacagtggcgtgatctcggctcactgcaacctctggctcccgggttcaagcaattctgctgcctcagcctcccgagtagctgggactacaggcgcataccgccacgcctggctaattttttgtattgtagtagagacagagtttcaccatgttgcccaggctggtctcgacctcctgacctcaggttatccgcccaccttggcctcccaaagtgctgggattataggtgtgagccactgtgcccagcccagacacattttctcgaaaaattttagatcattactatttattttattattattttttttttgagatggagcctggctctgttgcctaggctggagagcaatggcacaatcttggctcactgcaaactccgcctcctgggttcaagcgattctcgtgccccagccatacaagtagctggaattacaggcatacaccaccatgcccggctaatttttgtatttttagtagagacggtgtttcaccatgttggccaggctggtctcgaactcctgacttcaagtgatccacctgcctcggcctcccagaatgctgggattactaatatgattactaattttttaattgctttttttgtctcactctgttgtccaggctggtgtccagtggcacaaccacagctcactgcagccttaacctcccaggctcaagtgatccttctgcctcagcctcccaaatacctgggactataggcatatgccatcatgtccggctaggtttttttttttttttttttggagagatggggtctcaccatgttgcccaggctggtttcaaattcctgggctcaagcgatcctcccaccttggcctcccaaagtgctggcattacaggcatgagccactgtgcctggcctaagtttctcatttttcttcagtgaatggataacattttccttgtcactaaggtgtctggtgttttgttttgttttgttttttaatttataatagctgcatagtattccatcatatgaatgaactgtggcttctgctgaaacagcatgttctgtaattgaggatacaggtataattattttcttaatcttggccagtctcctgcatagagtttcttgaaaggaaaggaaagatttgaacctccacagagaactttctattctagtccagacattcttaaatttctttcgagtgattcagattcttagccttccaagattcctaggtttccagggccatctaggaatagacctgttgggagggcctaagctggtactgattcataaccctggggagtcctgagaggtcccctggcacttgtctgtgaggtaggtgacctttcctcccaccagcctccatgtgtgggtacagacagtgttgggctgcggggtcctcccaccagcctctgctgacctgtcctcctgcacttgctttctttgttggcacctggtactccctagagtctgatgagtctgggatccttacgtgacgcatatcacccttatcctgtggactttgggaatgactgcaatccagaatacggggtcattgctctttccaaccctcagtggccccacacaggttcagggaccttgtatcaggagatttgcggtcattggtggggtctgggatgtgtaacccttagagttttcttgctgtagctgaagcacagccctccctactccttaagcactgggctggaagttagattcttggaaatgagggatgcacagatgttcttaaaagacagggtcgggcacggtggctcatgcctgtaatcctagcactttgagaggctgaggcaggcggattacttgaggtcaggagttcaagaccggcctggctaacttggtgaaaccccgtttctactaaaaatacaaaaagttatccgggcatggtggtgcatgcctgtaaccccagctacttgggaggctgaggcaggagaatcgcttgaacctgggaggcggaggttacagtgagccgagatcgtgccattccactccagcttggacaacaagagcaaaactccgtttattaaaaaaaaaaaaaaaaaaaaaaaaggcagtatgcagtgtggctgggtgtgtctggtctagggccaaaggtggattttcttgatgtctaagagagtcgcagtgagcatgtgttgcaagtgtggacatctccctgcctggggcagggttctgggtacacagcttgtgccaactgagagatgcccctgttctctgtgtcattctgggaagagtgttgcggctgacatgggcatttttctgcacgttaaatgttcatatattgatccttggccaaaagaaaagaaaaacataatttctgtatcagcaccatgcgctaaccaattgcgccactggagctccactggaaaaatgtaatttctaaatatttcatggagacagggagtaggggaaggaaggttggtttcctcagtgggtgctgacctcctattcaggatacaccttcacacagaatggatatgttgaatcttagatctgtttagttagacacttgctcttttaaaataagagataccagcaggcaaggaaggctactttccagttccctctgggggctgatgggagagaggttattagttcagacatcttagcttggcctcagtagatccaagtttgaaggaagatagatgaaggagcatgaagtaaaatgcctcatggcttttggaaggctcttcctttctctgagcggagtgaaaacagattgggacaccctggtaatgatcagctcttgctgttcttagcttgtttccctctctctttttcccttgaagctgatgggatgggctggaagtgaggagagggtaagataggagttggtctgtgaatgaatgaaagtgggaaaaggaaaagaaagtttgtttctccttccatctcttcctggaactatagtcctcggctggatacagtatcactaagccatgcttttatttatttattttaaatttttttattttttgagacagagtctcattctgtcacccaggctggagtacagtggtgcaatctcggctcactgcaacctccgcctgctaggtttaagcaattctcctgcctcagcctcccaacagacagtgttgggctgtggggtcctcctcctgtcagcctccatgtgtgggtacagtgcctgggattacaggcatgcgccaccacacccggctaatttttatatttttagtagaaacgaggtttcaccatgttggccaagctggtctcgaactcctgacctcaggtgatccgcccgccttggcctcccaaagtgctgggattccaggcgggagccaccgtgcccggccctgccatgcatttaaaatgccttattagtctcatttggaaatctctgctctcccactgcaaaagatttcctgcggcttttctgtgtactttgggttacagtttgaacaacagggaatactggaatgcagaggtgtttgagggcctgggagggctggagaaggtttggggaggattgtttgatcacccaagtttrcatgaaaaggtcagcaagggctgtcaccctcatgatttcggaaaaccaggttgtcagaactgagtggatctgtctctcggggtctcacaaagatgaatgtgtaaaaaccccagcgccagtctatgaagttacactaaaacgcagaattgctaccgaaacgggacattcccattcgatgatcagggcattcttttcttgtggattcttctacatgagaaaccaaattataatcagaatgccaatgtgtggcaaagaatgtccgcttggctgagtgatcagattcttgggtccattgatgagcacgtctcggagaggccgaactaggagagactttcttagaggagatagattcaaaaaaggtgcttagttggagaagtttagtggctggtgtcatcagaccaggccatcctggcactgctgcccccactccagggatggcgctgccagagatgccacatgcgggggctgggcctccggggcccaccacggcacaggagaatttctgctgacgagatactatacccatgatttccttttcttattctaacgtggttttcttgaagctgctaacagggcagttacttcagtgtaggcctttcagttgtaatcttaatctggtgcttccttctaagtgtctttcgttgggtatgggggaattactgacagtcttttgggttatttctgtgcgtgatagctcttactctttatatttcaactttgcctcattttgtgctccggggtcaccttaacttcagttctggagtttrttaccccacacactctacaaacatggcagtggggcagccagcagaagtggacataggtcctaaattcagagggtacagaatgaaccgggcggtctcaggagcagagctagtctgttccccagtgacatgagaggtgcagtcattttctctgataaataattgaaccatgctttctaaggggttcccattacaatgagcaggagtgcagagcctgggaggtttgattacagcgagaggaagggtgcaggaggcagatacagtgcatggccaaagcaccctgctctgtgccccgggaggtagaggctggggtaggggtgggaggcgccsgagaamgctctgatgccagagtgatgagttgcrgcacctctgctgatcagagctggtccctgtcagtgccctgctgaaaagaatcccaagaagcccatagcggcgtcgctttaattaaattccctgtttggttttttgggatgtttgtctgagtgaaatttgagggttggtgcgttaaggtatttctgactcactggggcttggaggtgaccgtggaataagccacagggagtaaagtacactctgccattcgtcctccttgtggggggtggggggcagatatttcttcatcttcattaatctttttctctcttctttccatgtccttgcctcggagcagttattacagtaagtattgtcaagggggttggaactgtagatgatgtataagaacaggagagagaaaaatgtaactgcactggtggtcttgggtgttctttcccttggctgatgtttggagttgctgaggctcagtcctgtcagtggactaacaaggaacctgttaactggcatgatgacctcctgctttaagctgcattggcctgcggctccattaagtgcatcctggctgtgggtctgacatggacacagtggctcgaggccctgcctccccaggtcacaccttttcaaggttgtagagagagctccattcaactgacctgaccgacatcccttccccatctgtgcatctgttgagtccactgagcactgatccttggcaaagtcgtgaagtcagcggggtttctcttccacagccgtcccctctgtcattgcccacccgcccaccattcagcacactcatctgagtgccttgtccctgccggtaaacactggctgtctctgggaaactggttcctgctgaggcgttaatgggtgaatgtgttcctcctttgagaagttccaatttttaagaagcaggaagggagggagggaggcaataattagcttgaagggttcagttactgagaagaaaacttaaggccttagccacaggctagttggagggaaaggggccatggtgagtatcttcgatgggttaggaagtcttctgtgctctttccacactgcttactacccagagtggctaaatgyatggattctgaagtcagacgaaactgttttgagacccaactctgtcgtgatctctgtgacttttttttttttttcgaaacggagtcttgctgttgtttcctagactggagtgcagtggtgcaatctcggctccctgcarcttctgcctcctgggttcaggcgattctcctgcctcagcctcccgagtagctgggattacaggcacccgccaccatgcctggataatttttgtatttttagtagagacgggtttcaccactgttggccagactggtctcgatcttgtgacctcaagtgatccgcccgcctcggcctcccaaagtgctgagatgacaggcgtgagccaccatgcctggcccgatctctgtgactttggttaagtcacctaacctctttgaacctcatctgtaaaatgagggtgattctacagagctctcaggctggggtgaggattgaatgggataatacatgcctagtgtgtcgtgggctcccagtcaagttaactgttattacaaggcagaggctggaatctcctagctgcccatgatccagtaatgcccatctccagtaatgggagatggttactctcaactgtgaacctagtgactttcatgtattttttttccttcttccagaatgagtacatgaaagaagactttctgattaaaattgaaacctggcacaaaccagatcttggcacgcaggagaatgtgagtagtagttcccaaaagccccaggggtgaggtcttgagtctctgccttgtagcctctccagggctaccatggggtcctctctgtggtcctcttttgcctggccgggaaggcagtggcctctgcctagacctatcttaccagcatgggattgctrtgtctctgatttgcaaaatgtgatctccggaactttttatggggccttctcgtactgcttggattggtgcagttcctggtacatgggagctatatctttaaaagaccaaaattacagttttctatagagcacaatttgcagtaactcccaaaaaataaaatacacctatcctttagcatttccatgcccaagaatttagacagttattttcacatgtgtgaaataacatatatacaaggagactcattgcagtcttctttgtgtagccaaagatcaaaaacaatgtaagaccatcctgggcaacataacaagactctgtctctaccaaaaataaaaaaagaattagctgggcatggtggtatgtgcctgtggtcccagccactctggaggccgaggctggaggatcatttgaggctgggaagtcaaggctgcagtgagctgtgactgcaccaccacactccagcctgggcaacagagtgacaccctgtctccaaaaacaaaaaaacaacataagagcccgttagaccgggtgcggtggctcacgcctgtaatcccagcactttgggaggccgaggcaggcggatcacgaggtcaggagatcgagaccatcctggctaacacggtgaaaccctgtccctactaaaaatacaaaacagccaggcttcatggcgggcacctgtagtcccagctactcaggaggctgaggcaggagaatggcgtgaacccgggagtcgaagcttgcagtgagccgagatcacgccactgtactccaacttgggtgacagagcgagacactgtcttaaaaaaaaaaaaagagaaaaaaaaggcccgttagtaggacaacgttaaatgcattgtggttcagccaaatagtgacatccttgcagccatggaaaaaccaatagagagcagtcttcaagttgactgttcagtgaaggatggaagttatgaaacaaggtgtgtgcatgccgcccttcatattaaaagaaaaatccacgcacatggatgtttgtatgtaggatctcttagaggtggctgttactagactggggacgagggacaagcaagaagaggagttactctagttactctatattgtatccttttgtaattttgaatttgtgtcataattttgtattatgtgcatgtacagcctgatcaaaataatcagcatgttgctaaacagacgccatctctagaagggtttacagtctttacagcgggtcagcatgttgctaaacagacaccatctctagaagggtttacagtctgtacagccgggaacacatggaaatggtgtgggcaccgtaaacatccggaaggcgttttgacctgcagaagtgacgtttascctcaatagtcagagcattcgttctcagtcatgtcacttaaaatccagcgggggctgggcgggaggccaaggcgggtggaacacttgaagtcagtagtttgagatcagcctggccaacatggtgaaaccctgtttctactaaaaatacaaaaattagctgggcgtggtagcccacgcctgtaatcccagatactcrggaagctgaggtaggataatcgcttgaacccgggaggcagagtttgcagtgagccgagatcgcgccattgcactccagcctgggcgtcgcagcaagactccatctcagacaaacaracaatccagctgggttcagtgttgtgcacctatagtcccagctcctcaggaggctgagacaggaggatcactcaggcccagctcctcaggaggctgagacaggaggatcactcgggcccagctcctcaggaggctgtgacaggaggattgctcgggcccagctcctcaggaggctgagacgggaggatcactcgggcccagctcttcaggaggctgtaacaggaggatcactcaggcccaggcaggagactgagagaggaggatcactcaggcccagctcctcaggaggctgtgacaggaggatcactagggcccagctcctcaggaggctgtgacaggaggatcactcgggcccagctcctcaggaggctgtgacaggaggatcactcgggcccagctcctcaggagactgagacaggaggatcactcgggcctaggcaggaggctgagacagtaggatccctcggtcccaggcaggaggctgaggcaggaggatcactaggagcctgaggcaggaggatcactccggcccaggagttcatgctagagtgtgctgtgatcactcctgtggatagccattgcctgagaaacacggtgagaccccatctcttaaaaaaaaaaatccattctcccatttctttggataattttgtatgtaattgtataattacttatcattaggaatcttacatctgtggctatgggaatggcagttcctaggtgtccattctggctaaaggatattttataactgacaaaaactgcatagtggttccccacttgttcccacaggtgcataagctggagcctgaggcgtggaaacacgtggaagccgtrtatatagacattgcagatcgaagccaagtgctcagcaaggtaggatccgtttaaagacgtgggtggccttcgagacgcagaaatgacttctcaatgctaaagaaaccaggaaaccatacccaacttggcacaaaaggaaattctgatgtgtcttgcttgttttatttttaaaagtgagtattaggagatttcttgtcttgagttggggatgccrccagaaaattagtggcccaaatttgtgtgccctgtttggcctctgaaaattattactggactaagtaggtattgtagctagagtattttgccctgctaaaatgatgcttagcctgaaaaatcggagcaccacttctcaaatttatttttccaactcagtaattaaaaaaacatttacttcctgcctactgggttgtggaatattgtcaggatctctgggttccaggtgagggatgcagaatgcagggaaagacaggtcccctgccctccagaagtcggtggcgccttttcagagtaacacacactggagcagacccctggaaaaggacagtccactggtggaccatgaccttggtcaaaagagggaccaggtctggcttgctcactgttttgcacccaagaagtatttgctcagggaatgagggggttagattcctcctcattcattaccattcttactaggcagaggcctcattgggattaaaagacaggaatgtaactctctgcccactgatagggaatgtgtgtttgctctttgtatcccaggggtgtgatacctctttcctgtggtcactctgcacttaagatattttggggcctggcacggtggctcacgcctgtagttccaacactttgggaggccaaggtgaccgatcatctgaggtcctgagttcgagaccatcctgcccaacatggtgaaaccccatctctactaaaaatacaaaaattagccaggcctggtggtacgtgcctgtaatcccagctacttgggaggctgaggcaagagaatcgcttgaacccgggaggcagaggttgcagtgagcagagatcacaccatcgcactccagcctgggcgacacagcgagactccatctcacacacacacacacacaaagttattttgatttgtgcatttccgaaaagatataaaaaccatcttgtgcttccttgcctaatatcccaacccccaccttcaaaacgttggtggatttttcaaaaagctttttatggaagtttaacatatacagcaaagtgaatataagtatgcagcttgatgaattttctcaaactggatactagcaaaaagtatgattctttgagtattttgtcaactctggttgatctgtgtgagtggagggaagcagtgatggtgaatatttattttttaaagcacacataaatataatctcctcagaggctgggcacattggctcacgcctgtaatcccagcactttgggagaccgaggcaggcatatcacttgaggtcaggagtttgagaccagcttggccaacatggtgaaaccccgtctctactaaaaatacaaaattagggccaggtgcggtggctcacacctgtaatcccggcactttgggacgccaaggtgggcagatcacgaggtcaagagatcgagaccatcctggccaacatggtgaaaccctgtctctactaaaaatacaacagattagccaggcgtggtggcaggtgcctgtaatcccagctacttaggagactgaggcaggagaatcgcttgaacccaggaggcggaggttgcagtgagccgagatcatgcctttgcaccagcctgggcaaaaagagtgaaactgtgtcaaaaaaaaaaaatacaaaattagctgggcgtggtggcgcatgcctataattccagctacttgggaggctgaggcaggaggatcactggaactcaggaggcggaggttccattgagctgagattgtgccactgcacttcatcctgggcgacagagcgaaactctatctgaaaaaaaaaaaaaaaaaaaaaatcggccggacatagtgactcatgcctgtaatcccagcactttgggaggctgaggcatgtggatcacctgaggtcaggagcttgagaccagcctggccaacatggtgaaaccccgtctctacaaaaatacaaaaattaccctggcgtggtcgcaggcgcctgtaatgccagctactcaggaggctgaggcaggagaatcgcttgaacccaggaggtggaagttgcagtgagctgagatcgtgccactgcactccagcctggccaacagagtgagatgctgtctcaaaaaaataaaataaaaaaataaggcagggcgcggtggctcacgcctgtaatcccagcactgtgggaggccaaggtgggcggatcacgaggtcaggagatcgagaccatcctggctaacacggtgaaacccygtctctactaaaaatacaaaaaaaattagccgggcatggtggcgggcacctgtcgtcccagttgctggggaggctgaggcaggagaatggcgtgaacttgggagatggagcttgcagtgagccgagatcgcgctactgcactccagcctggccaacagagcgagactccctctcaaaaaaaaaagaaaaaaaaaaaaaacttctcagctttgggaaatactttatgagagagagaaatttattatctttgttatttttgttaagtagatgctataagtttgtatctcctgagcccacattagtcaatgtagagggacagctgaaaattaaacttttgttgtggttaattaacacaggaaattgactgcattataaatctgtgaagtgagactcaccagtagtggataggttccatacactgaacatttccagtaatgattttgttaaaacaagccagagggagattgcactggaagatttaaggaatgacagccgggtattctgagcgctggctgtattttagagtcacttgcagagatttaaaaaaacaaaaaacaaatctgtgctgccgtcacctgcagatattctcagtcactgggttttagttggagtgactcaaaaatctgtgttttaaaaaggtcttccctggtgatctggatgctcaccccaggttgaaagtctctgtcttcaacacggtaaatatgtgcctgctcagacagtctggtgatactttcacactggcaaaatggaaaacaaaccctatcggagaaaatcacatagaactctcctctgaggctaatgtaaacagttctacatcttgtttataacattttcccatatttgctttgtgccatcagcatcaagatctggtatggagtgaatgctaatgaaagatctgttctccccatctctcactccctctcccactcccctccaaccccaattccacaatttctctcaggattacaaggcagaggaagacccagcaaaatttaaatctatcaaaacaggccgaggacccttgggccccaattggaaggtaccattcacaccttcactgccagggggctgggcagcatgtgggtgggccgctccctgtggaggaggggcatggctggggtgagctggggacggcctgaggtctgcccgttgttacttgcgtacccatgggtatgtttctaatgcagcaagagcttgtaaaccagaaggactgcccatatatgtgtgcatacaaactggtgaccgtcaagttcaagtggtggggcctgcagaacaaagtggagaacttcatccataaggtaagtagctcggctgaggccttcccagtgactgcgtgtgtgtgttgtgggggggtggtggagaacttcatccataaggtgagtagctcggctgaggccttcccagtgactgcgtgtgtgtgcggtggggggtggtggagaacttcatccataaggtaagtagctcggctgaggccttcccagtgactgcgtgtgtgtgcggtggggggtgtttggcccagtgaagaagatggcccagcccatgtggcctgcatgacagggttgccaacatgagcatacctcacagtttggcggcttcccagctgcccaccttcccttgcactgaaatgtcttacggtttaatgctgtccttccagggacaccacatgtgacagggaaggaaactgaggcaaaagaaggccacaggaagggacttgctatgactgacctacagataaaactcagtctttcttttcttgcagctgaaaggcaagaggtgctgggagccaggttggccggtgccctgaattactctgctgggcaggtctaaggagttttagagccttttaatcctccgacatgtttgagcctcacttgggccatatttcatagctgctggccagttttaatctggcattagacaccagagacaggaagaaatgtggcagtggtttggggcccttggcttgcctaggagttcatgggctgctgtcttgctggtgctttgggcagagggcctagtgtgaggtaggcatccttctttcttgggggctccctcctatgtgaagccatacctgttagacacgtgaaggcaaaggtcattgacccatggctggtccagataaccagccgggcattactcctcctcctgtccgcccgtccccagtctagtgtgggtattcgtgtggagtgcatggagagaagggctgtggcagcagcctttgccttctgcgttctaacgtggttccctcctttctatagcaagagaggcgtctgtttacaaacttccacaggcagctgttctgttggctcgataagtgggttgacctgaccatggacgacattcgaaggatggaagaaragacgaagagacagctggatgaagtaagtgggggctctgggggctctcaattagataaacaaacgaagattaaggagactgktttgctggggcgcttcaccgagagcaccatcctgtagttctgggaacacgtcagtrtctgctacagggacggtatcctgggcagtacgtgggcactatacggaagaaaacagcctgtgctcttgaattgacagttgagttgaagtcttggcatacccacrgagacaaaaatggcagtatgtgccgaatgccaagtgggtaatacagctgctacagcgatgcttcagagcctggtgggaaagagcgtgcggggctgcagagctggaggtgaccctgggaggaggcaggctgggctgacctgtgaataccatgcacattacccacagaggacagccacagcgcacgcaggagctgacagctggcggctgtctacggtcattttgagctatcagagttgagagcttttgcttttctttttttggtcttggcgtggatcgcagaaggagggttccctgttccttaggagcctaaagacccagcacttctcatgcctcatttggagatgctgatgcttccttgagaggcccactcagaggagattgtcagttagtaacattcaagcactcactgtgtgccgtctaccattctgagggcctttacctactgcagtcttcacgataccccatgaggaggcgctgctgctctccctaccctcagatgaggaagtggaggctctgagagctcaatgctgcggtgctctgggtcacaccgtcttgcaggtgatatggtcagagtaagagcccaggactctctggccctggaaccacagctcttaatcactcccctgtactcctccctctaaatgcaattttgggccctcctgccatcttggagctaaaaatatgataaggcaggaagctctgtttcataagaactgccatcacttctccctccttgccccaggtggggttggcatggagtttgggtatccagtagaggcattgctttgcaacagcccactcagctctcctgcagggcctcaggtgagagccaggcttgggcgcccatgctgcccatgctgcacggacggtgtctgcttcaccatgctggtctagggcgaaaattgggtccagaagttcttcctctggaaccccgcagggaactgtttttaccatccagaatgacacttttcctgggctgactcactggtaagtggtgcactgagttggttcctcttgaagacagatgttttggttattcatttagctacatttagcagggaagtggcaggatttcattggggcacagtccctgattctttcgctaaggatctttaggaaggggtagacctcagtgtccaggggtctggtgattgtgactgtgtaagagaagcctgaggcttttggtcaccctagtcctgacaaaaagaaagggaaaatgttaacaaatgaggaaacatggagactttcattggagttttagcctggagcttcagccatccactgcctgacaaaggccagcatgacgtatgttggggttcgtggaagtatttgctgtccacctttcattccttcgggtagaactcaaattcttggagctagaagaactctccagaggatctactggatctgctttgttcagatccaaactttgagagccctcagtgttagagagttattttttaatctctcmgacccttttgaaaatctttctcggccaggcacggtggctcacacctgtaatcccagcactttgggaggctaaggtgggcagatcacgaggtcaggagtctgagaccaacttggccaacatggtgaaaccctgtctctactaaaaataaaaaaaattagccaggcgtggtggcggacacctgtaatcccagctgctcaggaggctgaggcaggagaatcgcttgaacccaggaggcagaggttgcagtgagcagagatcatgccattgcactccagcctgggcgacagagcaagactccgtctcaaggaaaaaaagaaaaagaaaagaaaatctttctccattccatggagaatcatgccaaaagcttaggtgatcactgtcctccaggataactgcaaatagaagaaactctctttggaattagaattttaaaactcatctgcagtgggagagaaagcaagtccacctcattgtggtacatgttgtggtctcttcagcaactgtgcaggacctttgtgtgctgactacgcttgatgtggcttgcctttttatttttttgtctatctaaaaatatatgtttcatcaaagttatattttgtagttttaaaactcagcatcccaggattatgagtcccacccctcagaagcagccccttgtaattccgatggttgttgcttttgttaattacttccatactttcaaataatctatgctgatgctcttagtagttcttttttttttttaagaggtgaggttgtgttctgtcacccaagctggagtgcttggcgtcgtgcagtggcatgatcatagctcactgcagcctcaaactcccaggctcaaaatccttttaatttttcttatttatttattttttttctgagacaggctctcactctgttgcccaagctggagtgcagtggcacgatctcggctcactgcaagctccacctccctggttcacgccattctcctgcctcagcctccccagtagctgggactacaggcgcccgcttgtactcggtagttacagtggggggaacctctacctcagggtactcggtagttacattcgggggcgggaacctctacctcaggacttcgagtctttttttcacggaggcttgtcactttccctatagaggactcccctgtctcttgctgtgggagacaggcaggcagccagcattctggaggccacactgaggaagggtcccagtgggctcattgtgccattgattcgctttaactttaattccgtcgtattctgcctcttgcccaccttccccctagcagcacctggggtcctgaggtcagggttccctcagcgcttcagagagtgaacctcctggcttttgctgtgaaggaaaggagggtggttgcttgacttccagagcaggagaagggaacaccagttcctaaccgttctccatttggactttcaaaaagtcaccagttttgagccacacctggtactcccatctgcagcgggacctggtgcttccagttcctgagcctttgcagaacctgcagctccttctccgctctccatcctccaggcacttaggttcagcttttgctgctctgcaaattagctactgactcttctgtcctttttccatctcccaaaaggttgttaactggctcttacctgctgtggtgtcctctgttcctgttgtcttcatagtttttatctttttaaattcctttactgtcatgtcatagggtttgggggaggaatagagatagatgcctgtcttccatgcaccgtgatgaactgcacacttggaataggaattatgactgttagtctctaagccagtacatagtcgtctagtgcaggcagattttgtttgtgagtgatgaagggtcactgcaaggccacagtcatcactgctgtaactctagtccctgtccgggcggacccaccattcttgaatgaggcttgaagatttgggaagcaaggcatcgagagattagttcttcgccctaaaaagaaaaaatttctggaactatgtgcctgtaggaaagcagtttctgtctctctctttctccccaacttgccttttttctccctttcccaagctcttactctcttaagaggcccataatctgaaaaatggaaggaggtatcttaaaggtcatttggtccaattatatgttcagtgcttgagtactctctgaagcttccctaccagcctttgcttgattactgcctgtaatggggaactcactgtctcccaaatatggtagtaataaaaatatttgtattattaatagaagctaacatttattgaggacttcctgtgtgcctatcacgtatgctaagagtttcacatgtattacatcacccagttttcatggcaacctgtaacacaggtattagtttcattttatagataaactgtggctcacagaagttgaggacgttttataattcactgaacaagtacctcttggcctttggccattaactctttagataatgagattcagaaaagagaattcacttaaaaaatgttaagaaaacttgttttctttttttttttttcttttgaaacagagtctcgctctgtcacccaggctggagtacagtggtrcaatcttggctcattgcaacctccaactccccaattcaagcaattctcatgtcacagcctcctgagtagctgggactacaggtgcccgccaccacgcctggctaatttttgtatttttagtagagacagggtttccccatgttgcccgggctggtctggaactcctgagctcaggtgacccacccgcctcagcctcccaaggtgctaggattacagttgtgagccactgtgcccagccaagaatctaaaattttattttattttttttgagacagaaccttgctgtgtcacccaggctggagtggagtggcgccaggctggagtgcactggcacaatgtcagctcacagcaacctccacctcccaggttctagcaattctcctgcctcagcctcccaagtagctgggactagaggcgcccgccactacacgccactaattttctatttttaatagagagggggtttcaccatgttggccagactagtctcgaactcctgagctcaggcaatgcacctgcctcggcctcccaaagtgctgggattacaggcatgagccaccatgcccagcctctaaaactttcataggagctgcagaggctgcaggatccctatatgtgaaggatgacactgccctcatggagtctctctctctctctctctcttttttttttttttttttgagatggagtcttgctctgtcgcccaggctggactgccgtggcgcaatctcggctcactgcaacctctgcctcccgggttcacaccattctcctgcctcagcctcccaagtagctgggattacaggtgtgcgccaccacgcccagctaatttttgtatttttagtagagatggggtttcaccatgttggccaggatggtcttgaactcctgacctcaggtgatccgcctgcctcggcctcccaaagtgttgggattacaggtgtgagccaccatgcccagccactcagggagtcttaattccctccaacctgctggcagtgattgcagaccatctggaacatcagccaacatccccaattatggaagtagctttgttttcttttcttttttttttttttaagagagacagtctcgctctgtggcctaggctagagtgcagtgctgtgatcatagctcactgcagccttcaacttctgggctcaagtgatcctcccacgttaagctcctaagtagctaggacttcaggtcccaccactacacctgactaatttttttagagacaagatctcaatatgttgctcaggctggtcttgaattactggtctcaagtgatcctcccaccttggtttcccaaagtgctgggattaccatcatgagccactatacctggccctgttttctttttaaatacagtttaaggcacggtggctcaaaagcctgtaatcctagcactttgggaggctaaagttgggctgatcacctgaggtcagaagttccagaccagcctggccaacatggagaaaccccgtctctactaaaaatacaaaaatcagccaggtgtggtggtgtgtgcctgtaatcccagctacttgggaggctgagacaggagaatcgcttgaatccaggaggcagaaatggtagtgagccgagatcatgctgctgcactgtccagccttggcgacagaacaagacagggtctcacactgttgcctaggctggagtatggcagcctgaaacgcttggattcaactgatccacccacctcagcctcccaagtagctgggactacaggtgcaggccaccacgcctacctaatttttaaaatttttttaatttttgtagagacaggatcttgctatgttgtccaggctggtctcaaactcccagccacaagtgatccttccacctcagcctcccgaagtgttgggattgtaggcgtgggccaacacacccagccagcttcatttctgcaccgaaccttttattttgaaatgattgaaagattcacttgcagttataaaaaataacgtggaaagatctatgtaccctttacccagtttttgccaatggtaacatcttgcaaaactatagtacaatgtaataactcggatattaacattgacactttactatttttttagatcaaaggtgtatttcatacttaatggtcaaaatgattttcaaaagatagaaaaaaaatttaaaaatagaagtccaaataactaataggtgaatacataaataaaagtcttcttgtttcagcccctggcctcattccctaaaggaaaccactgttaaaaacaaaaacaaaccagggctgggcacggtggctcacacctgtaatcccagcactttgggaggccgaggcgggtggatcacctgagcttgggagtttgagacagcctgagtaacatggagaaaccccatctactaaaaatacaagaaattagccaggcgtggtggtgcacgcctgcaatcccagctactcgggaggctgaggcaggagaatcacttgaacccaggaggcagagattgcggtgagctgagatcgcaccattgtactccagcctgggcaacagagcgaaactctatctcaaaacaaaccaaccaaccaggattgaagtttctattttcctattttcacatacacattttcttcagccatattatatgtgtatgtatagcctacattggctaaatctgaggaacaccacaaacatcagataaatctctcatgtcgtgtaggccccaggaaacaggaaataagcattcttagatcattgtaagactgaagtaatgggctgggtgcgatggctcacacctgtaatcccagcactttgggaggctgaggcaggtggatcatctgaggtcaggagttcgagaccagcctggccaagatggtgaaaccccatctactaaaaatacaaaaattagctggatgtggtgcacctctaatcccagctacttaggaggctgagacaggagaatcacttgaacccgggaggcagaggttgcagtgagccaacatcatgccactgtgttctagcctgggtgacagagcaagactccgtctcaaaaaacaaacaaaaaaagattgaagtaatgaattttatttcagtggtatggggaaccttgtttctgacagtaggggaagctatcatgttcctggtaggaggttgcatcttatttcaagcggtgggaaaacaggacctggctttgcattagtaactgaagccaggtggtgaactctcagcatgtgtaaggagccggctgagaaggagctttgctcccatgatattaaattatctgattattgaaaacttttgtaaatggtcattagtgagcaaattgtctttttaaaaattctattatgaaagagttttaaacttaacagaaaataggcaagaacagtgccaagaactcctgtacactcctttgcccagagactattcctttagagcaaaggctacagcccagaatcacgcgcttcaccccattcatcacagctctcctttctgtccatctggtgccactcctcagttttcctgaacttccgcgattttggcgtttgtggaggttataggctgatcattttgtagaatgtctttcaatgtggattcgttgatgtttctgcatgattagaccccacctgtgtgtacttgaagcctgaatgtcacagactctgttctttttatcctattctgtgtctttctgtccagttactggtgaggttactgctgtcgccttgaagcacaaggtgttctgggtttgtcttgttttttcatgaccctgtaactggccacatcttcaaggagcgctgcttccatatagtggaggggggtgtttggaaatgagatctggttgctggtgtgcctatttccactagggtattgcagctcccagaccttctcataggatagagctaggggacttgtacatttatagttatttctgtatctgcgtcatatatcatgttcacacaaatgcatctaattccaatctaacatcacagagttgtcttttaaaaatatgacaagctggccatgcgtgatggctcacgcctgtcatcccagcactttgggaggccaaggcaggcggatcacctgaggttgggagtttaagaccagcctggccaacatggagaaacctcgtctctactaaaaatagaaaattagccaggcatggtggcacatgcctgtaatcccagctactcgggagtttgaggcaggagaatcgcctgaacccgggaggtggagggtgcagtgagccaagatcgtgccactgcactctagcctgggcgacagagcgacagagtgagaccttgtctcaaaaaaaaaaaaaaaaaaaaaaaagtttcccagtggagaactactgccagagatagaatctccacaaaatgtggcagtattaaattttcagtgactagaatacaattctgaagtgggctatggcttaaaattccaggttcttcagagcttctatacacatctcctttgctataggacagtgtctggaacgaaagaataaaataaacaacatttgaaacagggtctcaaataattttttattggccgggtgtggtggctcatgtttgtaatcccagcactttgggaggctgaggcgggcggatcatgaggtcagaagtttgagaccagcctgaccaacatggtgaaaccccgtctgtactaaaaatacaaaaattagccaggcgtggtggtgtgcacttgtaatcccagctactcaggaggctgaggcagaagaatcgcttgaacccaggaggcagaggttgcagtgagtcgagatggtgcctctgcactccagcctgggtgacagagcgagactctgtctcaaaaacaataataattttgtattctataacataaacagcatttggaaccgcgtctccagtaattttcatctctacacaggccccgaatactcagtgcatactccacgtcaggcactctgctctgctaagtacacgaaaacctctttttttttcttttttgagatggagtctcgctctgtcgcccaggctggagtgcagcggtgccatctcagctcactgcaagctccacctcccgggttcaaacgattctcctgcctcagcctcccaagtagctgggattacaggtgcctgccacaatgcccagataatattttttgtatttttagtagagatggggtttcaccatgctggccaggctggtcttgaactcctgaccgcacatcttaaatcttcatcacaatcctatgtactgttatctctattttattattatagaaattggggcttaggccatacccagtggctcaaacctgtaatctaagcactttgggaagctgaggtgggtggattgctcgagtccaggagtgtgagaccagcctgggcagcatggcaaaactctctctctacaaaaaatacaaaaattagccttgcatggtgatcgcaccactgcactccagcctgagtgacacagtgagaccctgtctcaaaaaaaaaaaaaaaaaaggccaggtgcgatggctcacgcctgtaatcccagcactttgggaggccaaggcgggcggatcatgaggtcaggasatsragaccrtcctggctaacatggtgaaaccccgtctctactaaaaacacaaaaaattagccgggcgtgttggtgggcacctatagtctcagctactcgggaggctgaggcaggagaatggcgtgaacccaggaggcagagcttgcagtgagccaagatcgtgccactgcacaccagcctgggtgactgagcgagactccgtctcaaaaaaaaaaaaaaaagaaaaaagaaaaaaactgaggcttagagagcattgcagtaacttactcaaggtcatacaattagtgatggagtcagaatacaatccaggccaggtgcagtggctcattcctgtaatcccagcactttgggaggccatggcgggaggactacttaagtccaggggttcgagactagcctgggcaatacaatgagaccctgtccccacacacaccgaaaaaataaaaaatcagccaggtggctgggtgcagtggctcacgcctgtaatcccagcactttgggaggctgaggcaggcagatcgtgaggttaggagattgagatcatcctgaccaacatggtgaaaccccgtccctattaaaatacaaaaaaaaattagccaggcatggtggcgtgtgcctatagtcccagctactggggaggctgaggcaggggaattgcttgaacccgggaggcagagattgcagtgagccgagatcacaccactgccatccagcctggcgacagagagagagactgtgtctcaaaaaaaaaaaaaaaaaaagccaggcgtggtggcacatgcctgtagtcccagcttcttgggatgctgaggcaggaggatcacttgagccagggagtcgaggctgtagtgagccatgattgcgccactgcactccatcctgggcaacagagccagaccctgtctcaaacaaaacaatacagtctagggagtttcattctagcagctatgctcttaggtgctcaaaatttgttgaacattataaagaacaaaagttgagcagaaaactaatggatagtgaagaaatacttattgacattcttcacatagaatggagttttcaaatcagaactgattttagagagatgacgtctacagtatccccagtgatgtctgcctggaaggtgccagtgacagggaccacttggtgcttccacagaagcccccatcctgttttccagcagccttgcacatctgtggatctgagacctgcacctgcactttccacctctgcatccttgtgcctagttctgacaccacattgtgcccacctttaaacaggtcaggaaagggaagttctgttactctgccgggaactcctctcccggagagccacaggattttctccctcatttctctcaggtttcatctcaaacctcacatacaagcttctgtaactacctaaaatagcacttacccacagtcattctgtatccgagcagcccacagtcctagctgacatagatgaatgtttgttctctgcccatcctgccccagaatataagctccttgaggagagaactggtctgtttagttcacagctaaatattcccagccctctggaagtccctagcactaaagagatgcctcactgaggctgggtgcggtggctcacgcctgtaatccaagcacttcaggaggccaaggcaggcagatcatctgaggtcaggagttcaagatcagcctggccaaaatggtgaaaccccgtctcccctaaaaatacaaaaattagctgggcgtgatggtgcatacctgcaatcccagctacttgggaggctgaagcaggacaatcgcttgaatccaggaggcagaggttgcagtaagccaactttgcgccactgcactccagcctgggcgacagagcaagactcctcacacacacaaaaaaagatgtttcggccaggcgcggtggctcacgcctgtaatcccagcactttgggaggccgaggcgggtggatcatgaggtcaggagatcgagaccatcctggctaacaaggtgaaaccccgtctctactaaaaatacaaaaaattagccgggcgcggtggcgggcgcctgtagtcccagctactcgggaggctgaggcaggagaatggcgtgaacccgggaagcggagcttgcagtgagccgagattgcgccactgcagtccgcagtccggcctgggcggcagagcgagactccgtctcaaaaaaaaaaagatgtttcrtaagtatttgttgaatgaataaatgaatgaaacgggccaagtgtggtggctcacacctatgctgtaatcccagcactttgggaggttgaggcaaaggatcgtgtgaggccaggagcccaagaccagcctggtcaacataggaagaccccccccacacacacctctctaccaaaaaaaaaaaaaaaaaaaaaggtgcttcaaacaccgtgacacgagagaactagaaatcatggatggtgagaccagtgacacagatctggaaatgtatggcttcgagtccatatgcagaattcttccgtccttccagtgtcttgctttttacacaaaatatgccccaccccacctatgggcaggactgagaaggcaggagttccatcagcagcaggagccttccatttgtcctgctttttytgttccagatgagacaaaaggacccagtgaaaggaatgacagcagatgactaaagccgcctttcccctctgcactgtacgtaccaaatttctcactgtgcgtgtcacagaygctaaaatcagtttgggtttcaaggcctcagcagctcactatggagtcagaaaacctattcctccttccctctagtaatgatggttgccacgctcgatagctctccacttccactaggagattatggcccttgggacatttcagggacattttccaaagaaccacccagatagagacaatggacagggagggggtggtggatatagaaggggagttcatctgctgcgaatcactcctcctgtctgccagcttgatccatctcaagttgcagctgtcatgttgggcactccctggccttcccacgccagcgccagctcccaaaagctgccattacctgcccttcccccttggaaaacttgctggccagacagcttttgttagcacccactgttgtctggtgcttcatttccttctttatacccccgatcccatactaagctgccctcatcagaggtggcatctttcagatgctgggagggtgtttctgcccaggtcacagggccagattgggggccccttgtttcatgttgtcacttttccccaagccccctccttccgttaactctcggtgctggtttcccagtgccctgtacaccacccgagtcatgggattccagcagctcaaagcagtcttaatcactgaatgaaaaacctggctctgctcccaattagcctcagagagaaaattatttttacaaataaaagctggcctctaaccctacgggcaaggagggccagggtctcaccaggagtgacggcaggccctgcttactctccctgccccatgttcccaaagcagcctcggggaggctggagggtggaatkaggcggactgctgtgatgccagcttctcagtcactgctctgggcctcagtgcyctcccccactcccttccccacccacccactggcttccctcctcctcttgaaattatccattcaggacgatttacagtgtttctgttttctcctcttgcttccttaatactttcatttttcttctagttttgcaagacagtggtcaacaggaagacccagcagctccaccctcccaagtgacaggccattttcggacgcagccgttctgtgcccattcttcaggcaactttcgattccttactgtagctaattctagatgcccttcagtattgtgaacaaatagaccgtctggtgtcacagagcccgcgtgtgcaggagcctgctcctccgagatacgtggcgtgtaggttgctgtagttacagcgcctccgtctctctccattgtgttccgayccatttctgtgtgttcccccaacctttatttccaagtgacattttcagtctttcaaatagctgccttttgtgatgtggtgatttaaatgatttaagttcatttgttctcaaccttggggtaaactgaggtattttgcttcctgggaagatcttygcaattttgagtgctcctgtggggagcggggatgagctaaagatacaatgtttccctgccccgcacygcttccacaaaatagcaatgtggttttgcagctctgacttctgctcccagtaacccatcgttagggcactctagcactatggaggtacccaaggctcagccagtctctatttaagaaaatttaacaaatacgagtaaccctgtcccaatcactgaatctctagttactactcttagaaacacctgtggcttcttggccctcctgttgcccgctctgaatctctctgcagtctacaaaatcgccccagtcaactctccacttggagggaattgtccagtgtggcccctagaattgagtcaccccctagataccaactgtctgaccccgaggarctctgtaagtccctgctcctcytcttccctttggggctggtgctgccactcagcaataatcctcttttctctgtgctttcttaggtccctgtcctctgtctttgaggctggttaggaagcaagagtcctgatctttcatgctgcacaatatgagcatgcaaaaagctttttccagcagaacatgttccctcrtctccagttgccggraaggaatttggggatcaagaacttagctcgtcctacccccatgttgagttctgccctggaaaacccaaagcaagtagtgatcatagtacagaacccgaccaaagtaggctggtgaggaagtccaggctccaggggaacagacgctgcccagtgttyatagcttcctgcaacttgacagagcctgagtttgcctcttagtgggagaatsagagagagctgtagtgtcacctgacattccccaaaccttgtgaagcacgttggcctaagtgtgccgtgatcccagcccacactagcctgggtgcatctgctaatgggagaccaaatctttgtccgggaagcaagaagtgggtgggagaatgtatcctgtttttgtcagtttgtttgccttactcatttctaagtgcaataagggagtgtctcacaggattgcacctgtgacatcctgatggatgcttccctgtggcyctcctggggcaagggtggacagactcagacccccagcatggttagcgctgaccttcattgaggtccctttggaaccagatgtcttgttacagacaccttcctctgtgtaagtctcctcaccttgaggggtctttagtaatgcatctgggtagcatctcaactgctggtagcatttatctgacttggaaagttggagaagaggcattcctactggagaaaaatgtcagtgttttcctataagctctgtgttagctattcattatatttgtgcttaaakatgttccttcattcatcaactaggggaagtccagatgcgggttatcttgaaagaaacaaactgacattctaggcagacagttgtctatgtggtctgagggtcagcagctgttagtctccttcctttggctcttgagacccacacatatcactttagccctaacaagggctcctcccacctccacctgttgccccagttgaaaagcatccattatgagctgaggtcagcctggatctggaattgcagcccacataaacataaaggaggatgtccctggtctgttccatccccacggatggtgttgctgctgggcaacagtgttggcttcttttaagtaccccctttcctcctcacccacctccaaactgactagcactcagagggacttatgataaaggttcagctccaggggtagtacctgagtgtgtgccatgccccttcagaccagctgcttccatcagaattccagggtcacagccccaacagaagcagcagtgcctctgtaggaggggtgctgggctctggccttctcatgcagagaggtccgggacagggtcagtatcgtgggcatgtgtatagcttcccaagttcttttacagtccctgctgggactccctgacttactttggttggttcctagtgctacttgttttacmaactacactttgtagaaytgattagattaccttgtttatttaatgtgagtttgtgcctttytgtctcaatcttccaatacaggtatattgagaaaaaaagcagtctaataaaatcctagacagaactttctggagtccagtttggtgatgtccattttccagctgtatgtatcctcaaacttgcactgataaccgccattttaccagggcaggattaggaagaggtacaaaggtgtgtctgaaaatttttgcacgtggatttctgcatataatagtcccgtgtcagtttacttatgcaaacattgcacatctgaattgtaattcggccgtttcctactgacaggatgtccttttgcttttgtctgcctcctcttcacatcttcctctttatccaccctaccaaacaagcaaaacatttatttaaagtagttttaggccgggcgcggtggctcacacctgaaatcgcagcactctgggaggccgaggcgggtggatcagctgaggtcaggagttcgagaccagcctgaccaacatggcgaaaccccatctcggctaattattattattattttttttttttgaaacgaagtctcgctctgtcgcgcaggctggggtgcagtggcgcaatctcggctcactgcaacctccacctcccgggttcaggcgattctcctgcctcagcctcccgagtagctgggattaacaggcgcgcgctatcaagcccagctagcttttgtgtttttagcagagacggggtttcaccatgttggccaggctggtcttaaactcctgacctcaagtgagccgcccgcctcggcctcccaaagtgctgggattacaggcattgagccaccgcgccccggcctacgtttcatttattgacggctaattctgtaggagtccaggaatccccaaacgtcccatatgcaataggtaatccaataagtttggagtagaagcctgaaagtgggcgtggagaacggaggcgctcccgcagtagcaggaatggggagattacctgcagccggggggcgggggagaccggatcccaggcaggacagtggctaggctgcgtgtccccacccccgaccctcgtttgacccctgggagccggggcgaagacagcacaaggacggagccctcggatccctcacgagtggggcagaggctgcggcggcggcgaagagacaacttccgccggaagacggcccctggcgcggggcacgctgggagctgcggacggcgggcgcgggctgggccgggtctagtggcggccgcacacctcgcgtcgtctggggcagtgttgcgcgtgcgctgatgacaggcccgacacgcccctcttacgtccgcgaacccgtcttcgctcagcctctcgcagctttgcgctcgtgggagagtcccgcctccttctgcgaaccgcaccacccagatcccggggtgcgcggagggcgcgtctctgacggaagccggggcggacggtcggagtccggaagaaaaacagtccgcgacagctaggcgcgtgagaccggccgcccgcagggctgctctggccgggacccgctggccgggagacgcgaacctgccggaccaccgcgcggggacgacggcggccatgagctcgcggaagctgagcgggccgaaaggcaggaggctcaggtgagggcaccctggcggcagaggcaggcctgctcggggggatcggcgccccttgggctgcgggctgggggtggacaaggcaccagacctccatgactgcctttggttcagaggcgctctcgccttctcccacgcctgtgtcaggtgggctgtgttgggcccgagcctcgcgccccctctaagccgaggccgccaagctcgttcccactggggcgcagcaggtgtcccggttgctttctggagaggacagccgtgtggggttgtttgaggttaaagacataacgaggccgtcacccttcggctctcggttagaaatctttttcctacttttcatcagcacatacatcaggaggtctgcctgatcccatggtgaaccccgggaatccgaaatcagattgagataagatcctttagggaagtgacttagcctggtctcttgcctgctctttcacggggaacaacgctaatcgcccacttagtctaagtcacgatgcttggatttgctgctaatcgtcggatttgagagtgggaacaagaaatccggacttttgctctccatcctcttagagtgagtctgggaaaagaagtctctgagtaaaaggtctttgttccttaagcctctgtcggacagcagggggagatcgtaaacaaatgaagctcaaaatctcaggccgagtgcctgggaaggtggtttctgtatagtgttgtttatgctaacagggagggacaggaagttgctttaaactggccaagaatttcttgaagtgcttttgagaacgtcgacctctaaggacggggtctgttggaggagagatgttttggcattaactgcccttttctcccatccccctgtaccctctgccattccagatctccagctgctgcaggtactcctcatcgtgtgcctaggactcatgctaggctgttcctggtctctgcagggtctgtagctcctgcccgctctgtgctccgcacagtctgaggcttcttgaagagctgctgtgactgactgttccactaaagacatctgtaggtctctctttcctgagcctctgactggatccagtgtcattgaggccccttatctagttttcttgcttccctaagacttgtaagctgaggtggaaaatatccaactgatgacttttccccagagagtactctttatttttcacggaatactacgcagacatagagcatagactcttaagagagatgtcgagaaacctgttacttaaaaactccttggccgggcgcggtggctcaggcctgtaatcccagcactttgggaggctgaggcgggcggatcacctgagagatcaggagttcaggaccagcctggccaacatggtgaaaccccgtctctactaaaaatacaaaagttagccagatgtggtggcacacacctgtaatcccagctacttgggaggttgaggcaggagaactgctggaacctgggaggcggaggctgcgatgagccgagatcatcccagtccactccagcctgggcaacagagtgagactcagtctcaaaaaaaaaaaaaaaaaaagtctcgctgaagtgcttggcaaaattggcttgctccagggatctgctagggaggagagaggaagggaatatggtggtgttatctcttttattttttaaattcctctgcccttgtagtgctgaggcctatcacaaggtgaaatctgaatccctaggatcttcctggtggtcttaggaacacttggggtgagaagtagggatcagaagttgccgactgagccatagatgatgacagaggggtgtgggtggctggaggagctgatggaattaatacattcctggcagttcagccccctaacccttcgctagcctgacctgaaattcttgggctccctttggcgactctgctatatcagcagcaccagtgctgccgggtgtgggtggctgtgagccagcatggaggacccagtccggggtggggatttcttgcttcagcagagaaaggtgaggacggacagctgatggttcagtatccccattccctccaccagcacagaaacccacatttcccatcatgagtgtggcagattgcagtgacataagcaggcctagaccccgtgcactatctttttttttttcttttgagacagagtctcactctgtcacccaggctggagtgcagtggcacaatgtcggctcactgcaacctctgcctcgtgggttcaagcaattctcctgcctcagcctccagagtagctgggattacaggcgcctgccaccatgctgggctaatttttgtacttttagtagagacggggtttcaccatgttggccaggcttgtctcgaactcccgacctcaggtgatccgcccacctcggccgcccaaagtgctgtgatgacaacgtgtgagcctctgcgcccagccgaccccgtgcactatcttatcctccttcctccatgacttccctctgcatcccttccgcagcatacacgtcgtgacttggaacgtggcttcggcagcgccccctctagatctcagtgacctgcttcagctgaacaaccggaacctcaatcttgacatatatgttattgggtaggtatctgcaggctccttcgcccatccctgaccagtcccaggtttccctgtgggaagcactgtgacctgccctcctccgctctggagtctgaaggctgggagctttcagcctgcttcagggacagtcccatgtctctggtcccgggtcagcaacggcaaagggggctggagatcagcaggcaggggagggagacctcatggccatcagaactcaggccttgaaagtccgtgaagatggtatcaaatatctgtggcaggggaagtagcctggaggccaggggccaagcctctgagctggcatggtcagtttgcaggaattgaactctgggatcataagcctcctttccgatgctgcctttaatgactcgtggagcagtttcctcatggatgtgctttcccctctgagcttcatcaaggtaacttgccagttcattggcacttgacaactgtgttttcacatctccactgacccctgcttgttgggtctgatgtgttcctcttactcctgctcagcctttcatgctgtttcccatttgtttaaagggctaaacctcccttccacctggaccccggggcccctgcctgccttcgcctttctgagggagctggagtctccaggggttgggttaacacctggatatgtttcagcttgggaagattctgaggggaggtgcagcagggcttgtcatcacctcagtgctggccgctgccccagccaccagtctctactcaaatgcccatcctgaagtctctgagtgtaatcatacggctgtcatttatcaagtgcttacttgttgttacacatcataagtagctctttatagtatatatgttattttaaaatcttaacaagtctgttgaaatagagatattttacagagaaaaccatggctcagaagccacatgcgctatctgggatttggatccagatctctcaaacttcataacccaagttcttaactactaataccttattgctatgctggtgaactctaagactgacagatcttaggcgtggctagcctgctggtgtcatagggtatcctcaggtcatacgggacgtgcacttcagattctgggggtccagaggttaggagaggggagtcaggtgtggtgggtactttgggcggctttcttagtctgagagaccagtatactctggggtgtctttagacagtaggagagtccacaggaaggccctgggttgccagatcttcaccttcaccttggttctgccctgcacacctgaggaatgaaacacactcccattcacagcacctggtatacagctgcttagaaataccagaattccctctttccccttcctggatgactcttgttcttcagaatggattctgtcagcctagtttgcctgggggtactgaggcaagagctgtgtgtcctttggagggggagcagaatggggaggaaagaatctaaggtttagaactcctgctgaggatagaaaacaccagcccgagtccttggttccctccacatcaaacccagaggcctccttctgtagatagggagctagatccttacagaggacacaaccacttctctctcacccgccactcccttcccaagactgcaggcctccttgcttctcggctgactggcaaaggattggtaggatggaattgagccaaggaaattagctcaacttgtggcagagacacagccctttctacccatgtggcctactgagattgggaggccagactgagggcctggcacccaaaatgaatgcccttctttccccagccaagaatcagggtggatgggtgagctccgtgcatttgccagctatagactgagaagggctgacccccttccactgctccagggcccccagccacctcctgctagtcctttcttc

SEQ ID NO: 96531 - DNA, 75649 bp, Homo sapiens
  misc_feature (1)...(75649): n = A,T,C or G
ctaccacactttcttcctccttagatttagtataacccattttttaaaaagcttcgcactgaattacagatcaattttaaaatgtcttctttattgtttagtcattccctaatgagaatcccacatctattattttaaaatttttattttatttttattatcacacaataacattaatagaaactattctgtcaagatagtatttctggttctctcccattgactttgcctgaagccactccaaattctgacattactcttaatgttttcaggacagatggtattagagctttcagcaaaagtagtagattatcagcatatattagttaacttgtgaatctccatctgaatattcttcagatacccatgggatctgtgtgattttctagcttcaatgtcagcctgaagagtaacatcagaaatgggcatcatccttacttccctccccagtgcagcaataaggcagggaaagggagattgtaaaccattgatttaaaccatataaatggattgaaaataaattgtgctatctgctttatttgtccccaaagccaaatttacctaacacataatacaagtagtctcattcaattgcatcaaaggactttttggcatctaataaaattattgctattggttctaattttctctttgtattccagatgagttgcattcatctatgcagattatctgatgcttatctcccaggcataaaggcttcttggataagggtctattagatttgtgattatttggtcacatagccaggtgtgcaggtagctattattttctacctacccacattgtatgaaagaatatttttcacaatactgctaaggaagtaatatgaaatcttgagtataaggttataggaatatacataataagataaagaactgtaggacaccttgatttccaaccacagataatatctgatgcttaaaaaaattcagtacaaaccatttaaatgcattacatttattcagtctatttctgaaagtagtggctgttcagcgtgtggacggcagggagaagttaatgtgttggtaagcaacctaaatttttataaagctattttgaaagtaactcagtgtcacagaaagtaatatcaattactctttgctttacaattgacactgcaagtctgctccaaatttccattcttcagctcagcatctgcaaagaaaaggaaggcagagaataccctccactggagatttctgggtatcaaaatcacaagacacacttctttacaatatggcctgaaacagttcaaaggttgttgtttttttcccaagtattgattaatcctttcatcccctgggaatagggtatgacacaaaaggaggaaactgaacaatggaaaataggggtaaagtcagttaataatcttgagggttcaaacaacctacactctgtgagacagcatagtgttgggaaaagggcctggacctcggagccagttttgatcgcggctctaccctttaactatgaaatattaagtaaaatgatttataattagccaaagagaaggtgagggaaaacatgcatccttttttacaactaataatatatgaggccgagcacaatggctcacacctgtaatcccaatactttgggaggctgaagtgggaggatcacttgaggccaggggtttgaaaccagcctggtgaggtcacatctctacaataataataataataataatttaaaaattagccaggcatggtattgtgggcctgtagtccaggctacttaggaggctgaggcgaaaagataacttgaacccaggaagtcgaggctgcagtgagccatgatgacaccactgcactctagctgggttggggacagtgggaggaactaaattccatttgattcaaagtgaaaaaaaaagggttgaatgaaaatgaaactttgctggctttgcaggactggcctggcacctgaccaggaaaggttaaaaaaggtcaaacaaggctcccactgtgtggctaggaagaggtttctggagaaatggatttggaggatttatctggtaattctcaatcattcagctgtggccaaactgaaagcctgtgagctgtacccctgacacccagagtgtggaagccccagaggccgaagtcccttggaacattcacgttctcccctgggatgcggatgaggaggccatgcagaaagacatgttctgagaaaccagtgatctaagaaaataacatgttacaagaccatgttttttctagttttagaacattttatataactcataagtgtttgtataaaaattcacgcaaagttgctagagagcatacaatttccaaaaatgtcctgggtttttgttattttcagttttctaaggatgcactccaatcaatggaaaaatgcagacattatgcaagatttcattatctttggtaaaagtattctcattattttgtctcttcacagtattaactctgatatccactttgtgcagggtctgctattactaggatgtcataaaaatgttaaagctggatctacaagaggcaagtatttccaaacagcagtaatagctccttggcccccacccccacttcatatatctatacagtctgtctatacattggctgaaccctttacttaccagtgtagccttggcaaactataaacagaactgagctttggttttctcattcacaaaagggggttataatacttattcctgagtttgttttaagcatcaataaagacaacatacacagtgggtgtggtggctcacgcctgtaatcccagcactttgggaggctgaggcaggtggatgacaaggtcaggagttcaagatcaacctggccaagatggtggaaccccatctttactaaaaatacaaaaaaaattagccaagcatggtggcgggtgcctgtgatctcagttacttgggaggctgaggcagaaaactgcttgaacccgggaggcagaggttgcagtgagctgagatcatgccactgcactccatccagcctgggcgacagagcaagactctgtctcaaaaaaaaaaaaaaaaaaaaaaaaagacaacatatataaacaatttatagaatattcaatgctcaatattacctatttcattataattatggtttatcttctcattaaaaaataatttcagctttttagattcaggggatacatgaacaggtgtgttacatgggtatactggatgatgctgaggtttggggtacagacgatcccgtcacccaggtagtgagtgcagtacccaataggtagtttttcagcctacatccccctcctcccctccccactctagtagtcaccagtgtctattgttcctttatgtccatgtgtactcgatatttagctcccatttgtaagtgagaatatgtatttagttttctgttcctgaatttgcttaggataaaagcatccagctgcatccatgttgttgcaaaagacattatttcattcttttttatcactgtgtaatattacacgaggtatatgtaccacatttcctttattcaatcaactgctgatgggcggttaggttgattccgtatctttactattgtaaatattactgtgatgaacacacaagcgtttatgtctttttttgtaggacaatttattttcctgtgggtatatacccactaatgggattgctagctcaaatggcaattctgttataaagttctttgagaaatctccaaactgctttccatagaggctgaagtaatttacatttccaccaacagttcataagcagttccttttctccacagcctcatcagcgtctgttattttttattttattgactttttaataatagccattctgactggtgtaaaatattatctcagtgtggttttgatttgcatttctctgatgattagtgatgaagagcactttttcatatgtttgttggccatgtgaatgtcttcttttgagaaatgtctgttcatgtcctttgctcagtttttaatagggttatttgttttttgcttgctgatttaagttccttatagattctggatattagacctttggcagatgcataatttgcaaatatttctcccatcctgtaagttgtctgctactctgttgatagtttagtttgctgtgcagaagctcttcagtttaattaggtcccgcttgtcaatttctgcttttggggcaattgcttttaataaaattatatatatatatatatatacacacacacacacacacacacacacacgtgcatccatttttcagtaatcataggaaagtaaattcaatagcataccaagtattcagattaagcttcatcgcattatactgggaaaataccgacatttaacaaagtacagtgtgcagatttactctgtgattaacctacataaaagaaacctatttttaaaacctatagtgtctgaagataaaaaaaacaaactaataatgataacttaaaaaagaaaacatcttttccaccatcattattcttctgtatttacccatatacttgatttggtccaacagttctagcgttactttatttttatttaattactattattattatttttttgctacggggtttcactcttgtcgcccaggctggagtgcaatggcgagatcttggctaactgcaacctctgcctcctgggttcaagtgattctcctgcctcagcctcctaagtagctgggattgctggtgccagccaccatgcctgtctaatttttttgcatttttagtagagtcggggttttaccatgttgggcaggctagtctcgaacttctgacctcaggagatgccccctgcctcggcctgacaaagtgctgggattacaggcataagccaccgtgcctggactttagctttactttaaacatatcaattggacataaaggaaaacaaatgattaacagactgaaggtacagaaaaaaaaattcttcctaagacttcctgatgatataaaccgggttacatatgcttgcaaaacaaaaaatattaataagcaaatagtctctagtttaaaggcacagaacataatgaacaattcaaaagtattcagctttagcagaattttgtatttctataatcagataaagttgtttttttttaaaggctattttccaaagagatgctattttttgagatgtgctgcataatttttcttaatagttggaaaaatatgtttgtactctaagtgaagtaatttctggagaaaaagtgtgatgctgactgaagctaaaaccctaagtacataagaagaaatgtatacagtattcccaggatttatgtaaacatggagagccacttagtaaatggcactgggttctggtaatcacacagtccactctcattaggcatctccctcttgtgcattaatatgtggcatcatattctcagagaacattttataacaaagtgaaataaaaagcccctccagattgtgaatgtaagataatcagattctgtagtgctcattatgactgcaattatgtaacaaaactctccaaatatagttcagtgattgcagttattaatcattccggttttgtctcaagtacttgctttatagcctgctggatagactccataattctataagctgaatgtcgaaagtcaaacatgtgcatgtgaatctgctgttctaaaggcctttcaatataatttaccctttcaatttgtatttgtgaatgcaaaaaaagtgggggaaataaagctggtgtcagtagagtcactgacctttgcagtaaacataatatagtctttaacagaaaacaacattgcaaataaaaaaactattttgccagaactagaaatagtgctgcttaaaaagttagtctcagaataccaatcagttctgagacaatcagttacaaaagttggggggaaaaaaaaaccttgaacaaatttgtacatttgataagcgggaaaatggtcggagcgctggaaaatgtgaatttttgaaggttcaaagcactatcatagaaagaatacagaactaaacacgttatgcataaaaccacatattctaattaatttaactataaaatgccaagcaaagacagcagatttataatatagaacaaacaccatctgcaccaccttaaatcattgttacagatatatttctaggaaaaaaatacacctgaacaattctcaagcctagattctaagatgctaaagtattaactaaataggattccaaacagacccagagaaagttactgcataattatttaaatattaacatgtactgagttcagaaatataaatataataacacataaacacwgtttacaaattcatgtcaccattttcctgtgctccatgatttcttcaatttggctacatacattgggccccaggctttgcccttatctggaatcactaagagcccacattcctggccagtgggagcaaatgtgaagtcgtgggagcaagtccttgctattcctttaatgtccataggcatgatgttaccgtgggagtttaaaatttcactgatcacatcttgattttctgccttggaaagcgtgcatgtagagtatacaagtatccctccaggacgtaaggccttaaytgcagacctgtgtgcaatcagaaaaatgcaaaagattagttaagtatattaaaaagaaaccagggggtctgacagcaaagattacgtacttaaaactaaccttactctgacttagactgcaattactttggatgttttctagtcttttttttttttttgagacagagtctaactttgtcacccaggctggagtgcagtgatgccatctcggctcactgcgatgactgcctcccaggttcaagtaattctcctgcctcagcctcccaagtagctgggattacaggcggcctccaccatgcccagctaatttttgtatttttagtagagacggggtttcaccaagttggtcaggctggtcttgaactcctgatctcaagtgatcgcctgctttagcctcccaaagtgttgggattacaggcgtgagccactgtgcccaatctctgatcttacacctatttctttctaacttatccttgaagacttggaaaatgataatcagaccaatcaacatggaaaagatagagtaagttagactggttgattgctattcaaaaagtaggaaaataggggtagagaacagaataatgagtttgtctttaaatcgatgggagtaaaaataaaaacaaagcatacatatgaaagcatacataagaagtcattgattccatacttccaatattgcaatttgggcaaccaggtaaaaagttggaaggtttttatctaagaaaattgaataaactatttgtgaagacttctaaggcagccactatgggttttagaccccaaatcaaagatctctgcattctaccatgaagagagcctccagagtaacagtcagctcttcagaaagttgtatcaccagataaaaggtctcgtccttaaaatacacctctagtacttttattgtctcattattaaataaaaatgtataaccaaggattgctagataattaaagatcagaaatgcttaagcaatatgtaagagaaagaacaaaataaacaataatgacacaggaagaaacagaaaattcagggaacaaaagagaaatatgatctattaaatgcagacagatcagcaaagatacaatatccataacagaatgccatgaaaaaggatcaagaagagagttcttagaaactaaatatatggttaccaaaataaagaatattctgtagaagtatttggaagttaaggttgaagaaatctctccacaaaaagtacaacagtaacagactgactgaaaatgagacaaggtggatcaattacataggttcaaaatccaattaataggagtactagaaagataagacactcattattatttattgagcctctattatatgctgagcattgttctaggtggtaagtatatctcaayagacagaacaacaacaaaaaaatctttcacctcatgaagcttacattctagctgggggacatagaatataacaaattaaatatgttttgaattaaactgtgtccctgcaaaattcctttgttgaagtcctaacccatagtgccttagaaggtgactgtatttacagacagggtccataaagaagtaattaagttaaaagtagttcattaaagtgggccctaatggaatatgactgggatccttcaagaagaggacatttggtcacagaattacaggggaggaccatataaagaagacgcagggagaagacagctatctaccagccatgaagaaggacctcagacaaaacaaatcttgctgatgccttcatctcaaacttctggcatccaaaactgtgattaaataaacttctaggcaggtgcggtggctcacgcctgtaatcctagcactttgggagaccgaggcagatggatcacctgaggtcaggagttcgagaccagcatggaccacatggggaaaccagccaggtgcggtggtggatgcctgtaatcccagctacttgggacgatgaggtaggagaatcacttgaacccaggaggcagaggttacagtgagccaagatcacaccacttcactccagcctgggtgaaagagtgagactccatctcaaaaaaaaaaaaaaaaaaaaaagaaataaaataataaaatagaaaataaacttctattgtttaagccacacagtcttgttattttgttatggcaactctagcaaactaatataaatatatacacacatacataaacatacacatatacaaagataaacatatatacatatacacatatacatacatacatatatgtacaggtttgcacatttttttatttagtatgcaatttagtgatagataactatgaagaaaataaaagcaggataaaaggattaggagtgcttggatgagagggattataattttaaacgggacagttagaacagtttgccatttcagaaagtgacatttgaacaaagttctgaggaggtaagggagtgagccaagcagatatctgagagaagagcattccataccaaaggaatagccagtgacaagaccttgaggcatgttcaaggaaagcggaggtcagtgtggctggagcaaggtgagccaggggtggtaatctgagacgaggtgacagagttaagaggagggggtggagagggtcttgatgaaaactgtcaaaacttcacccttataatgaataaaaaacacccacacttagatccatcattgttaaatttttgaacttcaagaacaaagaggtgtttaatgcctccaaagagaaaaacaggtcacctattacgagcccaggaatcagactggtatcagtggagaaatacattccaaatcctaggaaaaagcaatttaaagtgaattctatttgcagccaactcataaaataaatatgtagcaagaatccagaaacttgcagatatctcatgactccgaaattttaattctagtaaaatgaggaaataaagcaagaaagaggaaaaatgtaattcagaaaagagtgcatgcaacatagaagagcagtgaaaggagtgaagcctcagagtgagagctgcgtgggaggcctggaaggcaactactgcagtctggaaaaagagggagctctccagaaggaagggagaagggagagaagtaaaagagatgaaatgactgaaaactgagaaaaacttgaagatttggtatacataattgggagggaaagggagagatcaacttgtctcatctatctgattctagaaaaaatgtttcagtggtattctgctcatgagattgaaccaagagacaaggaattttaattctaacatattattccattatgcagtggacaatatttatagaattaaacaatatacaccacttatgggtcttcaatgttcagaattactccaaagaccaaacttactattgttacagaacagattttaaggtctcagaaagaatatgatcaaccttgacaacatgaaagtacagctgtaagatactgggaagtagaagggagagagaaatggaaggcagggtgggcgtgtaagtgttcttattttataaaaataaaaggcaaaagacatttgcctctaattatttttttaaaagaataaagataaatgaagaaaaaaagacaaaaaaggtgtgatgtgtatttaagagaactttcccccactaatagaataagaaatgtaggtctaagtgtatggtactaagtttcagagccgacagagagaaactgagtacagtgtgagattgcagggtgcagggtagtgtgatgagggaagggtggtgtaagtgacataaatccttgggatagggcagtagttaatgtctaattttttgacaattttagaaaatgaataaacgtattatttagagatttgggggtgacctgaagaatgaattaggaaccaaaatcattagaagcaattgcctctgaggactaagactggaggaagagaggaagagttgcaggggagcaatccttttcactaggagctcatttgtagtttaattttttacccatmtgatttatttctgtaatacaaattaaaggggagatttgacaaaagaataaatatcagagcttttgccatggaggtcacttaaattgttttttttttttttttttttaggtggggggatgagtcttgctcttgttgccaagactggagtgcagtggtgcaatcctggctcactgcaacctccacctctccagttcaagcaattctcctgcctcagcctcctgagtagctgggattacaggcacctgccaccacgcctggctaatttttgtacttttagtagagacggggtttcaccatgttggccaggctggtctcaaactcctgacctcaggtgatccgcccgccttggcctcccaaagtgctgggactacaggcatgagccaccacgcctggccagttatatgtatttttaaaaattttgactgttaagggataacctctctagaaaaggtattccctgaggttccagataactaaaattttatggtatccaggatttctatacatctcatgtattcatttattgattaaagagatattttgggggttcctaccactgagggtcttctcatacttcggtgtttgttgttagtctctaaaaaaactttttctatgtttcctctcctcactattcactgccctctaaatattccccatggaaacaaaaaaggctcctatctagatgctggagatgtgaactgctaaagggataataaatatcctgcggtaggaagaatgaaaacccctcaaagatgtccacatcctaatccccagaacctgtaagcaagccattttacatgggaaaaggctatgtgcagatgtgactaaattaaggatcctgcaatggggagattatcctggattatccgagtgggcctgatgtaatcacaaaggtcctttatcattgaaagagggaggcagagagttggtgaagatgtgatgatggaagcctgggttgaactgacaggattgctggcctagggcaaagagctcaggtatgtgagctgcttctgaaggctggaaaaggtaagcaaacagattttcccttagcacctccaggaggaacacatctctgccagcatcttgatattagtcccacagggctcattttggacttctgacctccagaagcgcaaaggtaacaaatctgtgctatttaaagccactaaatttgtggcaaattgttaacagcagcaataggaaacaactaatacacatctaatgatggcgttttttgttttctctttttttgtttttacagcaacacactaaggtaaaggccaatttgctaagtaaagttgtaactacattcattttggatcattttctactaactatagcaataggtataagactttctttaaaaatgttagattattaaaatggtatagccactatggaaaacaatatgacggctcctcagaaacttaaaaatcaagttattatgtgctccagcaattccacttctggtcatattccccaaacaattgaaagcagggtcttaaagagatatttgtacccatgttcayagtagcattattcacaatggccaaaagatagaagcaacccaagtgtccatcagtggatgaactgccaagcaaaatgtgtagacagatacatagatatgatgaaatattattcagcatcaagaaggaagaaaactctgacagatgctataacatggattaaccctgagaacattatgctaagtgaaataagccagtcacaaaaaagaaatatcacatgattccacttatatgaggcatctagaatagtcaaattcatagagacagaaagtagaatggtggttgccaggggctaagaagtgaagggaatgaagagttagtgcttaatggatatcgactttcagttttgaaagatgaaaagagttctggagattggtagtacaacaatgtgaatgtacttaacactattgaactgtacacttaaaaatggttaagatagcaaattttatgttatgtatttttaaacaattaaaaatagagaaatacacaataaaaatgttagattattgtggatataggcaatatttgaattcagatacttccaacctcccatgaaaatgactattttggtcttagttccacaattagcaaagccaatgcttaatcaagtaagtatgattctttttcattaaagctgtacaaaagtacatagaagcctcataatttacaaacaatatgttcctggcttaatgcaaatttaaattaatttctataatgttgccaatgttggctgattcttctgcttacctttcatttcgacattcataatttatctttctaaaattaggcaggtataacttaactgcccacattaatttctaaatgagaaaattgtatgtggtaacacaaagcctttttaaaacaaattgggttaatctcaaaaccataaggcaaatgttagggattcctgtcaaatggtcttgctgttttgctactgctgcatgttgtttaaatatcattttaatccttttgctttcagtagttatgtattttaaaactatcagaaatttgtatkcaaagataaaggaaggcaggcaatttgtaaaaactcactcctagggtttatagctaagatttttctactctgagaattatcttatgctatagatcagaggaccccaatccctgggcctacagaccagtaccagtctgtgacctattaggaacccagctgcacagcaggagttgagtggtgggtgagcaggcattaccacctgagctccggaatctaactaatgcctgatgatctgaggtggaacagtttaatcctgaaaccatctccctgtccccctcccccagagccataaatgccatttttcttacgaactgaaccagaccatgttgtggcctcccactgcttttgcagaaagtataaaactatctctataattacaatttatcattacacactatagtttctgttaaggcaagaacatacaacaactctataatcagacaagttcaatgatttaaaaaccagtatttctggtctttgttttccaatcaaaattaaaagatgtattttacratatactaagcaaaaattagcacactactaaaatctaagtacctaaatatacagggccctgtccattacaataatgtctgggataaatcatctgcttccataacaatttatacacattttgaagtagtgtacaagaaacaagaaattattatcacaggtttcatccaaatcacaaacagaggactgtatatgtatttttacaacagttagatggcaggatgtgagaagggttgtttgggggagcaaaatgattcactcaaaacaaaagaaagatattgcttaataggtcttaacaagcccactaagaaattttaaattctggaggtggcaaaacatttagagattagaaagacttgaataatactaataaactttggcaaagctgtggtactgaccacataaaaagacaagtcaggattagagaacgaagaagaaaaaaaaagacaggttgggttctctatgcttgtgtaaatgtctgtgccatttagttatttattatttttttttttaaataagaggaaggaaaactaaacagccagccaagcaacatccatttctgcataatagtatagtatcctctattaacctgtccaaatgagctatggccccttggctcctgaatgatcctgtgtcatggtttaacaagatcctgagtaatgtcgtatttgtgctaaccactaactataatgcatgaaattatcactaaccaagctgtattaagactggtattattcatcattgaattctaatgataacagtaaactttctaatcatacttaaaagtagaagtcagaaaaatgtcatgactaacaacagtagaagcaaaagtattatttgatcagattaagtacaatgctaacctaatactctaaaatggaaactagtaaacattatcttgggttttacatattctttaatataaaatgcccaattataatgcaaagctagggaagtactttttaaaaaattgatatatcataattgtagataatctgaaggtatatgttttattttgatacatgtttacaatgtagaatgatcaaatcgggtaattaggaaatccatcaccacaaacaattatcttttctttatcttgggagcattacaattcttctcttctagctactttgaaatatacaataaattattgttaactacaatttccttcctgtaccatcaaatcctagaatttataccttctatctaactgtatttttgtacccattaaacaacttctcttcattggaggaagtacttctaaaggaagcagaattgcgacataatataatccctctatcatttctccgaaacacacatattcccttcagaagcctcctataaaagtgctgatcaggtttaaaccctacttgaaatatgaggtaagattctctctcacaacactgctgtaggaaacaaagttgatcttgattaattttatagcatataatacaatggcctactgcataatgaaggtaagaaaaaaagaaaaaatatatagtagaaaatgattttaccccaagtactcctaaaagagaaagaaagatgcccttcttgccatggaatgtataccagataacctgttactatatggcagatatcaggtatacaactttccccaaatctttgcttgtctttcagtgtatcatggaacaggctgaaatgcattttgtgtttgaaccacctagttaatgaagctgctaaaaacaaaacaatacacagtttttaaaaagaaaccattaaatagaatataatgttaaatttccctcatttgcaaacagaaaatcctcaatagatttttgacagttcacagaatacaaccaagtggtacttcaggtctatctcatactctgtcgtgaaatccaaaaagctctgtaacctacaggtttttaaaaattaagttgtgaggccgggcgtggtgactcacgtctgtaatcccagcactttgggaggccaaaggggacagatcacttgtggtcaggagttcaagaccagcctggccaacatggtgaaaactcgtctctaccaaaaatatgagaaattagccgagtgtggtggcgtgcgcctataaccccagccactggggaggctaagacaggagaatcacttgaacccaggaggtggaggttgcagtgagccgagatcataccactgcactccagcatagatgatagagcgagattctgtctcccaaaaaaaaaaaaaaaaaaaaaaaaaaaagttgtggcagattcacttggcttaaaaatctgacctaaactcatgtaaggctatttatggccaagacttatctcatgtggtataactattcatatgtcttgctgaaaaaatgtttatatgtttgattatggagtattgttccagaccctcctgtagaaaggaggttagaccatgtattaagtatgtactatattaactctttaacaaatccaaacaaattctgaattctgaaacacatctgccattaaataagattttctccttgtattttagatccaaatgaattatactgtaaaactatatacaatatcttctgtaaatatctgcatgtatgataaaactagttagtatgataaaactagttaaccacatagttagttatccaataaaagcttaatttaattattgttgcaagtaaatcatttaaatgttaacttttaaaagcatcagataggcaaatctactgataagcagtctatatgcaggattccacaagagttttctaaggaaaactggattgttttgtggtttcaatacaccaaggattccttctctcactccctcaaaaaatgttttgatctgcgtgtctgtattttaaagaaattctgtaaaatcaataataaacgtattttttaaaggcattcattttgtctttcccaaagtttaatgctttgccttcaaggatgaagttctccatccttgaaaggtctgcttagagggaaatagaatcatgcctcaaaagccttttaagaaactggcttaaaacaaggtgagaatgtgttgcttctctagcacaagacagaccaccttaacattcccagactaatctacacaggcttccaactaaaggatagtaagaaaggaaaataaaagaaaaattattacttgacttaaataccttaaagaaaaacatgtattatcttaattatagcataagttcaatgatcttgaaaaactaaaataaaacaaaacaaaacctaaaatgtcttaaaacactgacagttataaaagttccaaaggaaggtgtttcaaaacataaccaaaatttaaaccacgatgcaggatgtcctatttttcccttggcaaatatctgcgtttcaaacacagaatgttatttttataaatagctattaaaacatcctaacacttttttaaaaatataaattctctttctcggatctattcttttggtgcttgattagaaaatttggcattctgatgggagggtcagtgttaattagatcactgtattcaactgttttctgcatttaaaaagggctgagcagaaaagaataatcagcacagcaacagtgccatcttttgaccgaaacgagagtgattttccctctttcattaattcctcatgacttatcaccagaagataaacaaattctttttatgtcatcgctaaaacaagtttgaagtcacaatcgctgtctcgcctacaatttctggtacagaagtaaaagaatcatacatgtctgtgctcttgaaaaattaagattacagccccaatatactatgattaatatatttattcctcatctttattcatgtcccttccttcgccattagagtatcaaggcaatagtacccttccgttggaagcaaatataagtaaaggatgccacaatattagcaagtttttccttctcagaaactctagcattatacattttttaaaaccaagtaagactgtagaaatttaaaaaatttaaaataagcataggaacatcgatcctgcagttggtccattgtaaccatttaatactcaattaatatttcagaaagcctatatgagactaccttataaagctatctgcaacttatgtagaaaagaaaaacagttatataattaataatgtgaaaaatgtatgaaaactacagtctttttatctcactgcccaaatgacagcttaagtccaaaaccaaaaaggtaagttgcttccagagaacactggacacatgtacatattcctccatgaggaaattcttacactttctttaaactagaatagagcagcaagaaaaaaaaaagaaagaaaccatgtcctttgcagcaacatggatgcagctggaaaccattatcctaagtgaattaatgtagggacagaaaaccaagtatcacatgttctcaattataaatgggagctaaacattgtgtactcacggacataaagatggcagtaatagacactgggaactactagaagggagagggcagaaggggggtaagggtggaaaaactatttggygctatgcttactacccggatgatgggatcaatcgtatcccaaacctcggcatcacgcaacacatccktgtaacaaacctgcacatgyacccccgaatctaaaatacaataaattatttaaaaaaataagtaaacaaaatagaaagaatcttcctgaataaaagagaacagaatgtggatttggtccagaaatcaaacaagatgctcactcctatgttaactgagtgtaggacatgtgatcagcttaattaatactaccttatgtttacttggtgctctagttaaagagcacttcacagacagagtcttaataaaaccttatgaggtgagatgtacaaggtaaatagtctgacaagatttatcaaatcgaaggtcacaaaaagactctgatttgcctgaagtgacacagctaattaaagcagcacgaagactgccactcaaatctagtaccggaaagaggacctcaagcttttacctcaagctatgtgccctgaagcaaatactatgactgctaaaataagtttggaatttgaggcaatgagacacaggacaccacatgcattcattctaacatcccaattgtctcaaatacccattgaaggtaaaaaataactatatacctccaggcacttttaacataaagaaagtagaattaataggtcttaagcaatgacctgagaatcttacctagcagtccttttatagagcatacaacctccacctattaaagtgctgctgtacagcattatgatgaggtgaatgaaagcacatacttcacactgagacataatttgaaacttttcatcacagattggcatttaaatgatagttgtgtacaattttaacatattagactcaatgtagaaactcaaaagtagttagtccttcattaaaattccaaataatttggaataacttggtagttattccaagtaacttggtaattcatttaacaatactttgtttgtataactctaaaaggtagataaaaatactgttttcctcagaagcttgactcagcaagaaaataagtagacaaacagcctgtattaaaaagcctattttcagccttcatttacctgattctgccattaatcctcaacttcatgaaactttcttctgatgtggcttcctggaagctattttttctttgttcatcttctatttctctgaagtccccctttagcctccgcctccccatctgcctttcctctttttcatatcccttaaatatcagtctgccctagaactttatccttcatttccttttttacctgacgttaagtgtgttatatgttacctcattcaatctttcaattaagttctgaggcatgaattattattcttactttgcagatgagaaaactaaggcaagacagttatttgtacaaaatttctctggaaatgtccaaaccaggattaaaatccaggcaatatagttctatagctcatacttttaatggcagttatcccctgccattcattacgtaagggctatgtcaactacttcttgattattgtaaaatctttcaaactggctttcttgcttaagagtttggttattcttgggccgggtgcggtggctcacacctgtaatcccagcactttgggaggctgaggtgggcggatcatgaggtcaggagattgagaccatcctggctaacacagtgaaaccctgtctctactaaaaatacaaaaaattagccgggcatggtggcgggtccctgtagtcccagctacttgggaggctgaggcaggagaatggcatgaacccgggaggcagaacttgcagtgagccgagattgtgccactgcactccagcccgggccacagagcaagactccgtctcaaaaaaaaaagagttttgttattctcttcacatcttccagcattacctgatcaaggaatttccaacttgtagcagacacctctagttactcttcagtatctgttctcatttccttccatagtaatgggatttttaattgggcacagccaaggctaatttcctaaactgccttgtaataaccataaccatatgactacgtctgatccatgagatgtgagtggaagtaatgttgaattatgctttgactccttcctactagttgcaatgcagattaaacagcaagaactgggatagccaccctggattgtgaggttgaagattaggcctggatccctgatgattctggagtctggccatctactgattacctagacaactctgggaagcctactcagattcttatttaagtccctattattttgagtctctttctctctcygttatattagaagaaaaactgtcttaactaatactgaatttggtaccacgtggagttgttgtagcagaatctaagtgaagaactgccttaataaacaagtaacagagggcaaggtcacaaacactacaggttagaaagccagtatgatggctagataatttatgttcaacttggctgaaccatgatattcagatatttggtcaagtattattctgggtgtgtctgtgagggtgtttttagatgacagtaacatctgaattgttagactgagtaaagcagatggccctccataatgtgggtgggcttcagtcagttgaagaactgaatagaacaaaagactgacctccctggaacaagatggaattctccagcagatggcctttgcacttgacctgcgatgttgactcttccctgggtctccaggctctagcacatccagcaaatttgggacttagccttcatagctgtataagccagttccttaaatctctctctctctctcgatagaaagacaggcagacagtggtcccatgagattataatgcagctgaaaaattcctatcatctagtatttactatactttttatcattatttaagcaggtcctccttcttaaaaaaaaaaaaggtaactgtaaaacagcttcagacagatcctacaggaggttaccagaagaaggtactgttatcatagatgacagttccacacatgccacttcccctgaagaccttccagtgggataagacatggaggtggaagacagtgatattgatgatcttgaccctgtgcaggcctaggctaaagtatgtgtttgcatcttagtttttaacaaaaaagtttaacaacaacaacaacaaaaaattaaatttaaaaatagaaaaaaacttatagaataaggatataaagaaagaaaatatttttgtacagctgtacaatgtttgttttaagcttagtattagaaatgtcaaaaagttattaaaaactttaaaactttataaagtaaaaaagttacagtaagctaaggttaatttattacagaagaaagaaaaatattattttataaatttagtgtagcctaagtgtacagagtttataaacgctacagtagtgtacaggaatatcctaggccttcacattcactcaccactcactcactgactcacccagagcaacttccagtcctgcaagctcccttcatggcaagctccttatacaggtgtacaatttttttatcttttatagcatatttttactgtaccttttccattttggtatgtttagatacacaaataccactgtgttacaactgcctacagtattcagtacagtaacttgttgtacaggtttatagcctaggagcaacaggctataccatatagcctaggtgtgtagtagtaggctgtatcatctaggtttatgtaatcatctatgtttgtactatgatggcttcccaaggttgtccaggtaattagtagatggccagactccagaatcatcagggatccaggcccaatcttcaacctcacaatccagggtggttatcccagttcttgctgtttaatctgcattgcaactagtaggaaggagtcaaagcagatatacacacacacacacacacacacacacatatatgtatatatgtgcatacatatatatgtgtgtgtatatatatatgcgtgtgtgtgtgtgtgtgtgtgtgtgtgtgtgtatacatgtatatctccactctttttctctggagaactctaatatagtcagtgattcttactgtgccatgccaaaacatttaataaaatcattgtttatgatatcktggaagagagactatatactaacaacatttacataactctaggataactagaagaaaattgtaacatgttagtgtatgttaatgagagaaagctcaggaaagatctgagggatttggatgctgagatggaagaacacagctctgctcaggaatgctctctgtgtgttgaaatccaagcctactgagaattcagcaatttgggcctcacagggttgaaaagattttgtaacccaaagttatcactgataacttcctatcactgaaagttatcactgataacttcctatcactgaaagttatcactgataacttcctatcactgaaagttatcactgataacttcctatcamtgaaagttatcactgataacttcctatcamtgaaagttatcactgataacttcctatcactgaaagttatcactgataactttctatcactgaaagttatctctaaggaggcagctcttccaggaataatacagtggcctcaagccttattcatgcacttctaagtaaatgttcttgtccagacaatgggagttaagccaaaagcaaaaataccacttttacacctgacccaataaaaaggagcaaacttttgagacacacactatgaataaacttcaaaaatactatgctgagagaaaaattccagataaaagagtacatgctatttcattacctttttaagtttgagaacaggcaaaactaatctatggtaaaaagaaatcagaaaaataactgcttttgatgaagggaacaatgaattctgaaggcgtactcagaatctttctggggtaataaaatgtcatatatcttggtaactttgctatgtaatcgtcaaaaactccttgagcttagtgtacacatatattgttacacatccagtggctcaacatgtaggtaagggcagcaactgtgcccacagctcctccaggaatcacaggaccttccttcagctcttccaaattctggaccaggttcctgtgcaggtccatggtggaatccaccaacttttctgcagatcgctcacatcatcaaaccggatgtgcagagaagagacgtgtttcatcttttgtcttcgtggattctagtgtgtcttttactccccgctaacctcacgtgctaactgccagccctgctcacttaaagcctaccaccagaagcagtgacgcaataaaacagactacttaaacagctcccttaattaaataatatctaattccaataataaatctcttatatcatttgtggagattttactctgaccaaactccgatacatagctagcaatacttctgccccttcaaagcaagatagacactcttgtgtaattaactaccaaatcaaggaattaaaattatttgcctcttctttctagatgctcagaaagttctaatgcttacacaaattgccacaaaaatcataaaatttccttttaactaggtgaatgagcttgtagtcacttagaaaaaaagtgaataaaaatggtctcttcacctagacccacttcagagctcagtctttgaaactttcattgattctccatggaatttctccctattctgtttttcccaaggaataaatttttagctgcttgaaaacagggtttgtgttgcattcattttgtattttttacatacagcacaaccggaaactatatttttataacatatttattaaataaatgaatgggctgggtgcagtggctcacgccagtaatcccagcactttgggaggccgagttgrgtgaatcacctgaggtcaggagttcgagaccagcctgaccaacatggtgaaaccccgtctctactaaatacaaaaaattagccaggtgttgtggtgggtgcctataatctcagctacttgggaggctgaggcaggagaattgatggaacccgggaggcctccgccttagtgagcagcaagctgagattgtgccattgcactccagcctgggcaacagagcaagactgtgtctcaaaaaaataaaataaaaaggccaggcgcggtggctcacacctgtaatcccagcactttgggaagctgaggtgggtggatcacaaggtcaagagatcaagaccatcctggcccaaatggtgaaacccccatctctactaaaagtacaaaaacagctgggcatggtggcgtgygcctgtagtcccagctactcgggaggctgaggcaggagaatcacttgaacctgaaaggcggaggttgcagtgagccaagatcgtgccactgcactccagcctggcaacagagcaagactccgtctcaaaataaaataaaacaaacaaacaaaaaacaaataaatgctacctttattaagaggcaggtcaggaagagaattttcagtgtaaaacaaagaaaatatatttaattgaaactaacaaaaattctgaatagagttctgcacatgtatcacagaacttaaagtataataataaaaaaaagtaaacgtggtgaaatgtaaaacagttgatgaatctctataaagagcacacaggagctccttgtactattcttacatttttttctaagtttaaaattatatcaaaataaaaattttatcaaaaaaaattctgagtagagaatagttgaagcaacctctaacttttatgttatagaacaaatggaaatgatagaggccagaggctttatctgaaaaaaaaaaaaaaaaaaggaaaaaaaaaagcttttgctaacaagtaatttataaaaatgagaatggtttttcttcctgccaactgggtcgtaaataataaattcctacagaaagtaaaatagcctgttaatgagggcagctacttagcaattgtggtctcatttctgattgagtagaacagtttggtaacctttttaaagtaaacttgactttacggaacatggccactgttttaaaattgagatatggtgtccccaaaataccattaagacatttaaaaatgtcagttgtcccttacactgcctttctagtaacaaaagggaaacctaacagagtttgggagagtggggcaggagacagtagactgtctgatttaaagaaaattaatctagtaaaaaaaaaattagccgggcatggtggctcacacctataatcccagcactttcagaggccaaggcaagaggattacttgagtacaggagtttgagaccagcctgggtaacatagagagacccctgtttctacaaaaaataaaaaattagccaggtgtggtggcacatgctgtggtcccagctactcagaaagctgagacaagaggatcacttgggcccaggaggtcaaggcggcatgatcacaccactgcactcctggacgacagagtgagactccacctcaaaacaaacaacaacaacaaaaacaaaacaacaacaacaaaacatatatatgcctaatttgatacagcaatagaaatattttaattaggccaggcacagtgattcatgcccgtaatcccagaactttgggaggccaaggcaggcggatcgcttgagcccaggagtttgagaccagcctgagcaacatggcaaaacctcatttctacaaaaaatacaattagctggtgtatacctattgttcaaactacttgggaggctgaggtgggaggactgcttgagcgtgggaggtggcggttgcagtgagctgagattgtgccagtgcacctgtctcaagaaaaaaaaaaaagttttaattgctacaatataatttaacaaatggtaaaaccacatctttaaccatttcttttcttccctgaagcattttgggaattttttcttcatttacttttcctttccatttcattttttttaatactacattgttgacttctagtattcctttccagtatttctgtttttgttccttttcagcagttcccatttctttcatttttccactgcctgtttctcatcatttcaccctgtttctatcagtttactatttctgctggcaaacagcagtctgggcaagaaagcaaatacaaaaaaaaccccgaccactattatacactacgaccaaagaaaacattaaggtgaaaagttgaagctcatgtacaatctatcaaatagatgcagatttaaaattaagtttcagggtactataagaatctaaaacacagacatttctaggttgatagttacctaatgccgtcatcagttttaaaagtattattttacaagcctgagggtagccttcactgtgctcacagttaagtaatcaaatttctagatatcacactgtttattatcaaaagacttctgtaaattcaagataaagaaacatgaccaagcttgccgttttcagagataccatacccagcggctattcttttgtcagaaacaaaaacaaatgctgataattatcttctttccactgacagtaagtttttaccttgaagaagcaatatttcttataaagaatatttctttatatttatattcaatatttcttataaagtactagtacaacagagtaatgacattagatttttgaaatagattataaatgacaaattttaacatatttattattggtttccatttggagacttcacatttactacctcttcttaacagttcattgcctcattaatatgagtatggaacagtagggattaaaactgctccactaaaattgaacataaggatctcattttgtgttgcttaggtgagcaaagagtgacaacaaacccacattaggcctgcctaacttcaaggtagggtctttgacctatcaaccattgcctcttaactcatacaaatgaaaaaaaaaaaagaaaagccttcaagaaaaccaccagaattgacctgattttgtcccatggcaaatgtgcttatgaatggagattgcttatagttgattttaatgatttaaaagggtttattcaaaccgtgtgtgtgtgtgtgtgtatgtgtgtgtgttaagaagaaactttcttcaagtgaaattctacatgcttaaccggaaaaaagataccctgcctctagctagatttggtgtgccagactaagggggtctccggttcatccctatctattccttcaagacagctcctcaagcgattccacagaaaccctacatctttacagagcagagtttgaacgccaatgtcctaaataaatctttggaggaaaaaaaatgaccatcttttcctaaagaagtcatttgactcctgcagtagccagactaaaaaagaaataaaagcctacaaaatttactaaaggcattttagtgactccatttaggtcgatggcatggtaagttcaaattcctgtagtgagtggcagaatgaggccaaatgccaggaaaatcttgctgacagaagaagaaagagtcacagggactcttaacggataggctggatcgtggtttttcagcccaaggttcaatcctttggatcataaaagtcgttgttcccacagaaagaagattcgggggaggcaaaaagaacacagagcaccaagagataactaagaatgctcaagtgacaaagacgcaccttttcccaaaatagccaggtcatcctctgctgcacgcaatggtcactctttagaaatcttgaaaagtcagttcaaattttttaaactagaagaatttatgtgctcccatgtttcaaatacttaaatatacttattatacttattggctcagttttgttttgtaaaatatccattaaaagcttttcaaattattaagaaaaaaagatgttaaactcttgttaacatccgtggtattttacaaattgaataaactatggtgagttaatgaaacgcttaaagtatcatcttattttgaagactgctttcttctaacattaatccattgataatcattgctcatctggaaaaattccataacttcctaattatttattctcaattgctttcttctatgtttgctctcttgtgtctaccctctatgtgtaataatctttctaaaataaatgtaattatttgatttcattattagaaatacttcagtagctctccactgtatatataactgttgtgctaaattatggaataagctatcccctcatcctcttaatcatgtttccatgccaagcatgtaaggggcaaggcttttattttctgtctaatagctggttggaagagttgattgaatcccaagatttagacgtgggactggaataaaaagcttgcaactgggactcaggtccaaatcatgcccctcaattcagcctcatcacagaggcctggttggggttcaggagtgagctaacataaaagatcaaattgtcaaatcagattcacacagaccagagaccttatccactatcaagctttactatttaataataattttaagtatacaggcaatcaagtggcacaagagaagcagagaaaggtctgggacagctgatgtagctccccaggtcttgctaccagtattgggtatgggctttctaactcagaatagatgaattctctaaatcatgttcacaggtcgcctcacacaatggggagcatttaggttatgtcacaacataccttatgaagttgatacgtggtatctctaggaagccatgccccataaatctatatagatgctagtttgtatttaccataggcaatcctaaccaggaacattctgcttaaagcatgccataaataagaactatcctcttagcaaaactcattagtctatttaccaaggaggccaattatctacatgtttatgagaagatttaattgggtcacctgccttctttctttccttaggagtatccccctggaaatcaaaacagaaatggatcacaggccagctgctataactccttcccaaagagttaccaggctcttgcctggaactttaaaaagttgatcttttaatctcctttaggatacatttttgtactatttcttgcattaatcagatcgtgtaaggaaaggagagttttagatattcctaactacctgaataaatgaaggaatggcatgttttcaaagactattgaataattgaaatgttcatgataaactaagtggaaaaagatatcaattgtatatcattatgattcctattactctacatactatagcagccaagggtaataaataaataaattactctacatagtatatatatataaattactctacatactatagcagccaagggtaataaataaatcaataaatatatgtatcttagctccagtatattatactctattggatattattatactattggataataatattggggtannnnnnnnnnnnnnnnnnnnnnnnnnnnnnnnnnnnnnnnnnnnnnnnnnnnnnnnnnnnnnnnnnnnnnnnnnnnnnnnnnnnnnnnnnnnnnnnnnnnnnnnnnnnnnnnnnnnnnnnnnnnnnnnnnnnnnnnnnnnnnnnnnnnnnnnnnnnnnnnnnnnnnnnnnnnnnnnnnnnnnnnnnnnnnnnnnnnnnnnnnnnnnnnnnnnnnnnnnnnnnnnnnnnnnnnnnnnnnnnnnnnnnnnnnttaggccaggcatggtggctcatgcctgcaatcccagcactttgggaggccaaggaaggtgggttacctgaggttgggagtttgaaaccagccaggccaacatggtaaaaccccatctctgctaaaaatacaaaaagtagccaggtatggtggcagacacctgtaatcccagctactcgagaggctgaggcatgagaattgcttgaatccaggaggcggaggttgcagtgagctgagatcatgccactgcactccagcctgggcaacagagtgagactctctctcaaaataaataaataaataaataaataaattttaaaaagtagataatgtaaataaattaataaatgctgataacatcttattttcaagattgtattcatattgtcaatatatatttgacacattttttatgaaagaaaatataatagttacaaattatagctttggatggctcctcaatcttttatcatttcattgaatgtgtaatactttgatcagtaaactcttgttaaaaagaagtgtgtactttctgcaaacaaattgcacattttaaatttcataacctctgactactgccacctaaacttaaagaaaaaagaaacaagatgaagaatacagaggagaaagaacagaaagaggaagaaaataattattagtagtaattgtagtagttaatagtagtttgcttttgttttctggattccaaacatatgactaagcatacgatgacagtatgcgacatgaactgaattattaaaactttaaaaagaaaacatatacatagctgaagcagtggtggaaatcttccattctgatagccccatatattcaaatattatttttccaatataaacacatcaattttttggtcactgtgttgatgaatgatgaaggccatgctgcacagtcaactaggtattccttatcttagctccagtgcatcagagaatagatgttagtgttttttttttttttttttttttttaacgtttctttcaaaacacaattcttgctgtcagagtgccactttttaaggattgttatctggatgatttatacaaattttcaaaacgttaccgaataatctaagcttcctttttcaatgagctcacaaattggattttacttgtcaagtagtgagaaaagaaaaccagaaggggtcagtattttaaatgtgattcattttctcctaggaaacgaatgacatgatacattactgcaataagttacctttatttttgttataaatcatattcttcagttagtgctttcccacctaaaaatcatgtaaacttctcttatacaaatatcatagtcactttctaaagactacatgtatttcattttcagtatattttcccactttatttttcgtaatacatttaaatacaaatgaggcaaaagaatttgattatatagtatgaacaacatagcatgtaacaggaatgactggctcaaaaattattttgagaaatgataataaaggcatacttttaagtggcattccattcatagaactgctttatgttcaattattccttttatccttgcccctcattctcatctcctgaaaatagctttgggacagatgtgtgagaaaattttatgtaacttttatctttgtgttctgtaaattcaatagaaaattctaattcttctacctctatatggataaatcaaagagtctttaagtatacaaagaactcatattgttttgagatctttctcctgtcatcattgtgccttccaataagtttttcatgttaaaaaaaaccagaaaactagttacattactatttttatcattatatatactgttatatgtacattaattttaaaaaattttaaggagtattacatatctactaacagtttaaaaaaaaaatttaacatcagtgctgggcacagtggctcgtgcttatggtctcagcacttgggaggccaaagagtcaggatcacttggagccaggagttcgagaccagcctggggaatacagtgagacactgtctctagaaaagaatttaaaaattaggcaagtgtggtagcatgcatctgtagtatcagctgttcaggaggcttaggtgagaggatcacttgagcccaggagattgaggctgcagtgagttatgatcgcaccactgctgcgctttagcctgggagacagagcaagaccctctctctaaaatatttttttaaataaaaataaaaaaaaaattaacataaaaaaacttttatcaaataagacattaattttcataaaaatgtgccagattagtatcgagttatagagtatatggttataggacactgtctttccaaaagttgaaattctgaacactgtgtagactgcttatgtaacataaatatttctcataaagtgactgcatgccttcacgcagtcataaagggcataaatacctttttaaaaactgaaaaataataattgtaaatatttatggagtataatgtgatatcttggtctatgtatacattgtagaaagagtcaatctagttaattagcatatctatcaccccaccaacttatcattcttttgtggtaagaatactacaaatctattcttttagcaattttgaaatatacataattaactgtggtcaccacatagtgcgacagatcattataacttattccttcagtctaaccgagagttagactttgatcgatgtcttacctttccccatccttcccttcaccctcagcctccagtaaccacctttatatgctatttctatgagatcaactcttagattccacacggaagtgagatcatatggtatctatctttctgtttctggcttatttcacttaacataatgccctactgtcccacctatgttgtagtaaataacagaatgtccttgcttttaaaggctgtgtaagwtctcacgtgtataaagtatctttgagcaccatatctgtcaacagacaatgtacatacaagtctagcctttggaaaatagtacaatcagaaagtttcccttatttacctcttcactatcttttccactccttttctcacttctgagtgccatcttctgctcaaaatatggggycagacaatatttgtttatctgcattccaattgctctttgtaaatgaaaataaggatctgcaatcaatccttcatatgaatgaaactcatacacattaatgtttttactctcttgcatgcctgcattttaaaaccttttatttcatattgtgaaataaaaggattgccttttgttaacgaaaggtaatgcaataactagctagctgaggaaagattggaagacaggcaagaggaaattctaggtagtgagatagtgataaaatagagctattcctgatgataaaagtgctatagtcttttttttttttcattttttgaagtcaagggcaggagataagagagagattgtgtctggtatcatcattttttttccccttatctttttaaccccaagacttgtagatgtcaggactccgatcattttctctgcctatagcttggatatcttaatctctcccctttgtcatcataatcatatagccaagggactmggaattttggctgcttcaagtcattccaaaacctctcaggcaggccaggaagcagaggcagggaatgtagagcagctgctgaaggaaaagaatgggagatggctggtgcaacagcctttcccaatctcatatgattacatgaaaacctacattcaatgtgatgtcagttttgtgccctgccaatttgctactgaagtgatgtgctactaaaaccattcctttagggaagtaagatgatggaagagaggagtggccactacagaagagccttagttgctgggacataagaaggtgcctatctggggtttatgcatgtgaatgatttttgcaatgatgattgaaatgctatacgatattaagaaaagcttattaaatgatttaaaaaaaactaaactctatagccatgttttggctatgtaaaagcaatactaataaaaataaattatgggaattgctttacatttatgcctaatcaccatgcagcataatcattacatcattatttttgtcagattaactgtgctatcaatttaattacagctataaattctaaatactcaacccgtgtaatatactgtttttaaacaattacttagtcttttctacatgccagacaccaaattatatggtaggaataaaaataataaaacaatccctgctcccatggggcttacagtcttgtcaaaaagagaggcacgtactagataattgagtagcagaggaactgacaataaatgtatctttaagtgaaggtaaggacatgaggacaatatccaccccactcctaggaagtcaggcaaggcttcagtaaggagacgtcagagctgattcccgaagaatcagtagagtttgccaggagaaagggaagtgtaaattagaataactctcaaggaaaaggaacaggaaatgcactggcctcagaaatgagacactgtgtggactgttgagaaactgcatggttgcaacaaaatgagtaggagtcctgagacaatgaggttgctgaagtaagaaggggccaggtcaaaagaggacttgagtattacactaacagtatgaagtattgcagnnnnnnnnnnnnnnnnnnnnatcctggttttcctggaaaatccccaaattaaaaaaacaaacaaacaaacaaaaagagtgtgaaattttgctggtaatggggaaccactgtaggatttccagaaggataattgacacgagattttcatttcggatgtgtcactctggcttcactgtggagaatcaagcagtatggctcacaactggagatatgtaggacagttagaggccagttaaaatcatttaggtgacaatactggtggcttaggttaggctattcaggatggagagagttgggtgaacttgagacacatgtaataggtacaactgagacgtcttagtgattgattgaatatatgagaaaaaggaaagttgaagatgggtgtctgacttaggcaaatatatggtggcgtggcatttactaaaatcgagaagagagggggaagaggcaggttggtggaatttctagtctgattttttgttttgtcgatttggtgaagattctcctaagagaattagaaattatgatttttatcttaattatttgagttttaagtttctggagatctcggatcggtaattgaatatgtaggtctgaggctaaggagaaagatctaagcttagattcatatttgagagatagtctaagctcatgtattgggagatatcagttgaagccatcagatagagaaaaggatcaatatcagtaggctaaagaaacccaaaatttgtgggatgagctgatgaggagcgagttaaataatatatgaagaaggcataactgagaagtagggagaaccaggaaagcctctgatcacaaatgtcaagggaagagaatattttaagagggagcaagcagtaaacaaagtccagtgcagcagggagtataaactggtatagcctttttgsagaacaattcaacacagctattaaagtatttgatcctcagttctacttctcaatatttatttaatcaagaaaaatgctagcagacctgtcggatgagacaaattaaagaatggtttataaaagtaaacaaacaaacaaacaatgtaaatatccagaaatagaggattaaaggattaaaaaggaatacaatagatcctcttgaatgtttcacgtaagttaaagagaacaaagtagatctacatggaaaagacttaagaaatatttggttaaaaaaaaaaaagaccatgtaacagaagaatatacatatcatgataaaagttattttaaaatgtatttcactacatgcagatactaatccaacagttaactctgagaagaaagctgatatttggttgggcatgtggccaacagggccttttgcttcatttgtattatttgatttatttttttacaatgaaaatggtttcatgtgttacctgtataattaaaaatgttttaaaaattctaaaaattttaaaaattaatagttctttaataagaataggtttggaagaataaaggaaacagacgataaaatataattaattgagacaaaatgggaggaaaaacagtagacagaatatatcacagaaaacctggtaatagaaagaaaaggaagtcagaggcagatctgtcaggagacagagaagaaaaataatattctcagaaagcctgtttgcttacttatggttttaaaaaatgtagattacaatgttaataagccatcacaagatttggtatctgttacaggtgtaaggaataacaatggcaaggctggtgtagcaggaataattaagaaactgaggctgggggatgctgcctcatgcctgtaataccagcagtttgggaggccaaggcgggcagatcacttgaggtcaggagttcgagaccagcctggtcaacatggtgaaacccccgtctctactaaaaatacaaaaattagccaggcatggttgtgggcacctataatcccagccacttggggggctgaggcatgagaatcgcttgaacccaggaggtagatgttggagtgagcggggatcacaccactgcactacagtctgggtgacagagtaagactctatctcaaaaaacaaacaaacaaacacacaaaaaaacaaagaagccaaatcaaaacagcttaggtgagaaaaatgatttagagaagggtctaggtcatctcaaagctaataacccaaaggctaaaagggaacggtggtataaagttttcaaaatatcttagtgttacatgaaaggtggacatcagaagtatacaaacaaatagtctaactgctgaaatgttcagaaaagccttctgataagtactaccaagaatcaccataatcagctgagacgtaatctgatacaaggctatgtattagtattggttataatatttaggtaatggtatatgtttattgttgtgtatcagtcagaagttggaaatgcatactgtcattcactgtctttctacgtgcaagaggtaatgagtgattaaggcaccatttaattgtattttaaatattatagataattttgctttagtggccaggcgtggtggctcacgcctgtaatcccagcactttgtgaggccaaggtgggcagattacgaggtcaggagttcaagaccagcctgaccaacacagtgaaatcctatctctactaaaaatacaaaaaaaaaaaaaaaaaaattagctaggcttggtggcgcacacctgtaatcctaactactcaggaggctgaggcaggagaatagcttgaacttgggaggtggacgttgcagtgagccgagattgcaccactgcactccagcctgggcgacagagtgagactctgtctcaaaaacaaacaaacaaacaaacaaaaaaatttggtttagcattaaacaagagaattacatgggagtagggcatatgtcaaaatcgctgttggaacccgaacaataatgtttcaaaatggctgtgttcttaatgaaaccaaatgttcagtggccaggtccttctggaaaattctcagaggggagataagcgctaacaaccagctacaacttgctaggggctgattcatccagaacaataacaaaacatgcatcctgattcaaagctattcctaaggggctgctcagattctggtaaaagaaacagggctatgaacccccagggttgggtcccagtgagcaaacaactttgaactacagtaaaattgcctatgccctttaaaagacaatgcacagcaatactacacatcactgggggtggagggaggggcggtgagcattacagtatgagcgataaaggggaagaagttgggaattttttgagtgtagcctttggaggaataatcattgacacctacacagcaagccctccactgggggcctgacatgttctattatgcctgtgtaaattacatcagacaccaaaatacacttttgtattaacagtccttaccttaacagctctatctgtagaagaggcaaattcctcctttgacttatcctacaggatgccttctgagagtcagaagaaaacaaccagcttcgatcatttgaacacggagcatccactaacacctagagaaaaaaaagacaagtgatgcaaatatgcactgacaatctattctcaggcacgaagtagatagagaagttctctaaaacatggtaaacaaataggaaataagtaaaaacatttcttttttaactgaaaatacaccacagtaggtttttccttatgacatttcctcactaacacttttcagaaaaacttaccatgtactttcagtgtttgtttttgggggcttaggatgggagaattaaagtttactaggtctactaatgctatttgatatccttgacaaccacagcaaaaatttttacaaaagttactcattgtaatcagacattaataatatttctgaattctcagcacttatttctaagaactaatatttcaacttcagcttactgaaataacctctttttcttcaactgtcatactctgatatgaaatgttactgaattaaagcaatacagtactgacccaaataatatccgatcttttcctgagtatctttgagttacctgccaatataaaacattctataatcctcaatcccaatgttactgcttcctttgaaccatgctgaccatcaaatgaaaactgcttccatgttcactttatcaaaattttccagggtactgagaaactgtatcaggctatgtctgagaacagatggaaaataacaaccacaaagcaacataatagtggtattactgggcstccatcagtttgtcacaatgtaataaaagtaccttgtcaaacatttcaggctgggcatctcccatttttctgccatccaattcagacactttaattacatttatcaaaggctgtgggatgaaagattccaacgtctgccttagccacctcaatctcagactatcatattcattacaatgaagataacctaaataaaaaggattaaaaagtttcaaatgaaggcaatggaactgttaaatttctacttttcagcaaataaatttcagaaagaaattaactcatcataattatgcagaaatagggctcagaggtaaacattattattttcttatgctttaaaaacagaaataaggtatatgtgtatgtatatatagatgmacatacctactacataaaacatttacaacagtcatgcctacacagtctctcagaagctctcagcatttgctccaccaagtttaattttattagaggtaaaacctataaaaaattataaattcctaaagatatgttatacaaccaatacctcagacatggctctcactctaaagaactaacgcttaagagtaaacacaggtggtaattcaggtgcaagaagatgaaactcacattgcggcagacgcaggaactgtcctggcttaaaagcttcctgtcccacaggaaccattattccttttaaaaactccacaggctttcagtgtctccacagggacatgcccagttataagaatcactgcactcagaagacccaaagcatggcacctctatcaggtctctaggggttatttattctttctcccagcccacatgcagtttaccaatcagggtcatctttatcataagcaatcttgcctagatcatagtgacaatctctgtcaggttaccaaggcaacaatactagagaactaactgaacattacagtttaacgtagaagggaaaaaacattgtaaagcctttgctcaaatacatacatacatacatatacacatacatatatgtatatgtatgtgtatatgtattttaacaactccacaggctttcagtgtctccacagggacatgcccagttacatatttttttttttctgattgtcattccactgttaaaaagtaaaaaaaaaaacttttagtgacttcccatcatccactgagtaaagttcaaatgcagagtccttaaatcaaggtccataatagccagacctcaggacaatgtttccattttaatctcccactatttccccagtatactctgtgctctaccaaacttgatggactactccatttcccaaacatactcagtacttctcttatttatctcacatgagaggtgtttctgtgtatggcttaccttctctactacgagggctccatatttcttttcctttttttttttttttttttttttttgagatgcagtctcgctctgttgcccaggctgaagttcagtggcatgatctcggctcactgcaacctctgactcccaggttcaagcgattctcctgcctcagcctcccaagtaggtgggattacaggtgtgcgtcaccacgtctggctaatttttgtatttttaaatttttgtatttttagtagagacggggtttcgccatgttggccaggctggtctggaactcctgacctcaggtgacctacctacctcggtctcccatcgtgctgggattacagacatgagccaccgtgccaggcccagggctccatatttctatagggaagacactcaggagatggcatcaattttgttgagaagaggagtagaaaatcatcttaaagcacatctgtacagctagttttcatgtttattttgggtgtcttttggaggactcactaatggaacttaaataggtgtctaaaagccctcgtcttagcttgagatcactagaaaacaatgtaagacagaagttcatggtatggacagggtgcaattctaaggaagcaaaagtgagagaaaaaaggaagtaaatcatggaagtagcatgatagatacaggaggatttgtaatcaagctgcctagagctttggtcagtctctcagggcaactctacagtttgaaattacagagccttctcaggaactggaggttagtggaggaaggaggaagaacaatctgctggctgctttttgtctctttctctcattggttaaagtccacaacaagagctggtaacttctaccaactttggggttgtgtacctgaccccttcaggcaactgctaaaaaaaaccagacagtacccaaggccaggtattgcaagcatacaggtgaggtgatctctgcttgtcacctggcactcattgggaggctcttcaatttgtggcagtggtagcattagcagaagataactgcatgaatggcatgagcctttgctagggtttctccagtctctggaaacaattcaagtggctccagccacgaggtgagggatgggagtaaagatgaagccaaacatatctgtagtgatgcataagctgggtccacaagataacccccaaagtcacccctgccattgttcaccactgcctatcaaatactaagggcctcagagaaaagaggtcttactcacctttcattcaactttcctctttttctagtttaaatgttttacattctattttgacttttctagtggtaacccaaaagacttttaacatgcacgtgttaagaaaaatctaagctaagtcaattttcaccaactttcctaaaagatacaagaatctcgtaacactcttgctttagatgctactgttattgtatatctgggttttcttttgacttacatttttggacaccacaaaacattatcatggtcttatatagccaatgatggttaggcactccccacataatatcccacctttgctattcattttttttctaactcctatcttccatcttggatggctttcttttttcctgaagcatatccttcagaattgttggtgaaaaactcttaatctctctctctctttctctattttgcttttgctcttcaggagcattattgactgaatatatttctggattgatagtcatcttttatattcctttgaactctcgttctcaagagtcaaccctctgtccatcgttcctttgaaagtaagctctccattctttctggttgctattaaggtcttctctttattttcagtgttctgcaacttcactgtaatgatttcgaagcatactttctgaggaggcaagaattgaagttgctgcagacccatatggatttacctcccactaacacttttagtacacaggacagtatcattattccaattataatattgagaggaacacggcatcaaagttgaagacaggcagttttccttgcagttatttggagaggacaatttcttcctggtttaccttatatggtgggtatagcactttgaatcccagcttgatgtaagtgaatcttctattagatgctctacttgggtaggctctggctttgttttttattccttcactctcatgaagcaataaaaaacatgtaagtttttcatgttaagaaaatgttcttaggtcaaaagccagcttcagtacgtaatttaccttcaaggttcccactgtctcttaggttttggccactaagtatttaaagataattgatgcatttaaaaatttttgtttaatattatatcctacatttttagttattttcttaaggggggttggttagggtacccagtctgtcacaccgcaggaaacagaagtcttcatcatttctatatcccttacctctatacacataccatccaataccttgcatttagtatgtgcatattaaatgtagatgacttgattgaagcatggcattataataatgaatatttaaattattacgactgaagatcagggcagcttttcattaaattatatatagtctgagtcaagattctcaagtcagcattttaaaatagcttccagcagaattattgcttacacgtagactttatttgaaatggtcttaggttggttaaactttttaaaaatatgaartataaagtgtcacaatgcaagtttcatatatatactaacacttactacattgagacaattttgtgcttaaattgtcaaaaacaaccaaatcttaattttttttttcatcttaacaggaaaaggggcatatttaacaaattcctgaggatttagcatttgtacatggcaatctttggtccaaagaaagaaactgaaattggtagtttcattcattcatttattttagtagacctaacttaaaaacaataatcttgccttctttccagtttttccaattatttggagccataagctataatttatgatcattttctatgttcctctcaatattataattggaataatgatactgtcctatgtactaaaagtgttagtgggaggtaaatccatatgggtctgcagcaacttcaattcttgcctcctcagaagaaagaattagactgaggggcataaggcagaaaaagagaccaagccaagtttaagaccaagagtggaagtttattcaaaagctttagagcaagaaagaaaggacagttcacttggaagagacccaagcgagtactctggaggtcaagtgccccatttaaccttaatcctatgactttatacactggcccacttccggtgtcttgcacccctcttccttcattcttccttaagggtgagctccccacatgcacagtgccctccttacacttggaaggtgagcacgcacagtgtgtttagaaacttgtatgcatgctcacctgaggctttcttcccttttcagtggaatgcccccagaaggtcacactctgccattttgtctctttatgcacatgcttgagctcacttgcctaattcctgagattttattggaagctgattaccaatttcaaatgtttttatctgtttgggaaattgcctctccctggtgcctgtgatgaattatcactttagtgtgacaactgtggagcatcaggaaattgcctctccctggcactggctgccaattatcatttttagagaggcagtgtgataacagctaagtcatcgcctgatgattgcctgacattcctggtaggtgggggttagccctctcctgccccactcatgcctgattacctgtaaaaaaaagtgctgcaaaggataatggtaagtttctttaaacttacctggaagcaatgttacaaattcacaaaagaacaaaatggcaatgattaatttgttaaaatgttgttgacattagattaaaattcacttgagagtacaaccactttcagattctggtttattaaggacttgttatggactaggccagtgctatttgctgcagacacaaagataaataataatctgggccaggcgtgggggctcatgcctgtaatcccagcactttgggaggccgaggccggtggatcgcctgaggtcaggagctcgagaccagcctggccaacgtggtgaaaccccatttctactaaagatacaaaaattaggtatggtggcatgtgcctataatcccagctactcgggaggttgaggcatgagaattgcttgaaccaaggaggcagagactgcagtgacccaagatcacaccactgcaccccagcctaggcgacagagagagactctatgtctaaaaaaaaaaaaaaaaaaaggatctgtccctatgctccaggacactaacgggagggatgctacagaagtcannnnnnnnnnnnnnnnnnnntagaaagatttatatatgaggatataacaaaagttgttgggagaaagtgagagaaagaaaaaataaataaaaaacaagatgttggaagcagagactactaaaaaaagtttgaaaagcagaggtttaagcaatgtgattaacacaatccttagcacatacaaagtgttacaaaatggttattattttcattcccacaaagaagatgaacctaatgcagggagttcagagaaggcattccaggaaaattaaatcctgaagtataatctgaaggatgaaaaggagcaggggaagagaaaggaaaaagagacacctgtagaatgtgcaaaaaggactagagatgaagaagcaggaaggagagcaaaagcaattaaaccaagaaaggagtcttttcagtcttctctactaaccagatatcaaaaagttatcactattgggctcagtggctcacatctgtaatcccagcattttgggaggtcaaggcaggcagactgcttgagcccaggagttcgaggccagcctgggcaacatagtgaaaccccatctctacaaaaaatacaaaaattagccaggtttggtggcatgtgcccagtcccagctacctgggagaccgaggagggaggatgacttgaacccaggaagtcaaggctgcagtgagccaagatcgcaccactgcactccagcctgagcaacagagcaagaccttgtctcaaaaaaccaaaaaagttatcactgacatcaaagagattttcatgcctagagggacatagccttcagccagaaagttgactaagacaatctaccragctgggtcatccttagttaatatgctaatgttttcccatttagaatccatattgtttgctctttttctgccaagaccaggacattaaaaaggctatgttgacaacaaccatggtgagtccatcaatgtggtaacaggtgagagcagctgaaccaacagaaagtagactcttttttttaaatcatcctaaaacataagctttgtaatcattcaaagccatgagcctcttggcccagaataaaggtcagtactgatctaaagaaatttggtgtacaaatgcacatttagtgcagccatcattttacattttgcttataaaagctttgattagtattgcttctacattccaaattcaagcactgtagctaacctaacttgggctttaagcatcagcatgaagacatctgtacttcttagtaaatcattatcattagtcctacttagatgaaaagctactttacttggaacactgcctgtagttcattgcccttgatataagaacaggaagattcttctcaacttcaaactgctagaatatatcagtttgcctttgggttcctaatcaaatcaactttgctactataaatgtgtaaaatatttatagcctactaatgaggataatttagrattaaaatgccctctcttcaaaatggtaaccaaatttgacatttccctttcatcctttataatactaaaattccatatcctgaattaattagtataagccttttaacttataaaaacaatgtcaaaggacatagagtagaagtaaaaataagtgctccttataacatacaattccacaaaacttcagctcaaattataaaaataacgaggtaaacttgtaaaataacatttttgctgtgatttcttattttaaaatacagcaagcttcaatagctgagttttaaccagaactctaaaacattgggcatatttcctcctaaatatacagttaactgatatatttgtaccaatgcctagtacaactggattcacgtttctcataaaagaattttaaatctatttcaacagggaatgctctcatataaaagtataaaagcagtcttcaaactggaacatacatgccttggggatacacaccaatgttctaagggacaggaaggcttggacagtttcaaaagaatccattttcagatcatcaacttcctaaaggaggagaacacttccagtggggcatctcctttcacaaggtccttcaccaactttacaaatgacaagcaagcttcccacacatctagaatcttattatggtagaatgtgccagggtatcgaaacctccagaacatcaaacaagggcagttcaacacatcagtgttttggctgaggaagtgaataagtcagccaggcacagtggctcacagcacttagggaggcccaggtgggcagatcacttgaggtcaagagtttgagaccagcctggccaacatggtgaaaccccatctctattaaaaatataaaaattagccaggtatggtggtgggcacctgtaatcccagctactcgggaggctgaggcgggagaatcactcgaacctgggaggcagaggttggagtgagctgatatcacgccactgcactgcagcctgggagacacagcgagactccatctcaaaaaaaaaaaaaaaggcaacactgccttttgtaattgagatggtgtcacgtcatttgctttcaacaaaattaaaaatggacttaaagagtgcttacctaatagatctttaaaataatgcttgatgaaagatctgtatgtgatctgaggctacaaatcaggagtgtgaagaaacagtaaaacaactgtaacacaattttctctgggacaggatctcactctgtttcccaggctgaagtggagtggtgcaatctcagctcactgtaatctctgcctcccaggctcaagcaatcctcctaccttagcctcccgagtagctgggactacagacatgcaccaccatacccaggtaattttttgaatctttttgtacagacagggttttcccatgttgcccagactggtctagaactcctgagctcaagcgatccgcctgccttggcttcccaaagtgctgggattacaggcacgagccaccgcrcccagccaacatttccatcttcttatctgtgtgaacagcactggcatctataaaaacagaaccatcacacaaaaaacagacagaattgatgctgaactctgcctcttctagtagtaggtaatatttattcggggaagcctgtatcagttttttaaaaaaagaattagctttaaaagaaaaattattaagaaaaaaattgtaaattttgtaaatattgtaaaaattgtaaatgttgacttgttacttttaacaaatatttgtaaacctgtgtatcactttggttctaataataatattaatgaaaaagtcacttgaaaagactttttggattgtccaatactataccctcttctcacatgtggctatgaacacctgaaatgtggctagtctcaactgaaatgtgatgtaactgtaacgtaaccaattttaaagacctgtaaaaaaaagagagaatgtaaaatatctcattatttctattttgattacatattgaaacaatattttgaatgtattggttcaatgtattattcaaattaatttcacctgcttctactttttaaaatggaactacttaaatatttaagggtatatatatacttcacattatatttctactggaaagaattgccttggaaccttatagtctattgacatcaaaaattattttaaatgtatatgtttttgttgcagaaaagtatgacagggatatctacataagactctcaagtataaaggtaaacaataaaaaatacctatcaggcttatcagcattcatattatctgacagatttgtatttgcgaaatgttgaagttttgttcccaatcacctgctagaattaaattgctgaaaaaaatgttatttatactgacttcctcagcaaaaatttccattcttctccatagcatctcagttttcaggcttcctgagtttgcaaactcagtcttacgtttctccccatatatactttcagaattctctataacatacagatattaaaaagttgtcaaatactgaaaggaaagcacactacctggacaagcacactgcagcagagctattgatttccctccaggagcagcacagagatccagaaccttctccccatcccttaattccagagccaacactgggagaagagaagcagcatttaggagataatattttttcaggtttccaatttggtgtctttctgaagggattcggcccggagttctgctaaggtaacacttcactgatttaggatagttgggtaaagatccctgagagagtgtgtgatagcccttcaaatgtaaatccttttccagttcaaaaggataattgaatcggttaagcaggacagcatattgccagcatgatggagatgttagtatctccctagaaatagaaaaagagaaaataagagaatattaatatgatacataccaatacaattttatattacgaatcaggtgaatgtggtcctagttttacacttcacttacctgtgattttaagagacaggatcagtattcctgactcttccttttgcctcatgagcctctgacaggactgaatccagcattgttatgatcctgtctttattttaaaaactggtatttcgttcactgtggcttttcaaaaactaattgtgatcactgaaatattacattattgaggcaagagaatagagtctgaagacaaggaacctaaggccatttcatactgacttccgagaactaaattgaaaggaaaaccctaactttccatcatgcctaagtaacaaaagaaccaggcgctactccctttgcaaacccccacattttctgcatggcaaatgggaaattgaaagtacctctaatttgttgctttttgcaaccaatcacacgcttgcatagaagtggaactttgtaacttcactttagtctctggttgctgtccataaccaatcagatatttgcacaagagtgtaacctttgtaacttcacttcagcctccgtttggttgctttccccaaccaatcagactgattgcgggccaccacatcatttacatgaggtaagcaccaagtggccaatggaaaacctctaatgggtgttcggacccaagaatattctgtatctggggcccttgtggccattctcacactgtggagtgtactttcagtttcaataaatctcttctgttgtggcattctttccttgctttgctgtgtgttttatcagattctttgttcaaaactccaagaacctggacaacttgcagtcaagaccctctactgttaacattatgattactgaggtttttgaggcttaaattctgcaccagagaggtatgcctcagcttacactcagcttagtccctccctgcagtacatcttggaaaaaaaaaaaaaaaaaggcagcctgcctttaaatacctctaagtctgtcaaaatgaacccatcactctttgcacaaggaagtgtttttcttagagacaatattcaatttcctagagactattaatattagagggaaaagtattatcataaaagggtgttagagggaatgagtgttttcttctgatgaagataaaaggtatggaaaactaactacagtgaactctacagtaatggagttaatgaggcgatgagtggctcagatgataaaaaaccaaggatgatttaaaaaccacttatggattgatggtgcaggctttcccccagcagctttaccctgttaaatttgcattcggtccaagagttccatctcttaacaatcacaaactcatatcaactgacaggtgatccagcaggaaatatttaatttatttactagccgacctttctagctgagttatttgggagcctcattaactatggtcaattaaataaattccagctgctacacaccctggagttgcctatgtgaggaatgggtggattgaaatgtaacacctgcgactggaagcgtgccatgtgaatttcaatttagggctaatacgtgaaactgctttctcctttcactgcctcttactatggatggtgagtcacaggagcctggcgtatctgtttcagctattttggaggatgacaacctctttccttaagaaagaggttcgcaaacttaagtgtgcatcaagggtctgtaaaacagactgcagggacctagccagagtttctgattcagtaggtctgaaagagagcctgaaattcgtagctctagcaagttttcaggtgatgctgatgctgctgatccccaggaccacactttgggggagactgctttaaaactgatcccaaagggaaatctgcaaacgccactattataagtcttacggcagttcatcctaatcttacctccaaacaggctgaaaaatctatccagtgttgagtcatgtgtaataaaaaaatgatcggaaacacagttatacagaaggagcggcttggcttgcatcatgtgcctacccatcagctaaaaaggagtagaacactttcaattagttaacatcagacaggacaaatctctattcgttcttctttttttcttcagaattttcaaagctatcttgaatgtttattctttcagatgaactttggaataaaagttcagttaaacataatttatacaatatttgtgtatgtagacaggtagagatatagtaaccttgcctaggattatattaaatgctttaaacttggagatatttcacatctttattgcagtcaatttttccaatcctgatcacaatatgtttctccatttattcacattttctttcctatctcttagaaaggttaaatcctgcatgtttccttttaagcttattgtttaagaggattattaattcaggaacaacattagcttttgtatattatccaatatgttaaatcttgaaggatgagaagaaattatctgtaggaagaaatgagaaaggaagtttcaggacaaagccaataccacatgtacaagcacacaggaatgagaaagaacagtgcattttaaaaattagtagtctgatgtggatcatggcagaagattaccaagtataatatgataaggtttttgaattttaacttctaagtgatgagaagccattaaaaaactttagggggagagagccccaatcagatttaaagacatgtactgaggatttttggcaagatggcccaataggaacagctccggtctgcagctcccagcaagatcaacgcagaaggtgggtgatttctgcatttccaamtgagggacccggttcatctcattgggactggttggacagtgggtgcagcccacagagggcgagctgaagcagggtggggcatcgcctcatcagggaagtgcaaggggttggggaattttctcccctacccaagggaagccatgagggactgagcctaaggaaccatgcactccagcccagataccacgctttccccatggtctatgcaacctgcaggccaggagattcccttcggtgcctaccccaccagggccctgggtttcaagcacaaaattgggtggctctttaggcagacaccgaactagctgcaggagttttcttttccataccccagtggcgcctgaagcaccagcgagacagaacagttcactcccctggaaaggggtgctgaagccaggaagccaagtggtcttgctcagcaggtcccacccccatggagcccagcaaactaagatccactggcttgaaattctcactgccagcacagcagcagtctcagatcaacctgggatgctggagcttggtggagggaggggcgtccgccattactgaggcttgagtaggtggttttaccctcacagtgtaaacaaagccatcaggaagtttgaactgggcggagcccactgcagctcaccaaggctgctgtggccagactgtcagatttttcctctctgggcagggcatctctgaaaaaaaggcagcagcttcagtaagggacttatagataaaaccccctctccctgggacagagcacctggggaaaggggcggctgtgggcacagcttcagccgacttaaacgtccctgyctgatggctctgaagagagcagcggacctcccagcacagtgtctgagctctgctaagggtcagactgcctcctcaagtgggtatctgaccgctgtgtatcctgactgggacacacctcccagtaggggctgacagacacctcatacaggagagctctggctgacatctggcaagtgcccctctgggacaaaacaggacagaacaygcaacaatctttgctgttctgcagcctccgctggtgatacccaggcaaacaaggtctggagtggacctccagcaaactccagcagacctgcagcagaggggcccaactgttagaaggaaaactaacaaacagaaaggaatagcacatccactcaaagaccccaccagccaaaggtcaccaacatcaaagaccaaaggggatatatccacaaagatggggagaaaccagtgcaaaaaggctgaaaattccaaaaaccagaatgcctcttctcctccaaaggatcacaactcctcgccggcaagggaacaaaactggatggagaatgagtttgacaaactgacagaagtaggcttcagaaggtgggttataacaaactcttccaagctaaaggagcatattctaacccaatgcaaggaagctaagaaccttgaaaaaagtttagacaaattgctaactagaataaccagtttagagaagaacataaatgacctgatggagctgaaaaacacagcacgagaacttcgtgaagcatacacaagtatcaatagctgaatcgatcaagcagaagaaaagatatgagagactgaagatcaatttaatgaaataaagtgagaagacaagtttagagaaaaaagagtaaaaaggaatgaacgaagcctccaagaaatatgggactatgtgaaaagaccaaatctacatttgattggtgtacctgaaagtgacagggagaatgaaacaagttggaaaacagtcttcaagctatcatccaggagaacttccccaacctagcaaggcaggccaaaattcaaattgaggaaatacagagaccaccacaaagatactcctcgagaagagcaaacccaaggcacataattgtcagattacccaaggttgaaatgaaggaaaaaatgttaagggcagccagagagaaaggttgggtcacccacaaagggaagcgcatcagactatcagtggatctctcggcagaaattgtacaagccagaagagagtgggggccaatattcaacattcttaaagaaaagaattctcaacccagagcttcatatccagccaaagtaagcttcataagcgaaggagaaataaaatcctttacaggcaagtaaatgctgagagattttgttaccaccaggcctgccttacaagagctcctgaaggaagcactaaacatggagaggaacaaccagtaccagccactgcaaaaacataccaaattgtaaagaccatcgacactatgaagaaactgcatcaactaacggacaaaataaacagctagcatcatagtgacaggatcaaattcacacataacgatattacctttaaacaggctaaatgcaccaattaaaagacacagactggcaaattggataaagagtcaagacccagcagtgtgctgtattcaggagacccatctcgcatgcagagacacacataggttcaaaataaagggatggaggaatatttgccaagcaaatggaaagcaaaaataagcaggagttccaatcctaatctctgataaaacagactttaaaccaacaaagatcaaaatagacaagggcactacataatggtaaagggatcaatgcaacaagaagagctaactatcctaaatatatatgcacccaacacaggagcatccagattcatgaagcaagttcttagagacctacaaagagacttagactcccacacaataatagtgggagactttaacaccccgctgtcaatattagacagatcaatgagacagaaaattaacaaggatattcaggacttgaactcagctctggaccaagcagacctaatagacatctacagaactctccacccaaaatcaacagaatatacattattctcagcatctcatcacacttattctaaaactgaccacataattggaagtaaactcctcagcaaatgtaaaagaatggaaatcataacaaacagtctctcagaacacagtgaaatcaaattagaactcaggattaagaaactcactcaaaaccgcacaactacacagaaactgaacaacctgctcctgaatgactactgggtaaataatgaaatgcaggcagaaataaagatgttctttgaaaccaatgagaacaaagacacaacataccagaatctctgggacccatttaaagcagtgtgtaaagggagatttacagcactaaatgctcacaagagaaagcaggaaagatctaaaattgacaacctaacatcaaaattaaaagaactagagaagcaacagcaaacaaattcaaaagctagcagaagacaagaaataactaagatcagagcagaactgaaggtgatagagacatgaaaatcccttcaaaaaaatcaatgaatccaggagctggttttttgaaaagatcaacaaaatagatagactgctagccagactaataaagaagaaaagagagaagaatcaaatagacgcaataaaaaataatataggggatatcaccagtgatcccacagaaatacaaactaccatcagagaatactataaacacctctatgcaaatgaaatagaaaatctagaagaaatgaataaattcctggacacatacaacctcccaagtctaaaccaggaagaagtcgaatccctgaatagaccaataacaagttctgaaattgaggcagtaattaatagcctaccaaccaaaaaaagtccaggaccagatgaattcacagccgaattctaccaaacgtacaaagaggagctagtgccattccttctgaaactattccaaacaatagaaaaagagggaatcctccctaactcattttatgaggccagcataatcttgacacaaaaacctggcagagacacaacaaaaaaaattaaatttcaggccaatatccctgatgaacatcaatgcaaaaatcctcaaaaaaatactggcaaaccaaatccagtagcacatcaataagcttatccaccacgatgtcaacttcatacctgggatgcaagactggttcaacatatgcaaatcaatccggcctgcagcctccctgcccctcctgcaacacccgactccagtattcccctggctcgcctggcctccatgactgacaaggaagcagcctttgatgacgcagtggaagaatgagtgatccataaggagtacaaaatatggaaaaagaacaccccttttctttatgatttggtgatgacgcaggctctggagtggcccagcctaactgcccagtggcttccaggtgtaaccagaccagaagggaaagatttcagcattcatcgacttgtcctgggtacacacacacattggatgaacaaaaacatcttgttatagccagtgtgcaactccctaatgatgatgctcattttgatgcatcacactacgacagtgagaaaggagaatttggaggttttggttcagttagtggaaaaattgaaatagaaatcaagatcaaccatgaaggagaagtaaacagggcccgttatatgccccagaatccttgtattatcacaacaaagactccttccagtgatgttcttatcttggactatacaaaacatcctaaaccagatctttctggagactgcaactcagacttgcgtctccatggacatcagaaaaaaggctatgggctttcttggccaaatctcagtgggcacttacttagtgcttcagatgatcacaccatctacccgtgggacatcagtgctgttccaaaggagggaaatgtggtggatgcaaagaccatctttacagggcatacagtagtagtagaagatgtttcctggcatctgttccataagtctctgtttgggtcagttgctgatcatcagaaacttatgatttgggatacttgttcaaacaatacttccaaaccaagccactcagttgacgctcacactgctgaagtgaactgcctttcaatccttatagtgagttcattcttgccacaggatcagctgacaagactgttgccttgtgggatctgagaaatctgaaacttatgttgcattcctctgagtcacatggatgaaatattccaggttcagtagtcacctcacagtgagactattttggcttccagtggtactgatcgcagactgaatgtctaggatttaagtaaaattggagaggaacaatccccagaagatgcagaagacgggtcaccagagttgttgtttattcatggtggtcacactgccaagatatctgatttctcctggaatcccaatgaaccttgggtgatttgttctgtatcagaagacaatatcatgcaagtgtggcaaatggcagagaacatttataatgatgaagaccctgaaggaatatggatccagaaggacaagggtcctagatacgtctttacttcttgtgattttagactcccctttttttcttctcaaccctgagagtgatttaacactggttatgagacagactttgttcaggtatccctctatataataggtaccaccaataatgctattagcccaaacagtgggtgttttctaaatattattgggggggggggcttgattcagcaaagccacagacttacgttgaaattttcttcaggaattttctagtaacaaaccctggtctaaagtagctacagaaatgaaaatatcatgtgtgattatttttcttcttatgctatatcgccaagtttttcagactcatttaagtaaaggctagagtgagtaaggaatagagccaaatgaggtaggtgtctgagccatgaagtataaatacagaaagatgtcacttttattcaggaaatagggaagattcaagtcatatagattcctacctgaaaatcctgacacctgactttccaggatgcacatttacataagtagaccagtttcttcttggtttgttcagttaagtcaaaactacatgttcctctttccccatatatttttgctcattagtgtatttcttgagctgttttcatgttgtttctttcctgtctgtgaaatggtgtggcttttttttgtttgtttgtttgtttgcttttaacttgagaccaccaagttgtaaagatgtatgtttttacctgacagttataccacaggtagactgtcaaattgagaagactgaatcaataacttgtatttgttttaaaaattaaattaatccttgaaaaaaaataaaagtaatccatcacataaacagacccaatgacaaaaaccacatgattatctcaatagatgcagaaaagaccttgacaaatttcaacacccctttatgctaaaaactctcaataaactaggtatcgatggatcatatctcaaaataataagagctatttatgacaaactcacagccaatagcatactgaatgggcaaaaactggaagcattccttctgaaaaccagcacaagacaagaatgccctctctcactactcctattcaacacagtattggaatttctagccagggcaatcaggcacgagaaggaaataaagggtattcaaataggaagagaggaagtcaaattgtctctgtttgcagatgacatgattgtatatttagaaagccccatcgtctcagcccaaaatctccttaagctaataagcaacttcagcaaaatctcaaggaacaaaatcaatgtgcaaaaatcacaagcattcctatataccaataacagacaaacagacagccaaatcatgagtgaactcccatccacaattgctactaagagaataaaatacctgggaatacaacttacaagggatgtgaaggacctcttcaaggagaactacaaaccactgctcgaggaaataagagaggacacaaacaaatggaaaatacttccatgctcatggataagaagaatcaatacagtgaaaatggccatactgcccagagtaacttatagattcaatgctatccccatccagctaccattgactttcttcacagaattggaaaaacaaaatactttaaacttcatatggaatcaaaaaagaacccacatagccaagacaatcctaaggaaaaagaacaaagctggaggcatcatgctacctgacttcaaactatactacaaggctacagtaaccaaaacggcatggaactggtaccaaaacagatatatacaaccaatggaacagaacagagccctcagaaataataccacacatctacaactatctgatctttggcaaacctgacaaaaacaagaaatggggaaaggattccctatttaataaatggtgctgggaaaactggctagccatatgcagaaaactgaaactggaccccttccttacaccttatatgaaaattagctgaagatggattaaagacttaaacataagacctaaaaccataaaaatcctagaagaaaacctaggcaataccattcaggacataggcatgggcaaagacttcatgtctaaaacaccaaaagcaacggcagcaaaagccaaaattgacaaatgggatctaattaaacgaaagagcttctgcacagtaaaagaaactaccatcagagtgaacaggcaacctacagaatgggagaaaatttttgcaatctatccaactgacaaagggctaatatccagaatctacaaagaatttaaacaaatttacgagaaaaaaacaacctcatcaaaaagtgagcaaaggatatgaacagacacttctcaaaagaagacatttatgcagccaacaaacatatgaaaaaatgctcatcatcactggtcattagagaaatacaaatcaaaaccacaatgaaataccatctcacaccagttagaatcatgatcattaaaaagtcaggaaacaacagatgctggagaggatgtggagaaacaggaacacttttacactgttggtgggagtgtaaattagttcaaccattgtggaagacagtgtggcgattggtcaaggatctagaactagaaataccatttgacccagcaatcccattactgggtatatacccaaaggattataaatccttctactataaggacacatgcacacatatgtttattgcagcactattcacaagagcaaagacttgttacaaacccaaatgtccatcaatgatagactggataaagaaaatgtgtcacatataccccatgaaatactatgcagccatataaaaggatgagttcacgtccttcgcggggacatggatgaagctggaaaccatcattctcagcaaactatcacagaacagaaaattaaacactgcatgttctcactcatcagtgggaggtgaacaatgagaacacatggacacagggaggggaacatcacacatcagggcctgtcgggtggtgaggggctgggggacagatagcattaggagaaatacctaatgtaggtgatgggttgatgggtgcagcaaaccaccatggcatgggtatacctatgtaagaaaactgcacattctgcacatgtacctcagaacttaaagtataataataaaaaaaaaagagaagaacttattgcagactgaggcagaactcttcagaaattactctatctcattctttagtgactagacaaaataaggcctaaatagaacaaacgaaatttttgatctttcatgatctacacccaaccctactgaactatacagatttcttctaacaagtttctttaaaatttactgatctccacatgcccggcccccaacctccctgaataacctttcctctctcacctatctgttctcaacttagggagttttatctctccaacgaagtctttccacttaccacccggttcacatcctccaccatactctgatatcattattaataaatgttactgactggatgtgtacaatgttcattttgcatgtttatatcatagaaccatcacaacaaccttgagagaggcagctcttactcctattttagaggttaactgaggcttttagagattttggcaacttacctgaggtcacattgctagtacgcagaagtatctgattcaaaatcagactgactttaaagtctaacagaagtgattcccaacgtgtgagaccctggtactacagcacagagctacaaaagggggcaagaaagagaattttaccccaaccctcacttagtgcaagtggccatgacctccctgaaaccctcttctgtctaacaatgaaatcagcttgccacatcctgcctatagaagcagctgcaacagaccaactcttgaagggactgctaaggctgctcaggctggtgcttcctagccctgagaaagcaaagctgtgtattaatatgattcttacagttccccttgcacacacctgccactgacctccattctcctccccacaacacacacacatacaacccctcctgtgcctgcactgggtgggttgctaacctggggctggagggaaagtggcttccgaatccaaagcttttatggatgggcaagtagcttagcaggcagtagagggaatgtatgttagatgactctagaaaacagcggccaggtgccacactccaggccttttcccaagattcacagttagtctgaagcggctccatttactggtcttccaggtgagaagaagtgcaagtacctcagtagccagcagaactggagacatacaaggtcagtgacctgcaaatttgctagtgcaccactgatatcattttgaaaaaaaacacattttaagttgacattaaaatctcaccatatgtttaaaggatgcaatttccagcatactgtaaaaattgacattttaaaatacaaattatactgcctttagtatgtgcccagtggaaactaaatatcataatgattttgatacccatcatcatccatttaaaaattcatagactgactcatctttaacaggtggaaattttatgctgctcgttttcctcttttatttacattctacttcatataacttcatcttaatatattttcatgcttgaaatctttttatcaccctatcatgcttctctagcccccacatatacacatgtgtnnnnnnnnnnnnnnnnnnnnaaaacaacttataaaagtaaaaattggtaagaaatggatacttaatgaaatgagcttttgtttccatatatccataaatgaatattacttcttactataataaaatcagtcaggattcaacatcatttttatgcctattttgtgttttttataaaagctgagaaaaaccttcagttaaataagtggatgagaattaaatatattttgttatagcaatgtttcttactttgaattcttttggagttatatccccaaatcacttagcaacctatcatcaaaaatgtcttaaatgaattgatagctgacatctcaatcaaggctcctttacttttgttgaaagcaaaacttggaaaccacctgacttgtcagagaatctgttagtcatttgctttctcacactgacactccaatagtttctggcatatggaggttttgaatacctggaggaacatagcatagaagccagaatggtgcaagtgtgcctttctttttgtgaaaagggtgaagggaaattggagaaaggcaggttgggaaaggagaatatgtgcccccttatgtacagaggggcagagtaattttctgaaagagaatacatgaaagttgaggatgtgaaaactgactgcggtcacttgcctgagcctacatacccccttgaaaagtctttctatttctcactcattgttgctcctccctccaacatgctaagtctgttttgtcttcttttttttagagacaaggtctcactctgtcacccaggctggcgtacagctgtgcgatcatggctcagtgaagcctcgacctcctggactcaagcgatcctcctacctcagtctcccaagtagttgcgcctacaggcacgcaccaccacacccagctaattgcttattttttctagagatgaggtcttgctatattgcccatgctggtcttgaactcttgtcctcaagcaatcttcccrccctcaagcaaatctcctgccttggcctcccaaagtgctggaattacaggtgtgagccatcgtatattatcttcttgtcaacattcattcattctctaaaaatacaccgtctgtcaactataggctaggcacatctatttactgataatgatataaaataagcttaaattcctaagaaacaaaagaaaaataaattcctaagaaacaaaagaaaaattcctaagaaacaaaagaaaaatattaaaactgaccaaaaaaaaattaagtaaaactagacagatggtacacaagaataactgaattttgagaaacagttaatgaagctaaactaatatatcacactgtgtgtcaccctgcctgcttacccatttccctaactcatttatatgggagccttgacttatttttctccttggctaagtgcctggggcctaaatcctggagtaaatgaataaaattggagttctgattcaaggctctctgaactacttactattttaacaaaattaaagcattaaaaaattaaaagctagttaagttaaaattttgcaaaactgtataatgtatcatttggataatgtttattatttgatagtataattttcattcaacttttctgtgactttattcttttttcctactactctactctccaccctaccttccgtcctagtgacgaagatgaaaaatatcatttaatctagaaattgttaaacacaattaatataaccctgtagattacagaacctatttaaatttccatagctaaaaaagagaaattccttgatttagtgctattattatccactagagggtgctcattcaactcttttaaaagttagaaatgaaaaacaaatcaatttatggaaatgcaccaaagtatgtttttgagtcattttatttttactcctcagagatgctaacgaagagctgatggcttcctattctattttggcaatggatcttccttgtatctcacagaagggcaatttatgtccagatttgttattcactgtacctcagataggaaatcctttgcgtttctggtggaacatcaaaaggctaaaaatcctgaacataagagtccttcatactacgggatctgagcatacatttggaaggatgcaactctggacccttcacagcagcacagatggtataggaaaaggcgtggacttttaagtcacaggactgaatttgccacaactacaagatacctatcaattgttctaacctctgactttaaagtgtctaaaagttacttcttcacagagatttgcacagattaaggctgaaaatgtgtgtaaagccaacatataggacaatatagaaatctagatactggttcatttctctctttcttaaccacctcagtctacatccttcacagattatggtaatattatcaggttgtgtgtgtgtakgtgtgtgtgtgtgtgtgtgtatttttttttcctctctgtatgtgaactctcggtcagtgaggagagtgtccaaaaaaaaaaagatgttgcagacagttcagacttatatggtctgtttgttttgctttctataaagtacatgtaaaatttccacagttaataaatatttctaattaatgcttatattaatcatacatttattaagtatccattaattatccaattaatcatacatgtatttgagggcaggatatatacagtccatttttgtattctcagtgcttagcacaatgcctagtacacaaacactgacaaaactgggaataagcagaagacttgcccaagtctcaaggtattggttcttcaaaaccctcccttgtcaggaaaaagataagcaagttagtaaattatgacgataaaaccttgaaagaatcacaatagctctatcaacaaaatgcaatggatacacgaagggcaaaactaattttgccaagggacatacagaaggcttgatgaagtggttaatcatagtaacaaaaataatgctaatgcatatgaagtccttactatacgtcaaacaacattccattcacattgtatatacacaaattcattttatcttcccaaatgattatatgaaatagatactattttttccccattttacagacgaggacaatggagcacagagatattaactcacctaggtcatatgctacaagatgcagaggtgggatttgaacccacactactgcacagagggagaagggaaaaaggcattcctagcagaagaacagcatagccagtcccaaaggcatgaaggagcctgcccagaaagataagatttttagtccaaacataatactgcagacttctggggagcaaaggtttgtactcaaggtgtgacacaatggaatttggtagcaccgagaaacagcatgacagagtgggtacaacaaactctcaaggctcttcaaagtgttagatgtgtatacttgggcaagttaaagtgtgagatgtgtatacttgggcaagttacttaacctctgtgtgcctcagctttcctatatataaatggaaataactatttcagagggttgtacataggattgttattattcataaagtgattacaacattgactggtacatagtgccataaaagtggttgctaaaataagcaaacaggtaagtactaaacatggctgttgcaatatgccagataagagattgggaaggtctaagtgaatggcagcagtagagaatttttttaaaaagatccaaattaaaagggggcagggtagttgagtctcaaagacaactctcacttctgacaccaattacaagttcagggattccaaggatgactctcaggtttgattattcactgggacacaaccraactcactgaaagctgttataatcacagttatagtcacagtttattataatgaaagcatacagattaaaaacaatcacaggaagagactcatagtgcagaattcacaacaattcaaagcatgaagcttccagctgtcctctccaacggaatcatcaacgaggtcaacttttgctggcagtaatgtatgacagtatgcacaagagtattgccaaccagggacactcaccaaagccttggtatccactttttattggggcttggtcacgtatatatgattgactgtccatacagcttttagtcacaagcccttctggatgttgagttgacacctgtggtccccaggcctcaacataaatcacatcgttagattatcaggtgtgacctcaacacccaggtaaacaaagacacacttatcaggaagcacattccaagggcttagagatcgcctcccaggagctgagggcagttgccagacctatttttatataaggttcattttttactacaaaggtagtgaaggtatagagaagaaaggaggaaaccagactgatggtgatacacttaattgagataaaatatgcaggtagcaaaggcaacataagtttgaaagggaaaaataataatacacttttgagtttgccaagtaactgaagttgctaaaaaacagaagtatgggactaaatcttaggaagaacctcacagcttgagatgacagcatactgataaaagtcatgccatgaatgggcttacctgaggagaacatggaggcaacaaatagagcaagaattgaaccagggtaaactccaattttaaagggctgctcagaggatgactagacaagaaaggttactaaaaaagagcaaaactaaatactaaatcttcctcactactacaggaaactaaaaatattgaataaattactttctaaataggccaaaaaaagagcacttgactttccctggaagtagactctacaagtacattatgtcttgcaaacaagcagttaaaacacaaaatatttcattctgttcttatttccccataccatcttccatgctcagactacttcctaagctgagaaacctttattttgcctatggcaaatttagtgtgtgtttatgcaaaacttaaatyaccacaaaaaccccacaatagggtaaatgaagcagaaggcacagctaattaaatggatttgaggttcattgctcattttgctcagggtcaaataatagtatatgactttctgagtacactaagtagaaaaataagtcattataggatatgagtagccagactgctacaaagtctacagaaaaaaaaaaagcctcttgaaatcttttttttttttaaatcacatcccagatatgagacagtacagaacaaggatgagctgtgggagttattgagtcagacaacccaggcacaagcctcagctctgccacttattagctgagtgaacttgggcaaattacttaaactcttaacgggtttgttctgaggatcatgtaagtcagtattgtctggcatatagtaaacatgcaataagtgtttggttatttggatactctatttgagtacctttgtatactgaaaacctcataaatttattacatactttattattcagttcttcatctctgtgacagaaaatacccatttgaaaatctacttttgaaataaaacccacgaatataaacggtttgcatattacagcatttaccaatttctataacagcttaattgtcctaaaattatctcagaatcacctcagactttgtgatctttattagccaaaacttaatttgttttagaaaatgctcagaactgccctttgtaaaggagaaatgcttaagagttgatccaagaaaaaaatggacaagccaaccatctgaaaaattagtctggaccaagttccagataatatctgtagccatgcaactttttttcctcatgcaacatgtagtgggcttttgccctaacttcatgaacagtgcaccttcttccctcaacctaggaggcctagttctttttgtcaaagtaactcctctaagtcaccaagacccagcttcccttcaggcctttgctggcaccctcaggctttgttagatacttggatcacagtatttacaaattagtttatatagttgtaacmacacccatctcctcacttctcccattaacactaactagacggcatgtaaactggacatgcagactgtcttgctctgtattccagagagggttatatagtgtatcaggcactcaatgtcaagaacccatacagtaatccatacattaacatcatcttaccaaacagacaaatcacatttctcccacttccatgcattaaacattccttatttttatatttaaataattttgtgtgtatatgcacgtgttcaaaatatacccagccatcgacataggaaagaaatatgattaccaaataaagtgtacctttggctgagataaagcagtgctggctttaaagatttgttgtattatcttctaaatttcagaaatcagtcaaatattccaaattttatgtttttttcttttacagtataattaattttgtcaaactagtgggcattcctatttcaaggatcaaagtaattgctcaaagcaaaggcgtaacaatttgtgcttaccatcccgacaaagttttatttcccctttccaacatgctatgattcattctatttcttcttagttgttcctttctatagcttcagtaggaaaaggcaaccagatttagattcctttgccttttaacctcacagcatccctcccacaaaaaggaggactacatattgtactttgttccatcataaagcatcgagatgaattatactaaccttactgtattccaggcatctccgagttctttggaatactgtttttcaaaatgatccaacacaactttgcaaatctgttttgcaagcttcccctctgattttgctttcagctatgacgataagaaaaagttgctgacacacagtgatattacaaatttactgaacgtcaacattagcaaggtctttttttaagacaagaacactttttttggataattactagttcttgaaatggaagcaataccttacatgtaccaaaactgtacattatctaattatgaaaaagcaaggtttttccaaataattattttccaaatgtgaagcaaaggttaaaacagaatctactggggctgaagaaactgtcaaaaggaacaaaattaattttaaaaagtcactgtaggggctaggcaggtggctcacacctgtaatcccagcactgtgggaggcagaggcgggaggatcacatgaggtctggagttcaagaccaggttggccaacacgggaaacccgtctctactaaaaatacaaaaattagccgagagtagtggtgggcgcctgtaaccccacctactcagggggctgaggtgggagaatcgcttgaactcaggaggtggaggttgcagtgagccgagatcgcgccactgtactccagctggctcatgctttgcagggacgaggcgagaggatcatttcccagttcaagaccagactggaaaacatatcaaggacgtgtctctacaaaaagtaaaaaaaaaaaaaaaattagccaggcgtagtggcctgctcctgtagtcctagctactagggaggctgaggctggaggatcgcttgaacccaggagttcaaggttacagtgagctatgatggagcagctgcattccagattgggtgacagagcaagaacttgtatctaaacaaaactaaaaagtcaccggggatgctgacatcaagaaaaattggtgaaaggtatttgagaactctgtactatctttgcaacgttattttaaagtgaaaagttaatttagggagaaaagtcactccaatttcatcgtgaacttccttgcaattgtttcatttattcatccaagaaacgtgtattcaatgcctactatgtaacagacactgttctaagctcccgggataccgctgtgacacagaaaacaaatctcagccctccaagagctggagggagtgggtactagaagtctgcgagctggacggaagggactcagcattacagcactcagcattatttcagggcttgacagtaaagccaaagaaacgctgatctcgcgaggggacgaacaaaggtgatgttcccccatcccagcaccctccctcgccacctcggccgcgtccagaagcgtctcattcagatagaggtacccagccgggccccaggtctcacctgggtcagcattgtcccgctgagagctttcaaacaacaggtgtacgcgaatcagtatcaaaaagcctccagggaactgaaaaaaacagtctgacttccgggattcgcgggcatccactttcattctcacgtttcctcttcartttctcgcgagatactgatttgctcgcgctatagaattcttgtcgaagaggcttagctcccgcgggagatttcgtgcgcagttacttccggtagctggtaaaggctgatacttcccaggacgcggaggtaacgggccagggccaaagcgactttcgctacttggattggtcggcgtagctttgggcggccggaccttagaaagtcacacatctgcgcgcctgtgcggcccctgcttctgcggatgctgaggtgggaggatcgcttgggcagaagtttgaggttgcagtgacccgtgatcgcgccactgcactgcagcgtgggcgacagagcgaggctttgtctcaaaaataaataaaaagtcgcatattgtgctgaacagtgtgtatatgcatggggctcaataaaggaatgagttttggggttatgttgtatgatgactgatttaaaatattctcaaagcgaagctagttactgacttaatctaccaaatctagtgacccctgttaacctagacattcagtacccaaggataaaagggtggaatataatgaaaaagaaattaagtcatgcttttccccagacctggcccatggggataatctctccttttaatggagagtgttaaactgaagtaggcatgtaaagcggttacaacagtgattaggaaacagtaaatgcccaaatgttagctgctattattttcactattgtgatcattgtgatttttgtcgcgttgataccaaatgcgtgaagaccaaaaggaccctccactctagcctccccaattcacctttacaagggagcaatgtttaatggttctccaaggaagatgtttattacacctattttgacacgaatagaagtttatttgctcttttggtgtcatgcttcagtaactatcatttgtagcagcaatcagcaattagaaaaaaccggtttgatatggtccctgatagttaataatcatcattttgagttgttccttgatgctcatatcaatatacgtacatgctataggtacaagtcttatattcatgtaaaaacatgtctttccttctaatctgatttgaagcttaatatatttatttatttaaacaagtttccaagtcacctaaaaaatgcatcttattagaatttagatttggtacaaaagactatgataatcaggaatgaaatgatgccatctcttggatgccgtctgtttaatgtttgtggaaaagtcggtctaacctttcagcctctgtattttttataattttataaatttatattttataaatattttataaatttatactttataaatatattttatataatttatttttctatgttcattccagaatgttgcaattaattaatacagtggtattgtatttgcaatgtaggcacgtaaaaaaatttgaagaagggaatttcgcggcattcttggcctggcttcctggcgtagccagcaagttcggaggtgttaaccgctgctgtcatgtttcttttgctaaactgcatcgtcgctgtgtcccaaaacatgggcatcggcaagaacggggacctgcccaggccgccgctcaggaatgaattcaggtatttccagagaatgaccacaacttcttcagtagagggtaaacagaatctggtgattatgggtaggaagacctggttctccattcctgagaagaatcgacctttaaaggatagaattaatttagttctcagcagagaactcaaggaacctccacaaggagctcattttcttgccagaagtttggatgatgccttaaaacttactgaacgaccagaattagcaaataaagtagacatgatttggatagttggtggcagttctgtttataaggaagccatgaatcacctaggccatcttaaactatttgtgacaaggatcatgcaggactttgaaagtgacacgtttttttcagaaattgacttggagaaatataaacttctgcctgaatacccaggtgttctctctgatgtccaggaggggaaacacatcaagtacaaatttgaagtatgtgagaaggatgattaatatgaaggtgttttctggtttaagttgttccccctccctctgagaaaagtatgcatttttacattagaaaagggacttttgttgacttcagatctatggataattatttctaagcaacgtgtttttattcctcactaatcttggctatatcagataccatttatgaaacattcttgctataactgtctctccaagaccccgactgagtccccagcacctgctacagtgagctgccattccacacccatcacatgtggcactcttgccactccttgacattgtcaggcttttctaatgttggtagtatttattaaagatgaagatgcacatacccttcagctgagcagtttcactagtaggaaataccaaaagcttcgtacatgtatatccagaggtttgtagacaaatgttgcagccttttttgtaacagtgaaaaactgaaaacaacctggaagtccagtgatgggaaaatgaatatatttctgtcttagattggggaacccaaagcagattccaagactgaaatttaagtgaaagcagtttatttgctaggtcataccagaagtcatcaatcgaagtatggagaaatggaactgagaaggtaaaaaccagttcaaaatcagtgaggaggttctcaatggtaacgagctccatactgctgagatacagggaaacggaggggagaaagctagagtatttaacccccactccttggttgtcagctccctgtcctgtgtgtgggcagaacgtactccacctactcaatagcaagttccaggtgtttgctgaaagaagctgctgtaatgtacgggaacggtgaatgccaaacacttaaagcaattccatgtttaagtatgtaaactcttcatacttttttttttttttctttttaagacagaatttcactcttgttgcccaggcggagtgcaatggaacaaccttggctcacggcaacttcagccttcccaggttcaagcaattctcctgcctcaggctcctgggtggctgggactacaggcgcgtgccaccacgccaggctaattttgtatttttggtggggacattccatgttggtcaggctagtctcgaactcctgacctcaggtgatcctcctgcctcggccttcaggggtgctgggattacaggcatcagccactgcacttggcagatcttcattcttttagtaaaaagtataaagccacacatggtttatttgaaatattttataatttaaaaaagtacagaagcaggaaaaccaattctaggttcaagtgagggatgatggtagtttgaaccaaaggattgcatgtggtaagaaattgtgatttaagatatattttaaagttggaagtagcaggatattctgatggagtttgactttggttttgggcccactgagtttgagatgcctttgagaaatgaaagaagtagagagagaattaaaaactggccaggagtggtggctcacgcctgtggtcccagcactttggggggctgaggtgggtggatcacctgagaccagcttgggcaacatggtggagccctgtctctacagaagatacaaaaattggctgggcattgtggcacacacctgtagtctcgtctactcacggggctgagatggaggattcaattgagcccatgagttcaaggctgcagtgagtcgtgattttgccactgcactcctgcctgggtgacagaagagaccctgtctcaaaaaagaatctgaaaacaacggaaccatgccttcagaattctataaagttattttcaactgataaatctatattcaggcaaagaatcaagggtgaaggtaaaataatacatttttagacaagcaaagactcaggggttacatgtaccctttcttgggaagctatcggagaaaatactccagcaaaatgaaggcgtacacaaaccagagaatgacgtggatccagcaaatagtatccaacacaggcaatattccagctatggagctagctttaaaaagaaacagtaaaaatactaatagattagctgggtgggatggcccatgcttgtagtcccagctactcaggaggctaagcaaaaggatggcttgagcccaagagttcagagcagcctggccaccatagtgagatcccttctcttaaaaataataggttattgccagatttggggcatttggaaagaagtgcattgaagataaagcaaaagtaaaaaaaaaaaaaaacaaaaaaaaacaagggggaagggttggttaggcaataattaattctagggcaggaagaagtacaggataggaagtaagagcatcatacgctgtttttctcaacaatgggcaatatgtacatagtcataatgatgtggtgactgactgcttagcccctaaatctggtaactactttgggacaatatggggggaaaagtgaagatagtgatggtgtaagagctaaatcctcatctgtcatatcaagaaatcactatataatgtataacataatcaagaaatgactaagtagttatgtgaagaaaagaatggaacattgctagaagagttagaagtcattgctccagagaattaggagggatggggcaggggactgttaggatgcattataaactgaagaggcttttaaagattacatgtattaatatatgtattcacttgaaaaactaaaaaaatagtaattttttaaaacccatggaggtaactaccagaaggaaaaactaagagaatgaaaagtgctttcctctggaaagaacaagtcgcaggactgttttcattgtaagacttttggagccatttgattttacttaaccattttcatatatttctttaataaaaataattctatcttaataaaaagttacactcattcattaaaaaaagaattttaagactgtaataagaatcatagtttatttctgttagagaaaggcaatgtgttatacttggaaagaggtcatattaattttatcacatttttgggactcagcatctttatattttctgattttaaataaacaactttgcttatgaattttgtctgaatctctaataatctccttacaatgcctagttaattatgcccttagtttgggtaggttttcaaatcttattagttatttcttttttagattaccgctcatgtccacttatctataggtgtcttagtatcattttatttatatttgagataaccatgtcagatgttaaaacactttctcaatttttcttataaccatttgactttaagtgtgaaggtattttaaaattttttttgtgcattgtaaattgagtttattgattccactgctttcaggcttatacattttttccccgagtgaagccacttctgtttctccccttaccttttcatagtttgatcttttatgtttaacctcttaatctatctagaatcaatatatgtgtatcatgagaatgttaatggattttactccccatccgcaccccaaatagctaccaaagaacaaacaattctacattgagttttaggaataaaaactgttagcagcaaacttgaattaaaccactgcagacataagacattgagctgacacaaataacataaatcacattagtttgttttttgtgctttttttaatgttagcgttaaagaaccaagcagcttaataaggacgtacctctaggcaggaaacaaatttttacatatctaagcaattttattataaggtcagttggtcttaagaagtatttcagagtaatttatggaataactcctaaactatgttttatgaattttcatatttatataaaatgtgtcaaaacccttcatgttcatatagaggtttatgttgtcaaaaaggtaaggagacgctttgtagtaaaacaatatgacatcaagagagccctgagctccttaaaatatatggcagaaaaacaacaggaaaacacaacaggaaacctgtgatcaatgctacagaacacagcatagttataggcaatcttaggcttaaacgtcaggtgagattctcattttactaaatttcagggctccaatgtggtctgtacaaact

SEQ ID NO: 96532 - DNA, 29283 bp, Homo sapiens
caagcgactgtcctgcctcagccccctaagtaactgggactacggcgtgcaccatcatgcccagctaatttttatattttcagtagagacagggtttcgccatgttggccaggctggtctcgaactcctgaccttaaatgatccatctgcctcggcctctgaaagtgctgggattacaggtgtgagccaccatgcctggccaggagcaggggttctgaagcctccggttttcttaccccaggcggaagtcacttttcaagaagatctccaagcagacctccgtgctgcacaccagccgcagcttctcctccggactccaccactcactgtcatccagtgagagcctccccggctcgcccacccacagcctctcccccagccccaccactccctgccgaagcccagcccctgatgtcccagcaggtgggtgcaccccgaccccccaccgccccggctaccctgggagcaagggctggtgggccccaggagggaggaaggagctcaggggatggaatgacacgatgtagggaaaaagatgaccgggatcctggtgtctagcagggaacctgggagtacttagagacgaatgcaggtgccagggaaggatgcacccagcagaggaaacatcatggacaaatggggctagacaggagggtgggaaaactgagaagaggccaggcgcggaggctcacgcctgtaatcccaacactttgggagcccgaggcaggaggatcactgagcccaggagtttgagaccagcctgggcaacacagggagaccccatctgtacaaaacataaaaaaattaggtgggtgtgaggccgggcatggaggctcacacctgtaatcccagcactttgggaggccgaggcaggtggatcacctgaggtcgggagttcaagaccagcctggccaacatggagaaaccccgtctgtactaaaaatacaaaatcagccaggtgtggtggcacatgcctgtagtcccagctactagggaggctgaggcaggagaatcgcttgaacccaggaggtggaggttgcggtgagccgagattgagccattgcactccagcctgggcaacaagagcaaaactccatctcaaaaaaaaaaattaggtggttgtggtggtgcacacatgtggtcccagctactctggaggctgagatgggaggctcacttgagcccaggaggtcaaggctgcagtgagccatgattgcaccactgcactccagcctaggcaacagagtgagaccccatctcaaaaaacaaaagggaaaaaaaaaaagaaaacagaagtgatacagagaaggctttctggaggagggggagtaggagctggggctttgatgggtgagtgggagttcaccagagctaggccaaggaaacaaccctgagcaggaggcagaaaagtctggcatgaaccaggcatgatggctcatgcctgtaatcccagcactttgggaggccaaagcaggcggatcacttgaggtcaggagtttgagaccagcctggccaacatggtgaaaccccaactctactaaaaatacaaaaattagccaggtgtggtggcacatgcctgtagtcccagttacttagggggccgaggcacgagaatcatttcaacctgggaggtgaaggttgcagtgagccaagatcatgccactgcactccagcctgggtgacagagcgagactctattgaaaaaaaaaaaaattagccagccatggtgacgtgcacctgttgtcccagctactcaggaggctgagttgtgaggatcacttcagcccaggaggttgaggctatgattgagccagtgcactacagtctgggcaacagagcaagaccctgtctcaaaaacaaaaacaaccaggcatgatgggtggccacatggaaggatgtgggctttagcagtttttgtcagtcccacagctccacttctgggctggggacattgaggccagcagccctgacctacgcttatcacccacagataccactgcatccccacccagcgcatccccgagctccagcagccccgcctccccagctgctgctggccacacccgccccagctccctgcacggcctggctgccaagcttgggccaccccgccccaagactggccgccgcaagtccaccagcagcatcccgccctccccgctggcctgcccgcccatctccgcgcccccaccccgctcgccctcgcccctgcccgggcacccgcccgcacctgcccgatccccgcggctgcgccggggccagtcagctgacaagctgggcacaggggagcggctggatggggaggcggggcggcgcactcgtgggccagaggccgagctcgtggtcatgcggcggctgcacctgtccgagcgccgagactccttcaagaagcaggaggccgtgcaggaggttagcttcgatgagccgcaggaggaggccactgggctgcccacctcagtgccacagatcgccgtggagggcgaggaagccgtgccagtagctctcgggcccaccggaagagactgatcccctgccaggtctctccctggcatcaaagttacgcgttttcttgtgcaatgttttttccgtaaagtcatgcctggatggggactgagccaccagcctgacacccagaaggcgagaagccatctcggtccttgctggaaggtggagacatcgcttgtgttctggtgtcaatcagggggctggatggggcaagaatgggggacaagggtggctttgtaaatagcagcaaatccctgcaactaatttattactttttcttttttttttttttttttgagacagagtctcactctgttgcccgggctggagtgcagcggcgtgatctcagctcactgcaacctccgcctcccaagttcaagcgattgtcctgcctcagcttcccaagtggctgggattacaggcgcccaccactatgcccagctaattttttgtatttttagtacagacggggtttcaccatgttggtcaggctggtctcgaactcctgacctcatgatttgcctgcctttgcctcccaaagtgctgggattacaggcgtgagccactgggcccagcctaatttattactttttataagcgatagccgtactgagccgccccctgaaggcggctgccaggtcttgccccaggcacctgggactctgtttgcaggccctgccctctgggctgagaaggatgcactttggacaagtcatctgtgtttgtgttttccagtttttctgtactttttaagtgttttgtgttacctggtctcattcccctccccacacctacccatttgaggggatggagttgaagtcacctggtcacctgtaccggcccagttcggctacaacctggagtgtccgtaaacaattcctctcacccacaaaacaatgtaatcccagcgatggactggattctgaaggccacttcccaccatcatagctgccatgcccaggcagtgcctgctctatatatagagtctgcctccaatcctgctggcttcagcctggagaagggatatgggagctggagctttgatggatgaataggtgttcaccggatctgggcagaggggtcatccgctccccaggtgggcactgataaaggaaggtacaggcctcacctggaactgccaaggcagcctccagaaatgctcggctgtctcggggcacgctccagtatgccagtcctgcgggattacgtccagctacttccagaaacactcagtgtcccctcccctcaggctctgccttggcctggccttgtccagtctaccctggacaagatgccgtgtgtttgaggcccagcagagtaagcccttggccgtgatgtgtctgaaacacctgttaggggttccctccatatgtcagagcctctctgggatgaagttcaagccagaaaacccagtcgaggctcaagtttgaatttcagcttcactgtgtggctctgggaaaatggctttcccactctgtgcctcagtttccttgtgtttacaagactaatcccattgactgtttattaagcacctactgtgtgccaagcgcttttacgtggcttctccctcagccagccttgagaaggctggaggtggtgtcatcacctccattttacagacaaagcagctgagaccccagcgaggggcggagacctgtcccacgatcacccagcaggagtcgtggcagaacggagcatcagccagaccctgttgtgggcgttgtcatcaagggagcttgaatggagggtctggtgtcagatacagccgactccagccccagctcatcccccatgatgctgtgtgacccactgggcactctggtgagggagctttccagacatcaacagcccactctgcttccctttctgagtcccctgtccagcactgcctagtgttggagggtagaccaaggctgtgcatgattcaccccctccttccatcctggagctggcagtgaataaaagcccgtatttacaaagatgagctccaacgtctggatttgtgaggggctgagaaaggaggaagggaagagtggggaggggagcggagtgaaatagacccatggctcaaagtcattgcaagtgggttttgaggactgcatagcagttcgctgttgagattcttcctgatgccatcgctggtaccagcctcctgctaccctctccctgcgagtactccatcatagccctgcctttaaaagcttcctccagacatctgggccctgagctatgttttttatttttatgtttttgagacaaggtctcgctctgtaacccaggttggagtacagtggcgcaatcacggcacattgcagcctcgacctcctgggcgccctgggctatgttaataaaataaataagcggcggggcgcggtggctcacgcctgtaatcccagcactttggaaggccaaggcgggcggatctcctgaggtcgggagttccaaaccaccctgaccaacatggagaaaccccgtctctactaaaaatacaaaattagccgggcgtggtggcgcatgcctgtaatcccagctgctcgggaggctgaggcaggagaatcgcttgaactcgggaggtggaggttgcggcgagccgagatagcgccattgcactccagcctgggcaacaagagcgaaactccgtctcaaaaaataataataaaataagcaatcgtcgcgtcctttctatcctggtcttagcttgcgctctgccataaaactccctctagccgaacccggcccagccctagagcaatccgttacttccggggcgctcagccggcatgcaaacactcttggctacagccccatctccgagtgcgttcggctatttccggaaaccgtcggcatctaggctcaagtccgctaaattctagtgcccgtaggggtcgagatcgttggctgtttccggacgctctgggttgccatggaaactccttcaaccctggctttctccgacttctgctttttgcggcaggccctttccccactctactgccccctgtttgctgagcttgagaacgcctcatttgtcccctggaaccatctatgcttcagtaattcccataagctggcggtcgcctctgggtctaaactcccaaggcctccattgggcactgagcacattcggttatttccagaaacgctccgcggtcttggggatcagcctcagttgtgccagtgcggcggtagagagtgttcggccatttccgaaagcgctcgggcgtctctaagcccagccgagcccagtctcggatccctcgccgacccgattgcactcggctacctctggaaacgctcggctgtctcgggggcaccctctagtccaccagtcccgcgggattacgttcggctacttccggaaacactcgggtgcccccttacctcaggctccgcctcggcctcggttcatccgcccggctcgaatgcgctcgggcatttccgccgggggcgggccaggccgctcggaaccgtggcggcggcggaggcggggatcccgcggctgcggcgacggtggccgcggtggagccacggggcgggcttggcttggtgtgacggcggctgcggcggcggtggcggccgcgaccaggtgagtcctgactggccctcgtggcgggggcggctgggagtgtgcttaaatgcggggcgcccgggggcagtgccgggccccggtggaagccagaacgcaagcgccaggctgcgtcgggccccgcgggaactgggggggccgcaggcaagggggggcctcgggctcggctccgcagcggtgcagcctccttgggacggtcggggcagaatggggagagactccccgcgtccaagataccggactggagccgaggccccaaatgaagggaggccctgcctggaatggggcttcgaatagtaccgaggggcgcccaggcattgtgcggggcagaatggggtgcgggagggccgggggtygaacccacttccggtcccctagccgggtggccgggtccacgcagacccaagtgcgcgtctgtgtgagcgctcaggccctgccttcacccgcggagcccccagccctgcctgccccgcccctcccgcctcccggattcggggagcgctgctcccggggcgcgcacaccggggcgtgggggcgggctggcaggcagatccaggcggttttctgggcatcccctctcggggcctcagtttccccacctgtagaatgagggtaacagaggcctaggaatgggtaaattgggcacccgagaatgtggcgcccctccgccctgctcggacacctcttggggttccccgtgactgaaggatgctcagagcctccacctgacactcgggcctcttggtggatagcacctatccttatagccaccctgaatccttgacaagcaacttaacccactgccaaggctttgcatgtgccgttccgtctgcctrtcgcgccttcctatccgctgtgatgatccattctctagaacagcacgtccatcccccgaccctagccctgtccatcacagggcgtctgaacccgcagggctaggctgggaatgtgtgcctatctccgcctccccaggctgggactcctggggaataatcaatgccctgctgccggcagcctcccctcctcctcagctgcagtacccccaccttctcctggctccctgtccctgcctggggctaaggttccttctaagcacctccccatctgcattttgtgcctactctgggccccaggctggagctacctgccagcccactcactcctcctctgcagagactggaggtccatttgcttggactcacctcgaggcctttgcttgtgtagaggcctcttcctggactttgttccctacctcttagttcagctggcctgacccctctatggagctcccaaagcacccggagtggcctccattgcgtcctccctgccctaggtatctggccacctggctgctgccccctcatgtccaactgggccaagtcggcagatctaggtgtaagtcctggcttcctcctggcctactgcacggccctagatacctccctgctctgagcctcagtttccccatctgtaacaggggtgatgaaaagcctgtttactggccgggcgcggtggctcacacctgtaatcccaacactttggaaggcagaggcrggaggactgcttcagcccaggagtttgsgaccaacctgggcaacatagcaagaccccacctctattggaaaaaaaaaaaaaaaggctgggcaaggtggctcatgcctgtaatcccagcaytttgggaggccaaggcgagcagatcacttgaggtcaggagttcaagaccagcctggccaacatggtgaaacctcgtctctactaaaaatacaaaaattagctgggtgtggtggcctgctactcgggaggctgaggcaggagaattgcttgaacctgggagacaggttgcagtgagctgagatcacaccactgcactccagcctgggtgacagagcaagactctatctcaaaaaaaaaaaaaaaaaaaaactgatttactgagcatgtagtatacctggggcaggttcttgggaactctactcccagcagctccaagggaaggctgtcagtatacccattttacagatagagaagctgaggccctgagagggaccggccccaaggtcacccagtgattcagggaattccaaatcaggatttgggcccatctccgtgttgggggtgagaggagttggcctggctaacgctgccctatccctgtctccctaggtcggcgtcctcagctggccgagcatggtggcagcctgcacccttggctcccttgtctggtgcagccagcagagccgccagccttgggcgcccatggccctccrtgtgagggcgtgagcggcctgccccagcctcacctgctgatggaggactcaatggcccagtgacctgacaccacaccaccaactccctcccaccagctgacgaatggtggacccagtgacragtggcccttgtaagggtcatggaataatttgaagcgaggcatgagcggcccctgtggtcgcctgtgactgctrgagatagaggtcccagcaccccaagccaacccagcggaccctcccagccctgcttcaaccaatggggccagtggggctccaagcagccacctaaccatccagaccccaccccactcacgcggccatggcgggccctgagggcttccagtaccgcgctctgtacccgttccgccgggagcggccggaggacctggagctgctgcccggcgacgtgctggtagtgagccgggcggccttgcakgcgctgggcgtggccgagggtggcgagcgctgcccacagagcgtgggctggatgcccggcctcaacgagcgcacacggcagcgaggtgacttccctggcacctatgtggagttcctggggcccgtggccctggcccggcccggccctcgcccacggggcccccgcccactgcccgccaggccccgtgatggggcccctgagccaggtgagcagcaagcaggggccctggaaaggggggtggtcccctcagacccttggtctcctcttctgtccagtgaggcaatgggatctccaaggaaggaggaaaaaggacatttggtcatttgacaagtgtcttcagtgctaggctcagcagtggacacaaggcctgttcctgccctcatgagcttctggttcaagaagggatgagagtgggttcaggaggtgacacatgccatgaggaagggggcttgcgtgggaagatgcgagggtggaagctcaaggcagtgggggcagcgagggcagaggctgtggagtagaactctaatggcgggaacggccagcaggaggaccagagggaggaaggggagggcaatgtgcgctggcatggaggacttagtgggattgattttgaggacaatggagagtgttcagtaggattcagaggctcagcctagcttcatcctgccttttgcagacagggtcccttgaagaacccctttggagaccctgatttccaaaatgaagccacaaggagggtrggatgtgggctgctcagctgaggccacacagcacagtgggatatgaggaccccacatccctcttcaaagacccttggccatcaccacttgccaggggtgtgccaggtgtagagaatcgggggcaccgagcccactcagtgactgctgtttgatgggcagggagtgtgggctctggccggggaaactgtggcccaggttgcaaggaggaggctaagaggtgctgcatgctcggcatggtctgctccgaccctcccagcagcccagcaaaaggccctgtgtgcagaccgggaggcctgagtgcaaggccgtcaaatgccgtacttgaaaccagttggtcacccagggaggccaaagccccgggaggtgccaggcctgctttgtgccagggtgacattgcccaaaggcaaaccagagtcccccagcgcagggcggaatagggggtgctgaggtggtgcgacgctggccccagcctccaggcatctggtatctccagggcccaggcctgcgtcctgcctcggcctgaaggagcaggaggyggccccgtctgggctcccagccagaatctgcctctccccctggtaacagccacctccctcctctgcctggcctctgtccagccaccatacacggccccacgtggggcggctgcccagccccaccctctgaatcttccagggttatgtgacctcggccagaacccgccccctcgaggcctcagtttcctcatctggaaacaacagggttggtccctggggatgctgggacccaacccctcggaaatgtgctgaagtcacctgagccccacctggctgtgcacccacgggggaggttgcagcccctctgacccacaattcctcacctgcaaagtcggggtgatgcagttctgatgggaaccccctccccattctgcagattgatcccaggccactctcagggttgagtttcccaacccaccggccagagtgtcacccacctccacctcctccttgtccttttccttttttttttttttttttggcgttttcgttgcagctgggcctttctccagcttgaggcgccacctggcccatcactcagggaggccccgcaggccccggcttgcccctgctgtgtgccagggcgtccccgccgagggccagagcagcgtccaatggtggcagacagcgagctgctgaggcggggatgctgcacacaaaaggccctgtagtgctgggaagccagggctgggagggggctgggcccaggatgccgccggcacccgctaggaggggtttcagcttttccaaaaggggagcaataattttctttcttttctaaattttaatttggggaagaaataattttttagaagcaaaatgattaagaaaacgggtcatggtccttggaaggaagctgttctgacccaggccgggatatttttcttttctttcctttcaaccacttttttgtttgcatcaagaagggagaagcgggccgggcacagtggttcatgcctgtaaycccagcactttgggaggccaaggcgggtggatcacttgaggtcaggagttcaagaccagcctggccaacagggtaaaaccccatctctactaaaataatacaaaaattagccaggcatggtggcacccacctataattccagctacttaggaggctaagtcacgagaatcgcttgaacccaggagatggaggttgcagtgatccaagatcatgccactgcacaccagcctgggtgacagagcaagactccatctcaaaaaaaaaacaacaacaacaamaaaaaaaaaaaacgaggaggccaaggcaagtggatcgttaggggccaggagtttgaggctgcagtgagctaggattgcgccactgcactccaacctgggtgacaaagcaagaacctgtctcaaaaaaaatgagaggcaatgtcattggcccatttttcatttgaaggaactgaggcccagagagggcaggtcctgtggccaagattgcacagcaggttgtggcagagcccaaacctgctatatgactttcagtggctgccgcaaaaattaccaccaactaggtggcttcaaacaatggaaatgttatttattaattaatgtatctttttgttttgttttgttttgttttgagatggagtttcgctcttgtcgcccaggctggagtgcaatggcgcaatcttggctcctgcaacctctgcctctcgggttcaagcsattctcctgcctcagcctcccgagtagctgggattacaggcacgtgccaccacgcctggctaatttttgtatttctagtagagacagggttttaccatgttggtcaggctggtctcaaactcctgaccacaagtgatatgctcacctcggcctcccaaagtgctgggattataggagtgagccactgcgcctggcctcctttttttttttttttttttttttttaaattatttaagagatggggtctcactctgttgcccaggctggtcttgaactcctggactcaaaggatcctcctgccttggcctcccaaagtgttgagattacagacgtgagcctttgcaccccaccacaacagaaacttattctgtcatgtttctggaggctggaagtccaaaatcagggtcgtgccccctctgaagtttccttccttgcagcttctggtgcctccaggcattcattcctctcatgcatgggttgattattccagtctctgccttggctttctcttcttttttttgagacagagtctcactctgtcacccagactggagtgctatggcatgatctcagctcactgcaacctccgcctcctgggttcaagcaattcctgcctcagcctcctgagtagttgggattacaggtgcgcaccaccacacctggctcattttttttttgtatttttagtagagatggggtttcaccatgttggccaggctggtcttgaactcttaacctcaaatgacctgctggtctcagcctcccaaagtactaggattacaggcatgagccaccgcacccggcctgttgatttatttttgaaacggagtcttgctctgtcgcccaggctggagtgcagtggtgcaatcttggctcactgcaacctccgcctcccgggttcaagcgattctcctgcctcaacctcccgagtagctgggattacaggcacccaccaccacgcccagctaatttttctgattttagtagagacaggttcgccatgttggtcaggctggttcgaattcctggcctcaggtgatccacccacctcggtctcccaaagtgctgggattccaggcttgagccgccatcctggccggctttctcttgttacaaggacatcagccagtgggtttagtgtccaccctaatgccaggctggtctcatgtacagattcttgctttccttacacctgcaaagacctatttccaaataaggtcacaggtaccagggatgaggacttggacatatctttttggggactttattcagcgcactccacctagtctgtgaagttgtgtgaactcctcatattctaacccagaaaattgtgtcccatcaattctgccctttcccagcccctccacccaaggtcttgcagcctcctgcggatgggagtcaaggtgccaagcacttgcctgagctgggccctgcctcaaactgccccagctgaggttcagccagcaaagagaggggctgggctccttccaggaaccccaccaacatgcaacccccctgtttcccccaccaggcctcacactccccgacttgcccgagcagttctccccacctgatgtggctccccctcttctggtgaagcttgtggaggccattgaaaggacaggtaagttccagcctggctgcagcccctggattctgcttgcttacctctagtgacaggcgactcatcctctcacagggcctccaagctcatgctgcacggaaacaggctgagcctggatgccctgggcctctatgttgaatagggcacagagtgactcctaagggaagatgggaaggtgaacatgaccaggccactgcatgtgytgtgccctctcccagttctccctccccacccctcccatgcccttatctctgggcagcaaagggagactgcaggggggttgagcggccagtccaggcctcacgaggtcggggcagcatttgagagctgactcgcctgtccccttcacccccagggctggacagcgaatctcactaccgcccggagctgcccgcaccgcgtacaggtgaaggggagcctcaatggggttgggaggaggctgggggccccagtacacatgagttggacgtgtgcccccctgcacccgcagactggtccctgagcgacgtggatcagtgggacacggcagccctggctgacggcattaagagcttcctgctggcactgcccgcgccgctcgtgacccccgaggcctcggccgaggcgcgccgggccctgcggggtgagcctggcgggtagcccgggggaaggagggggctgtagcgggtgggagggcccaggcctggctcaccctgccctggccatctgtccgcagaggccgcggggcccgtggggccggcgctggagccaccgacgctgccgctgcaccgcgcgctcacrctgcgcttcctgctccagcacctgggccgcgtggccmgccgcgccccggccctgggtcccgcggtccgggccctgggcgccacctttgggccgctgctgctgcgcgcgccgccgccgccgtcctcgccgccgccagggggcgctcccgacgggtgaggggcggggcggagccggagcgagcaggggtggagtttggggtggggcgggcggggcatggccagagtgagcggcgtctagaccctaagaagggaggggatggggtccagagtgagaagctgcgttcttgtgatgacggagcggagacctgggctcctgagtcgtgggacagaaggtgaaggggcctagtcccgaagcatgtgggtggtgcctgcaccttcccttctgctcgtcgcagctccggtactggtctctcgctcgcctttgtgtgagaatctatggagcacttactgcatacagctatgagggagctggcctcgcacatgtgcctgtatcatctcctcctccgccctgcacatactgtctcgtatatacccccaggcgtgcaagcgcacgcacaatcctgtgcacatgcgtgggcggacaggccctacccagccctcaccacactccccttccccctaaggagtgagcccagccctgacttcccggcgctgctggtggagaagctgcttcaggaacacttggaagagcaggaggttgcgcccccaggtgagtcccctgtattgctgtcatttcttcccgttgggggccgtaaatactgatccctgagtgctgccggcatcagcaggctggttgcagtgggaggcagccacagtatacagtcrgtgctcaggatgcatttgttttcctgtcccccagcrctgccgcctaaaccccccaaggcaaagccggccyccacagtcctggccaatggagggagcccaccctccctgcaggatgctgagtggtactggggggacatttcaaggtaggttgctggcagggggccagggaccaaggaggtgtcacagggtgagcggggtctccaggtggctcggcagtcccaatgttggatgttcccacagggaggaggtgaacgagaaactccgggacactcccgatggcaccttcctagtccgagatgcttctagcaagatccagggcgagtacacgctgaccctcaggtgggggcctgtccctgcaaggataaccgggggtcacaggtcacagagaccgggagttcagaggggatagaacatgtgcggtttcaagaatggrgggccaggcacggtggcttacacctgtaatcccagcactttgggaggctgaggctggcagaacacctgaggtcaggagtttaaaaccagcctggccaacatggtgaaaccccgtctctactaaaaaatwaaaaaaaaaaattagccaggcatggtgatggatgcctgtaatcccaactactcgggaggctgaggcaggagaattgcttgaacccgggaggtggaggttgcagtgagccgaaatcgcaccactgcactgcagcctggacaacagagcagcaagactctgtctcaaaaaaaaaggggacagggattgagggtcaggtgcggggtcccactgggtgccgacacccctctcctcccccaggaaaggcgggaacaataagctgatcaaggtcttccaccgagatgggcactatggcttctcagagccactcaccttctgctccgttgtggacctcatcaatcactaccgccacgagtctctggcccagtacaatgccaagctggacacacggctcctctaccctgtgtccaaataccagcaggtccgtgctggcctgggagccagggagggtagcacctggctggccccaggcctcagtttcctaggtagacccgaccaggctatgcatctcccctcattccgccacgtatctccaggaccagattgtcaaggaggacagcgtggaggcagtgggcgcccagcttaaggtctatcaccagcagtaccaggacaagagccgcgagtatgaccagctttatgaagagtacacacggacctcccaggtactccaggccccgtacatgagggaaaccgagacatagaggggcagtggcaaggccgggagcaggatgaccaaccccagaggacttgaggatgaatatccagttgcaggtcacagagcaggcacttagcaccaagggctgttctaaaaacatagaaataaggccaggcacagtggctcccgtctgtgtacttgggaggcagagacaggaggatcacttgagcccaacagttcaagatccttctaggcaacatagggagacccgtctacaaaaaaatttaaaaattaactgggtgtcgtggtgcatgcttctactcccagctactcaggaggctgaggtgggaggatcccttgagcctgggagtttgaggctgcattgaattgtgatcatgctgctgcactccagcctgggtgacagggcacgaccttgtctctaaaaacaaataaaaacagaaataagcgtacgaggctgggtggggtggctcacgcctgtaatcccagcactttgggaggccgagatgggtggatcacctgaggtcaggagttcgagaccaacttggccaacatgttgaaaccctgtctctactaaaaatacaaaaattagctgggcatggtggcggacgcctgtaatcccagctactcagaggctgaggcaggagaatcgcttgagcctgggaggcagagattgcaatgagccaagatcgtgctactacactccagcctgggtgacaagagtaaaactccatctaaaaaaataataataattaaaataaaaaaataagtgtacaagcttttacaaaaccaaaaaaggacagatgagaagggcccaaccagcctcacaggagtggctgagccaggacctggggagtgtccaggatgagcctatctccggctggccctcagttttcccatctgcagaatggaaccaggcaccttgattacttatgtccccttcaaccaagatgttattcaaaatgaaatcatgccaggtgcagggcgcgcacctctaatcccagctactcggaaggctgaggcgggaggatcgcttgagcccaggagttcaagactagcctgggtaacatagcaagactttgtctcttaaaaaaataaaataaaaattaagtgaaaggttttgtcactcaaggactgtgctaataagcttcttttgcaagttaagagggaatagattcaggtggaacagctgggaattcctcagtcgtccctagtaccctaagggttttctgtcctcttttttttgttttgtttttttttttttgagacagtgtcttgctctgtcatccaggctagagtgctgtggcatgatctcagctcactgcaacctccgcctccctggttcaagcgattctcctgcctcagcctcccaagtaactgggactacaggcacgtgccaccatgcctggctaatttttgtatttttagtagagatggggttttgctgtgttggccaggctggtctcgaactcctggcctcaagtgatctggctgcctcggcctcccaaagttaaaaaaaaaaaaagaaaaaaaaaatttaataaaattaaaaggtaggccgggcacagtgactcatgccagtaatcccagcactttgggaggccgaggcaggcagatcatctgaggtcaggagtttgagaccagcctggccaacatggtgaaaccccatctctaccaaaaagataaaaaaattagccgagccaggcacaatggctcaagcctgtaatcccagcactttgggaggctgaggcaggtggatcacgaggtaaggagttcaagaccagtctggccaacatggtgaatccctgtctctactaaaaatacaaaaaaattaggcgtcatggcatgcacctgtaatcgcagctactcaagaggctgaggcaggagaatagcttgaacctgagaggtggaggttgcagtgagccgagatcacaccattgcactccatcctgggacagagtgagactccgtctcaaaaaaaaaaaaaaaaaaaaaaattagccgggcatggtggctcacacctgtaataccagctacttggaaggctgaggcaggagaatcacttgaacccaagaggcagaggttgcagtgagccaagatcacgccactgctccagcctgggcgacaagagcaagactccatctcaaacaaaaaaaattttgaggtgctgtctcaccatgttgcccaggctggcctcagactcctcagggttcaagagatcctcccactttagcctccctactagctgggattacaggcattcgccaccacccctggcctctgtcccctttttactgatgtgttagctgaggctctaaatggacaagacagttgtccaggatcagttaggagcactgtaacctcagaattgactttggccctgagcctcagtttctctgttaatagttgttactttgttaggggttgttggaagggtccatgggacaaagtaaggaaagtcgtagtgcggcatctcccccaagaagccctgtgagctgtagcaactagatctgtcattcattcttagcagtgttaacaggtccaggtgtttgtggatacctataggaggatgtaaagaagaagagggtttggggggtggggttttgaaggctgaataggagttcatttggtgcagcaggcgttagaagaatgacactcygatagagggaccagcttgagcagtctccgtatcagagttgagatgtgcctttacccctcacgagggccttttggggagtcccaggaggtgctgagctgcgccccctcctccaggagctgcagatgaagcgtactgcaattgaggccttcaatgagactatcaagatctttgaagagcagggccagactcaagagaaatgcagcaaggaatacctggagcgcttccggcgtgagggcaacgagaaagagatgcaaaggtgagtctggcgcctctgccctgccccaccccaccctgatctggtgcagtacaagccagggagggaaggaagcagaaggaggccagccacttgraggcaaagagtagtctgttgaaatggactttgggcctggtgcgatggctcaggcctgtaatcccagcactttaggaggccgaggcgggtggatctcctgaggccaggagtttgaaaccagcctggccaacatggtgaaaccctgtctctattaaaaatacaaaaattagctaggcatgatggtgcgcacctgtagtcccagctacttgggaggctgaggcaggagaatcgcttgaacctggagttggaggttgcagtgagccgagattgcaccactgcactccagcttgggtgacagagaaagactgtctcaaaaaaaaaaaaaaaaaagaaatgggctttgaaggatgaataggagtttgctagaaagagaaatcagaggaaacagcatatgcacaggctcagaggctggaagcacatagtctggtgcaaagtaggtccttgagaaaaccctggaggccgggtgcagtggctcattcctgcaaccccaacactgtgggaggctgaggcaggaggattgcttgatcccaggagtttgagaccagcctgggcaacatggcaaaatctacctctacaaaaaatattaaaatgttagccagacatggtggtgcacacctgtggtcccagctactcgggaggctgaggtaggagggtcacctgagcccaggagtttgagggtgcagtgagccgagataaaaccctgaggtctctgcgccaccccacccctcccacaggatcctgctgaactccgagcggctcaagtcccgcattgccgagatccatgagagccgcacgaagctggagcagcagctgcgggcccaggcctcggacaacagagagatcgacaagcgcatgaacagcctcaagccggacctcatgcagctgcgcaagatccgagaccagtacctcgtgtaagtggcggctccatacttccctgcggctccctggcgactgctgcggcacatggagatctctctaggagtctcagtctctctctctccaccaagtggcccttcctgggccccgagaccccttaaactcggttcctcccgggccccttgaaagttttcccataggtcagcctcagcttagtcagaggtgtgtgcaatgggagtgtcactcctatcccattccattttgtggaaagttggaagccttccacaaaaattcctgctgggctgggcgcaatggctcacacctgtaatcccagcactttgggaggctgaggcrggcagatggatcacttgaggccaggagttcaagaccagcctggccaacatggtgaaaccccgtctctactaaaaataaaaaatacaaaacccggccaggcatggtggtgggcgcctgtaatcccagttactcaagaggctgaggcaggagaatcacttgaacggggaggtggagtttgcagtgagcagagattatgccaatgcagttcagcctgggcaacagagcaacactctgcctcaraaaagaaaagaaaaaaaaaatcgccygctgtgcaacctaccatgctgggtggctgcggcagccctgtcctgggttcaaatcagttcaaatsctgcccccacccaccaacctcctgaagacctcagccagagcctccacctccctcttgggcctcagggagggcactgtcgcgtgccaggtgctgtgctaagcaccgtgctcgttatgagttcatttggtccttttcaagccctttgtaaagtttgccctttacagctggggagactgaggcacagaaccgacagctgccctgtgcaaaggccagcagtgctggagtgagcctctggtgatgatgaggggcctgggctggcatcttcttgggggactccataggcgttaacagaaacaaaaaaatgaggggtgtgggtcagggttccccagcagagctgggcgagccaccctgggttcaggctgccctgagccasgtcagctctgccctcttgtggcaaccggagatattgtacccagaaccctctctcctcagccagaccctgcctcccaccggacaggcccactgtgggctcagcacccacacaactgcacaagcccacctttcctgttccttctcaggtggctcacccagaaaggcgcccggcagaagaaaatcaacgagtggctggggattaaaaatgagactgaggagtgagtgaccgtctggagggaggcagggagggcttcccagaggagggggccatttggggtgggtttcgaagaatgagtaggagttcaccagggaggaaaagttgtccaggcagctggggagcctcggaggctggcaggtgagtgaccagggccctccccgccaccgcccsccaccccagccagtacgcactcatggaggacgaggacgatctcccgcaccacgaggaacgcacttggtacgtgggcaagatcaaccgcacgcaggcagaggagatgctgagyggcaagcgggatggcaccttcctcatccgcgagagcagccagcggggctgctacgcctgctccgtggtgtgagtggaccgcagcggtggggattcccgcgtccctcccagagctctcattgaatgcctgccgcgtgccaggccttgggaaggagtccctggtggggtcatccgggacrggggagcacgcggccctggaacggggaaagcttggcggggaggccagccttccgactccccctctcgtctgcccccacagagtggacggcgacaccaagcactgcgtcatctaccgcacggccaccggcttcggcttcgcggagccctacaacctgtacgggtcgctgaaggagctggtgctgcactaccagcacgcctcgctggtgcagcacaacgacgcgctcaccgtcaccctggcgcacccagtgcgcgccccgggccccggcccgccgcctgccgcccgctgagcaccgaggacccgccccaagcagagccgcccctgggcccgtctgcgccggaggctgcggcggcgggagccacggaccagaccagccacatccaggggtcctcatttctccggctctggctcttgtttggggttctctcaccctctttctctttccttccctcccccattctccagatctccctctgtctccttttctctgtctttcttggcccctgtctctctccatgttgggggtcctaactcccccaccccatatctacgtgtcctccgggcattgccctctccatggctctggtcaccctgaccctctgccctgcccaccgcaggtcccccggggtcccggaagccccttctggctgcacctgccatgtttacagagggcccctgggctgcgcggccccagcctgggcaccctgatttttaagccatagacctggggtcagggcaggaaggaacttcactctgctgcttccgagaacctcggccgtgacattcggggccgggcgggacccgccccacagactccaacttcccctccwaaccccgaagtgaaacccgccaccgggttacccccacaagggggccgctgcgagaagttcacccacccccgaaaaaataattaaactcgcaggccaggcacggtggctcatgcctgtaatcccagcactttgggaggccaagacgggcggatcttttgaggtcgggagttggaggccagcctggccaaaatggcaaaaccccgcatctactaaaatacaaaaattagccgggcgtggtggcggccgcctgtaatcccagctacttgggaggctgaggcgtgagaatctcttgaacccaggagatggaggttgcagtgagcagagatcgtgccactgcactccagcctgggtaacagagggagactcctccgtctcaaaaaaataaataaataaacttgtgagctggccccaacccctcctaggaatcacagctccccgtactggtgccgccgcagtggccaagttgcgacactgcccacggcccctccctctgatgcagattcagggcttctcttcgatcatgttgggttttgattctgtttttccttgactgcaaaaccctctttcctctcctcttttgggacaagagccctggttttctacgctgcccttggccaccacactgcctgccccacgagctgggaggcaggttttgtacggtacgttgttattgatatgatataaaacatcaaacgtcgtgggtgattctgttgtcagtgactgggcttcagtaccacctctgcgtgtcggggaccctggtgtctacgggggtcacagcaggtcggacccgtgggtttaactccaagcccctctgagacccgacaacccctccctcccccagtttagctgctcaagcctggagaggttgaggcagtgcccaaggtcatacaggagagagattcgaatcctgagctcccgactgctcaggggaccccagaccccatccagcccctcaagtgcttccaagctgcttcccccgcccaccgcccccaaatttgaatcctgtcgcaaccatcagctgtgtccttgggaaagttgtatcccctccctgatccacagcttcctcattcattgccaagtggcgtcaaaagtcaaaaccctcccatgccacagggaggagtctcccgtgtctttgatgttctcaagtcgtcggcacctccagccagcattggaggctcttctctgacctctcctcacccactcccatgcacagcccgccgggtcccaggagacgctgagcaaaagccctgtggggttttttgtgtttctttttaaagagtcaaggtctctcactctgtcacccaggctggagtgcagttgtgcgaacacagctcgcggctcacagcctcaagctcctggttcccagcctcaagcagtcctctcatctcagcctttagagtcactggattacgggtgtgtgtcaccatgtccagctaattatttttaaatttttttagaaacaagatcttgccgagtgcagtggctcacacctgtaattccagcacttggggaagccaaggcaggcagatcacttgaggtcaggagtttgagaccagcctggccaacatggtaaaacctggtctccactaaaaatacaaaaaaaaattagccagacatggtggcgcatgcctgtaatcccagctacttgggaggctgagataggaagatcagatgaacctgggaggtcaacgctgcaccaagccaagatcgtgccactgttctccagcctgggtgacagagtgagactctgtctcaagaaaaaaaaaaaaaaaaagggtcttgcccttttccaggtgggtctcaaactcctggcctctagtgatcctcccacctcagcctccctgagtcgcgtaagccaccacgcgtggcctcatggcgtctttgacttggactcctgtttaccaccctccccatcacacccagaatccacacccccactgcgacgtcattgtcccttcagccctccccaaccctggggcctcactgtccttgtctgttttgtacagccacctctcaaggcccaacaaggctgaacctggggcaagtgcagaaagaaacctccactctgacccagtctactgctgggaccttgggacaggacctgcctcccttagcctcagagccccctagccttgccaggcactgtccctgccatgtgtcctgtctggagataacccataaataactccagcccagattgtgcctctcactgcataggtgctcacaggagaaaggttgccatctttatgatcccagctatgctgagctgggggtggaagagaatatcccgtgtggtctctaaaaacactcaaccactggctgtgtgtccttggcaaaatagccttccctctctgatcagccatttatttgttaccagctggagtcagtagcacctacccccagccccaactggatgcttctgagggttcaatgataaaatgggttgtaggcccactctatgcctggcaccaagccagagagcaatacattgtagggttacatttatgatttcttccaatagggctggtgcctggtaactactggaaaaattgtagcaattatatttatggttatttcttcaatcccacccggcatagggtaagcaccaaagttggggtggtgagtcttggggagcctttgccaacggtttggtcgtctgagggatgggctcggggaccatccagccactgggacttcagagaagctccggctcccaaaccagctactgtgtgtgtggccagggtcttccccacaactagaggggggcacagctggggactcaggtatatcttccagctgggtgtgggacattttcttccctaggatccgatgtgtcttgccctgaatgtaaggcctggcagggttggaatgtctcagttattcccccaacactccagcctccatctgggccttttttccaggctattctctctgccttcactgttggggccactgtcctgtgtaggcaccaaggcctgaccatgccatccagaagccccagcctgggacaactctcccccacctgcctctgagccctccatggtgactcttgttccccaaaccttatccttctccccattacacagaagggaaagctgaggctctgtcactcaaatccaaagccaggtggactccaagccaccccacccctatcccagacagcacaggctgcctctctcccccatgggcgtcccttgaaggccaggttgccccccaccccccacaagccttgaacgatgaaaagaaggaaggccagttctcttcaccccaagccagaagtggggctgggtgggtaccctagagaaatgacacgccactccctgcgccagcttctgctttccggcgtggctgtggtcaagcctgagtcagtcccacgggaccacggtgaggggtctggagcgtcggggtcaggagtttgaggggggaagggttgaggggcaggatgtgggggttgggtgtgagggaggtcacgggcgagactggagggaggagacctggccacacaggccttgcccactctcgggggcctgaatatttcagttactcccccaaaaccccggcctccatcccatccccagcctccatccgacgtcacccctgttaggtcacaggcccactctgagagtgggtctcgggcctcaagtcccctagccgcccctagaaggtctaggggtgcgtggagacaccaccattcctctcagcctgtgtctgtctcaaaggccccacctcacctcccctaaaggtagtcttgcgccagggctcacgtgcctgggcagggctgattgccaaggggcccaatggcctcgtgactggggacccagcacctggcaggggtgggggtgggacactcagaggaaggagtggaggagggagagacgctggcccgggacccgaggggcgtgggcatcgggaggcgggcccgggttaggggcgggaccgccgcctggttaaaggcgcttatttcccaggcagccgctgcagtcgccacacctttgcccctgctgcgatgaccctgtcgccacttctgctgttcctgccaccgctgctgctgctgctggacgtccccacggcggcggtgcaggcgtcccctctgcaagcgttagacttctttgggaatgggccaccagttaactacaaggtagggacggcgacagggcgggcaggctggagggaacaggcgccctgtcggggcacgcggctccttctttctccccagacttcacaggggaagaccagggccccgaggggacgctgtccctgccgggttcctggaaaaaccctgttcagttcccggcgctgcggccacactccctccgtgccgtttcgctttcgcatcccgcatctgagaggcgcagctgcctccacccgcctagtcccgcccaagggttcaatgagcgcctactgtgtacttttggggcaggagctggggtctccttttgtggcccagggcacaagttcagcagctggccaagggccgccggcatgcattcttgctgctacccttgatgcattcattccagccagggcagggctcgcgtgtctttgggacctattaggcagatgccctagaggctgagcgacttgctcaccgctccagcgacatgggccacccgccacccctcagctgaagccggaagtcagcacctattaggtgccgcctctattcagtcggacttggaaagggttcacgtggatcccttgctcagctcagaggcaaggtctccaggtgaagtgacaagaaatgagcatgggccaaggccggaggcggtggctcatgcctgtaatcccaacactttggaagtctgaggcaggcagatcacgaggtcaggagttcgagaccattctggcctacatggagaaaccctgtctctactaaaaatacaaaaattagctgggtgtggtggcatgtgcctataatcccagctactcaggaggctgaggcaggacaattgcttgaaccagggagtcgggtgttgcagtgagccgagatcgtgccgcagcacaccagcctagcgacagtgagactccatctcaaaaaaaaaaaaaaaagtctcaaagtcaagattccacctggcaagttctggaaggcgtgcaagatgaattgcgtatcacagccccctttctacaagactaccaagtggggttgagagaagtggggaactgcccagggctacacctgcctcccacgccttcctaatccacagacaggcaatctatacctgcgggggcccctgaagaagtccaatgcaccgcttgtcaatgtgaccctctactatgaagcactgtgcggtggctgccgagccttcctgatccgggagctcttcccaacatggctgttggtcatggagatcctcaatgtcacgctggtgccctacggaaacgcacaggtgtgtgggcgctggggaaactgaggcacgtgggcaggggagcaggggacccagcctaccagcaggctctcaccctgctgccttgcaggaacaaaatgtcagtggcaggtgggagttcaagtgccagcatggagaagaggagtgcaaattcaacaaggtggaggtgagcggccccagggccccacactggggtgggggaaaactgtcccacgtacaggaggcaaatacgaggatgccagctctgtcttctgcctcgtgtgctcccatttaatcacatctttattccctatctcctgggtgggtactggtgattattacgagagggtgtcagggtaccctaggccctcttcatgccctctcctgccccctctccaaaccccaggcctgcgtgttggatgaacttgacatggagctagccttcctgaccattgtctgcatggaagagtttgaggacatggagagaagtctgccactagtgagtgacgcccctcactccacccaaggagggggacatgggtggtaaccttccctgcatccaggcagacccaaattcaagtcctagccctgaccactgctgtctgtgcagcccaggaaaacaactacccttctttattttatttatttttttattttttcttgagacagagtctcgctctgtcgcccaggctggaatgcagtggcgcaatcccagctcactgcaacctccacctccagggttcaagtgattctccagcctcagcctcctgagtagctgggattacagttgtgtgccaccatgcccagctaatttttgtgtttttagtagagacagggtttcaccatgttggtcaggcttgtcttgaactcctgaccttgtgatccgcctgccttggcctcccaaagtgctgggattacaggcgtgagccaccgcacccagccctttttttttttttttttttttttttttttttgagacagggttttgctctgtcgcccaggctggagtgcagtggtgcaatcttggctgactgcaaccactgtctcctcagtttaagtgatcctcctgcctcagcttccccagtagctgggactacaggtgtgcaccaccatgcccggctaatttttgtatttttagtagagacagtgttcaccatgttggccaggctggtctcaaactcctgacctcaagttatccgcctgtcccagcctcccaaaggattacaggtgtaagccaccacgcccggccccagcctcccctcttg

SEQ ID NO: 96533 - DNA, 16549 bp, Homo sapiens
gccaaaagggcatgcgatataacaaagccaggggtagggtggggctggggctggctctttcctggtagggccgcccagaggcctctctgccaccttctccgaggcctgcagggtctggtccacctctgggggcactgattccggtgggcggtgggcagcctggcttccggtctggtctgcccccacacccccgctagggcacgataggggtcagttctcccagcccaggccccgctcagccccaccagggcagggcggctgtcctgagttgtttcttggctccctgcgtcttctgggtcccggcaggtgcgacaggtggggaagaacagtgaatccctgcgctcagagcacgccagccatggacggagggcggcctggaaaggggagttcccgcctgggaaaggggcgctgagaaggggccctgagggtctcccggctcagatttgctccacctgtgtcatagaggcctgggccttgcggggcgcagccaggagaatggggagggggtacctcgggggtccctgcagaggacgtgggggacagagcggggagaaaggatgcctcgagccgtctgggaggaggcagcgcctggctccccgcaaagaaaatggggtcgcgagggccgagggtccagggctgggagaaggggcgcctcgctccccaggaagcagaagcgctggacagcgcgaaggagggatcccagaaccaggagttgcaggggggacgcgcccagcaggggaacacccctcgctctccctgccctgccccgctccccgtgccccctcccccactccccctcccccgcccggacactccccccatccccatgcagcgcgcacgggagccgggagggggcgcgggcgggcgcgcggtctcgggcgaggcgggggattcaagcgcgttataaggcgaggagcccggggcgtccgagacgccgcgctcggagccgcgagggaaccgccgcccgcatggccccggcccgccgccccgccggagcccgcctgctgctcgtctacgcgggcctgctggccgccgccgccgcgggcctggggtccccggagcctggggcgccctcgaggagccgcgcccgcagggagccgccgcccgggaacgagctgccccggggccccggggagagccgcgcggggccggccgctcgtccgccggtaagacgcccgggcccgctccagacccagcccgcgcccgcacgccccggctcggggcggcgggaggcggacgtggaggccgagcccgccctcacccccgagggctgctgcatcgcctggcaccggggctccggggctccgcagagactcagggccgtgtagacgccgccctcagcccggcggggcagccttgactttggctttggggtagtttgacttaaagcaaggttctactaggtcggcgaaaccccccttttcttttgggacagaaggaagttgggaaatagataaagtgtaaataacttgatttgaggaaattgggaagaacgcatttgtaaaaagtgtaagcgaattactgccaccgcccccaatctatttggtgcaattatctggaaaacaaaaagtgttttcctgcggatctggggtcggggggctgtgcagggtggggaatgacatgtggctttgagtcaagtgatcaggtggcttttggccgtgagtgggtgatcttgagctctgccctgccccctcctctccagggttttggagcctggactgctgagcagagggtggtccggttggggaggtgtggcccaggcctgaggaggggagaacttcagaggagccctcagtgtggccgggccttgggtcagggagacagggctgccccagggaagccggggtgggcggccggtgctgtttattctgaagatgctcaggggcagtagaggggagagccaggaacgcatctactagagaggacaggggtgcagccaggcctggggtcccccagagttctctatcccggccccatcacacccagccacttcccagggactgaaggcaccccctccccgtgcagttggccaaaccacccaggtgggcacagcagccaaatgtcagggcactgtcagcaggaggcagacggggctcaggggcttccaggtggagttttggccttggaccctgtttgtgggggacacagtgacaccagaggtcctcccaggctccaaggcttgtttctgagagaccccttgtggctggaaccagggcagctgcccaatacccacccccattgctggggccgtctcctgggacgccaccttctgcctgttacagctctacctgcaaaccacactggggtcagggtccggccacaggccacaggtgcagctgggagggtcagctgggcacacccctcctggccggtgtgcggcatcctcgccccatgtttccgcggagggcacacaggaagtggaagagggtcctgggagggggtagaggggagatcagccagcaggtggtgcagttgaccctctaaggcacaaggaagcactgagcagcgctgagggtcctgggcccctgaaccctttctccgcccaaccacaggctcctcggcaccgcagcccccatcttcccaccacaacaccctggcctgcgcattggtcagccagctcccaaaagaaggccctgcatccccccagatcagccaggaaccaaaggcagtgacttggcagccggctttgtctctgataaaagggcccagtcagctctaaaatcccagggtccttccgtcagcccccagcgtcagcacccatgacctcatctaagccctcttgggccggtttccttcccagctggcagccttgcctggagcccagatagcccaaggcctctcccaggaaggtccctcccaaaactgtgctcagtgtcagcatcagtcaggatgcagcgcggacaggaatgggaacttccggaagcatcactgtccatgtgtcagtgtctcagaagtgctgaggaaatgaaagtctcacacagaggcctcgcgtcatgacagctcgcctggtcctctcccccactggactgtaacccgaggcagctgtgagagctgaatttgcctccttagaacttctgacactgggggaggatggacagaggagggttggctagtagttgggctccctgataatcacagttgcttcttcctgagcacctatgggtgctccagtggtcggatcctcctggtgactggaggacggtgtgatcactgcagctcctctggaggaaggaggcccagcagtacggggattcaccccgatatccaagccctgcaccccattttccctccaggcatcttgggtctgcctctcccatgagtgccaagtccaggccgaggtgtggcccgttccctaggagtcatcctccacgggccgggggagaagctgtgaggggttggggcccctttgggagctgcctttgagggcaccacaggtgacaaggaccagggtcccagagtacagaaggccacacagtcacctcctgcaaagtgtcccacctgcttggtaggagcccagtgaggccaaccgccctgctgggctggctgtgttccaggagcccaccgctgagcgtgcacacagcgtcgacccccgggacgcctggatgctcttcgtcaggcagagtgacaagggtgtcaatggcaagaagaggagcaggggcaaggccaagaagctgaaggtgaggccggcatcccgtcagtgccaggccgtggggggttccgcctcctcgctcctcatccactcccactcctacatcctgaacatttccaatagcacacccctcacgcctcggcctggggacagagaacagagagaacccaggcagccccagggggagccccgagttaggggcctagtcccaaccatttccccacacccctaaaatgccaggctctccctcttttctcctccctctgcatccaggccagggaggctgggctagcccaggctgtggtgagaaccttgtccacactggaggggcctgcaggagtgcctggctcccagggactaggggcacagggtccctctcaccctcactcagccttaggtcttggcctgggcagaaacttggtgcttggtcctggtgctgcctcctgcttggagcccccaaaatggaaaatacggggtgtgggcttctctgtcccctgggggccagtatcacctgcctgggatctgaacacacgatggaaggccagctcggagtgcatgaggcaggtgcacaggccgcgctgtcctcgtggcctggccttctacctctgcccagcctcctggccctgccctaagcttctccccacagggggctcactggcttctggttcgggtcccaacccagcctagtggggacctgctgatggtggactcgggcccagtgcagaccctgagatgcaagtccccaaaagcagcctagagtcttcttccctccacgaggcctggccgcaggagcgggcttcagccctctgcctccccactcagagcagagtccttccctgccaaagccccgccccgagggcccccacctccagcacagtccttgtactcactccaggagaagctttcactgaggtagatccttggctggaggttggagcccactggggagctctgttgcctgcctcttagtggcaagagcttgcacaggggatgctgtggctcccagcctgctcctcacatgtcctcactgccaaggttccctttcagttcggcttgccagggccccctgggcctcccggtccccagggccccccaggccccatcatcccacccgaggcgctgctgaaggagttccagctgctgctgaaaggtaggggtgtgcaccggctgggacacacacaccccgctgtgagcagggcctgggagggtgtcccgaggagctgacagggccaacctcaacacttcggcgggcacccaaggaggcacctgctctgggctggactcaaggacagtagagctggccaggtccagtctctgccccatcttggcccatgtctgccaagggtcagggctggggatggctgggggttgggaaccatggccaggagaaggcttcacagaggaaggtggacctggccactcagtatggcgggtgctcagggaccagcgcctatgccctgcctggaagtcaggagagcccagcgaaaggcagaggctagtgtatggggcagcaccaggtggagctcagcctggcacccacagtcaccactggccagggctggggcagcctgccctggaggaggcagggctgagtggagccgcggagtccacactgaggcctcctgcagagcggcggctcacattagtcattagaattgagccgttttttccttttagttcaatgtcctgttcgtttaaatatagcaccttctgcgctgaagaacctccttgtacttccagtaaagctgcaatcgcttattttacccccagcgtctttggaaaatgtgggtggggtagaggtgaggctggaggccaagggcgctggggcacttctgcccgagcttcccaaatcttgagggaaacgggagccgctgcagggtcaggacgcaaagactccgaggcccttcaggccgaggggacgtcgccctcgccccacccctgcgcccggcaggcccctggtctcgctagcacctgtcgttcagggctggacccacgcggcgggcgggtgaggggtccctggcgcgcggccaccgctcgctctgtgccaggtgcggtgcggcagcgggagcgcgcggagcccgaaccctgtacgtgtggccccgccgggccggtcgctgcgagcctcgccccggtctcggccaccgccggggaggacgacgacgacgtggtgggggacgtgctggcactgctggccgcgcccctggccccggggccgcgggcgccgcgcgtggaggccgctttcctctgccgcctgcgccgggacgcgttggtggagcggcgcgcgctgcacgagcttggcgtctactacctggtgagtgccggcgcgcgggagggcgggtgagtccggccgggcgggagccggggtgaccatccgtgcccctcgcagcccgacgccgagggtgccttccgccgcggcccgggcctgaacttgaccagcggccagtacagggcgcccgtggctggcttctacgctctcgccgccacgctgcacgtgggtgaggcccggggcgtgggaggatcgcccgctctgtcgcccaccccgccgcccgcccgcttgaccacgtcccaccctcccccgcagcgctcggggagccgccgaggagggggccgccgcgcccccgggaccacctgcgcctgctcatctgcatccagtcccggtgccagcgcaacgcgtgagtgtaccccggcccggaccccacacccgcattcgctcggcttccacaagctggaggtggttaaacaggcactggacggggcttccgcccgttcacaccccaccgtggcctaggtgaccccacaccttcttccaggtctcccggtctacttctgcccctatcaggccttcccttcacagcaactgggagctgttaaaaatgacctttccagctgggcgcggtggctcacgcctgtaatcgcagcactttgggaggccgaggcgggcggatcacgaggtcaggagatcgagaccatcctggctaacatggtgaaaccccgtctctactaaaaatacaaaaaattacccgggcgtggtgggtgcctgtaatcccagctacttgggaggctgaggcaggagaatggcgtgaacccgggaggcggagcttgcagtgagcagagatagcgccactgcactccagcctgggcaacagagcgagactccgtctcaaaaaaacaaamaamaacaacaamaaaaaacctttccaggccactccctgcccagaccttcacctcctccccaggtcctaggaggccgggctcctcctagcctcccaactccttcccacctcagggactttcatcttggggctcgaagcaccagtgttacttcaagaggcctctccagacagctttctggaggccccctcctcagtcgccctcccactcctcacccgggaactttcttccccatgatcgcatcccttgctcctgcaccatctggcccacgagtgcagtgactgtgagctccctgtctccccacacccagaagggagcccaggtacagcggagataccctgcgggtaggatagctggagcagacttgaatgaatggatcaagtccaaaacttcttagtctgcctttgaacccccagagtgtgttggcctgaacyaacttagcatcacctgccaccacatccccacttccggctgcatcagccagtgtcctgtttcccatcagagccagggctttgctgcctcttgctgggccctcgccttgcctttcccaatacagcaagcatgcctctggccctgtgtccttcctcctcttggggactcggttcagacaccacctccactggaagacctggccagggtcaggcactttgctgggcatgtgttggctgctggcaggattgtgtgtcgtaggtgaagttggtggggtctcatggggcaggctgaccctccctctgttttgggtacagctccctggaggccatcatgggcctggagagcagcagtgagctcttcaccatctctgtgaatggcgtcctgtacctgcaggtgagtgcggcaggcttgggcatcgaggggcaccgcctgggcatggccacgggtggctgggtgcagaagggtgctgttagatgctcaggatcactgggtcgggtgcagcaccctcagactccaggcctgggagagggtccaggacatgccaagtkctcactttggtctgggcgcagccaggcttcaagtcctgatctccttcctccaaacacagcccttccccgagggcacctgcccgcttgagcagctgctccgctctgcattcccaatattcagactccctgagcacctcatcctgaggcccagtactcctggmcaccacaagcccgctgaagggacyggtgcagggagggaatggaggccagcactctgyccaggctgacgccctgagtcccctgtgactatgggaagccagatacgttattttcctacccaaaaccctaagtgaccatctctggcactgtgggaattttggcaagtggtagagaaatggacataaaggtggaatttactaacaaagaaaacaattgagtgcaggtgtgtggaataacagctgctattgaattctcccagagctttggagaaggtagagctactccccgagttagcccaagttcacacagcagagccagaaatggaggccaggctgtctggcccagagtctgtgcttgctgaaaggcatttagaggtcccttctgggtgccacacagcatgcttggtgaactcagatggtctctgccccacctggatcttaagatgcagatcctgaggcaggtctggrtggatcccagattctgcatttctgggagttcccagggaatgtgacactgctggtgcatgaccacgctgctggtgcatgaccacgtttggagcagccaggctagagtgctggtttcacggaaggctctgccaaatgactgcctgtggggaagggccaccctcccacctgacttggagcccttgcaggctctgagaagccctgcagctgagaaacctgttggactcttgaatcccactctggccttgagcaggggcccactcccacacacgcgaactgtagggcgctgcagggaaagcagaagaggtgctgggtggggcccaacccgtgcgggcccttgctctgtgaccttggcggccacattcttctctgggcctgagcccttcccaaaagcggggctgagtgggcaggagggagtgtggctggctggcccttgggtcacctctgcaggctgttggggtggcccagtgcctcaaaggcaccctccttgcagatggggcagtggacctccgtgttcttggacaacgccagcggctgctccctcacagtgcgcagtggctcccacttcagtgctgtcctcctgggcgtgtgagcggccaccacaggcccttcctctcaggggcaaatggagcacagatctagacaatgtgtggacagtgtcagagtagcagtggccacatggaggaggaggcccacccggaactctgcycacactggccactgcagttcagcccacagagccactgcaggcaggcctacggacgtgacacgcacgctggtggtcccggagccagggttgattcaggacaccatcttgggctcttatccaggraagaaagagtcggcgtgcctgggggcacctgctagtctccagctgcaggccgactctttcctggcctgctcagcacctgcccagatggcctctgcgtctttcctgtgcccagccccaccttttccacctctcttcatgttctcatggagtgcaaagtgcaccagccagggcccctacctgggagagggtcagctgacgcagggctgagggggctgccacagggacgtacgctgtgtgttcttactgcttagaagggacggggtcactcaccactcccctggtctccatctgggctccttggtcttccctgcccctcccctaaccgtgttctacctgccagtggagctgagcactgcctagcctgggccagaggggcactggacaagggcctttgggggacagtaagtctgggcccagcttctagttctaatgtgtgcaagattaactcacaaattcacctcagaaggcctttccaaatgggagctccactcttcccctcctctgcaaatcttcacagccaaggccccttccaccctctccagaggtggatgagatcccttttcccctcccctctgaggtgctgactcactggtaggagccacccaccagaggaaagatctagaacgtctttacagattggagacagccgggcctgctgacccatcatccgaatagctgaagcagagtcttccaccaggggtgccagggcctggctgggtccagcggctctgggatgagcctcccaagcatctttcccacttgggtggccatgcggcgctgacattggacaggtggtggacgagagatggtcccgagaaagggtggtcttgggagggctggtcccaagcctgctgtgctcctgtggcagtgatggggcctggggatggggacggcagctctcatgaggacacacaggctgtgagcccgcagcctcctcaaatgtagcctcccacattttccccaaagtacaggactgtcccagagtaggtagtgaagaggacaaggccctcggcagcgacctccagggcctcctacctgctgaggaagagttaacccactgcctccccacacaacaggctacgaagaacctggtgcctcaggacctcctgggagccaagctggtctggcaagggcgctcaggcctgggagagaagggagcaatggccagtcaccttcaccttctaactaactagcctccggatgaggtggctgccaccaggcccgaatgatccccaggagcccagcttccaaaccccaacatcgaatcaaacatctccatccccaagtgcagtaacacacaaaaaccaaacactctgccctgggaaaggcctggtgcgattctcagtaggactcacacccaccctacctagaagtactgggctggcctgggtactgcatccgtgtgttttgataagggggtgatgtggccacgcccttatctagatttcactttgtatccactgggcacagatattctagagaacttatctttcactcttgtaaaagccacatatccacatctctttcattttctcagtgtgttatgcagcaatttattaaagtatttattgtctaataaatactgccaagtggaatatatttatataactgacttcgtggggtggttcaagtacttacttaagaactatgtgacacaacagttacaaaacaaaaggcagaccttaagatccggaatcaatcctttagcccaggttcactaaactaagcacagtaaggaggaacctggaaggtgaagtggagatggcctccagcctctacgtgggagggactcccttgaaggctgggagtgaaccttcctgggaaactagggtcaagcctctcgggaacagtgggacatagggatgtatgagtcacagacatcagtgtgcaaacacctggtttgctataggaagatagttaccaaatgaatggttctatttcctgattctggggtgccagggctcttttcttcaatgaggccacactgtacaatgtcccagtcctcaaactgaaatgggtacttggctcttaaaactccctggggaaggaaggggcagcaccaacacttcgttcagttcttacttgtggcttttacacaacagacccccaggaggcatctaaggtttacatgaagcctttaccactgaggtcctcgcagcatggataccaattccactcaatcaactgggtgataaaaccatgtgtgtgtgttgggtgggggccagggaacattacaaaacagattctgaaaacgcaaatttttagaatcttacatcatcctgagccaaacatttacacaaaaggatccaagagctgctttactaaaaactacttacagtcataatgatgacgttttctatataaacaagtgcttgaaaagtattttaaagcttattcttctgagcttattattcttcatgcactcttttcatgcttttaacatctttaacagaagtgtccccctttgaggtgttattgcaaagattaacctcattccagcacagggccaactccccacacctacctcacgtgggaagcagaatttccgggccatgctgagcagccggctgcctgctccaacaggaaggtgcacacctacacccagggagtccagatggaagccactgaaccgagtcctccacagactccttccaccagactgcagctctcaccaatggaatgagaatggctaattctgtactgtttctggcaggtctgatgcatgagtaaccttgtctatgagtctatttcctggctaagcctgagctcatgctatgtaacattttgcaacactatttccatagggaaaactgaaaagagctagagggttcccaaagccctggtctgggcctagccttgactaaccagtcatcccctgggtctcttcattgcaacatgccacttccccaaccagggtcatcatgacagtgaaagcacagcaaaatgcccgtgaactacaaaacatcacacaaccagcagcctgcaggccactacgagccagtccaagatgcctataatggttttaacaaggaaagacagcatattcaaaagcaaacacaatctctgaagggtcaagaggtgctcacagtataataactcaaaagactaggaaaaaaaaagagaaacctttatttacaaccatgggagtcccacaggagtacacaaaacacacaatgtgcacacacacaaaatgaaccttttaagtcaataccatgcgtgctcctggccgcgcgccacccctcagtgccctatccgcaccaccatcacagtgacgttgtcggccgagccccgctgcaccgccttgttggccagcctgttgcaggctgcttcgtagcgggcgtcggctgcggacttcccttcccgggtctggatcttttcatcctaccagatgagaaagggaatgagtgaatggagtgaccccgcaccctgtcactttcctgagacatgactgccaggaagaagagctgctctggtctccatcagggctggcaggacaaactgaccagtgagtcagtaggcagagttcacactgaaaaagggcacaagggctgtcccacaatgggaggaaatggggtctcagaacttctacttctctgaaaactaagacacaattgggacaaccaccacccccgtgtgagatttctcacctcgagacaggacaagatgaagttcacggcttcttctggggtaaagaccttgaagagcccatcacaggccaacaaaatgaacctacaacaccagggagaaatataaacgggttttaggcccaaccaaaaaataaaaaataaaaaaagggcctggagatggagataaaataaatatttgtccaactattcaaaggctaaggttttttttttcttttttcttttttttttttttttgagatggagtttcactcttgttgcccaggctggagtgcaatgacgcaatcttggctcactgcaacctccaccttcccagtttaagctgttctcctgcctcagcctcctgagtagctgggattacaggtgcccggcaccacgcccgggtaattttttgtatttttagtagagacagggtttcaccacgttggccaggctggtctcaaactcctaacctcaggtgattcacctgcctcagcctcccaaagtgctgggattacaggcatgagccacagcgcctggccaggctaagatttgtttaaacccacttaatttctgagacaaaggtttaaactacttacaagtatttgtggataggatgttatacatcaaaactgagactatccttctcttcgccaattaacagaattattaattacctcaaacattaggtgctgtactttcttaggcaaactccagaaaaatcactgaataaaaacatgggtgttatggtaaatatacaagaatttataacaccataggccttacaccacttccagacataaagctgagaatgagcccagcctcggtgaaacatccttgggcacacactgcacagcttggggctgcatccaagaccgaggcccaagaaggggcagctgtgcgtgttcctgtgtttgaaaaccacatgctctccctttcagaatcaaacccccctagaccgtccctggaatctttctgaacaccaatggattcaatgtgacagttctagttctcctggcattgggggtggggaatacgcatccccacagctttgcggtataagccaccctccttttctcactgtaatatctgtggggtttttttgtgtttttttttctttgttttttgttgctgctgctgctgttgttgttgaggcggactttccctcttgttgcccaggctggagagcaatggcatgatctcgctcactgtaacctccgcctcccaggttcaagtgattctcctgcctcagcctcctgagtagctgggattacaggcgcccaccaccacgcctggctaatttttgtatttttggtagagatgaggttttgccatgttggccaggctggcctcaaactcctgaccacaggtgatccacctgcctccgcctcccaaagtgttgggattacaggcgtgagccaccacacccagcctgttttcctcgtttaactaggctttcactcggccgctacttgccgagcctatcgtccatgctgagaacaccgtggggcctagtcctggcaggctcccaccccttccagtgtcctgagactcagaccctcaataaccaatcacacagacccatgactacaacccaggaaggggagctaggaagcaaagcagaaggtgcatccttcagaacaccagaggcggcggctgctggagagatgatggaggaccccgcggtacgtgagaacatgacaaacacactgaagaagatgtggagaatggggcagtggctcaagacaaggccaagcaggcgagtgccaaagcaaggcacgcgctcttcatccgcagcactggggcgggactcagagcagcactcggaggcccactcgccacagtgccactagtgtctctggcctcccctcatcaactcagtgctgtgaatcctgcttccgggagctttccttgacccctcctgctactgccttagttcagcccttcatcatcaggccagggctgctgcaccgctgctcacaggcctccctagccccataatgccatctttaaccatcacctgttgaggccctgccctcagccagcacggtgccgtacccttaggcatggagaacaggagatgaacaggtgaactgtctctttctcaaccgatcctggctctgtgtaaaaacctatgattctccaccaatgatcaactaaagttcaaactctccagcatggggctgagggccggcccttcaggatctgcccccaaagtaccctgctatcactttcccaccactccctctgtccctcaagcgcctgtctggccatgctttcacactgtcacattttaatgccttactgtgtgttccctctgccaggaagccccttctcctctctctgacagggataaccccttcccctactgccaaagaccccagcacacagcacatgcctaggacacactggactgcagctgcccatccccatgtgtcccccctaccactgtggaccccaccagagcagaaaccacattctgtttatctctgcacccccagggcctagcaccatgcacaccttccctccaacaaaggcttgatagaaactggaagtgaggaagagaaataaacccacatgcacacacacctgtgcctcttatagggcccttttacctgtcattgggggtcagctggcagcgtctgatgtcgggcacagaggtgacaccgcagcgcttgtactgcccgtccccaatggagcgtgacacctctagcacgcccaaaacacgcccatccctaaaatgagaggaaaaacatttcagactctacctgacagattatgggtccacagtacttagaatctcaccttaaaagcagagaatggaagtgtgaaagatacagactgtggaattcacattattaaccactactgacatttcttgatctcaaatatgcaggggtgtctaggccattaactgctgccctggggtagggaccctgcccagctgcacatgggtgggaacagcacctccagtggctgccaagcagtgctgcccagcttaaccttcgacaggactcagcagttctcatcacacacctaggtcccaactccagaatcggatttgactgactgggtaagggagcctggcagtgttttgtatcttaaagctccttgagtgtttcccacatgcagccagggttaacaatagctagaacagagggatattttgcatttcaatctaattagatttggaaaatccctgaaagtggctattcctggattgtggagcacatgtcctttgcatcaagtacaggtacggtttaatgttaatgtaaatgacagtatcctgcatagcatcatagtttcacccattctattttaggtgaggggatatggaggagatggggcagtgatctacaaatgggaagagacatctaagggacagtcctattgccaaggaaaaaccatttggggaagcctactgccccaaagaacaattctggtctaggctgcagcactgtcaccttaggcagctgcaagctctctccccttcaggcccttgtttgtaaaggcaaggcagagaaccatactcaacgtgtgagagagcactccgcaaatgccacggctgcgcatgggcgtttaagatcaccacggggctcccaaatcatggaccaagcaagttcaggagatgcggtgcagatggctgcacatggtaggaaatgcttcctggg

SEQ ID NO: 96534 - DNA, 24517 bp, Homo sapiens
gtggtatagagagataatgggcaatgtttctcagggctgcttcaagtgggcttaggggcggcgtgggaacctacagtgggagagattcaattgaagaaagattttggggtgaggggtgatattgtggggttgttagaaggaggatttgtcgtatagaattattggtgatggcctggatgtggttttgtatgaattgagaaactaaagacacaaggtccaaataagagaaggagaaaaacagatattaaaggactaagaattgggaggacgcaggacatccaattagagagcatccaaggggatttagtgtaattgattggttggttggtgagtttttgggctctatttttgagagttctttttttttaagttgaggctgagcttggtgaggtgtgtttttaaaagaccattagtccgttctacctttcctgaagattgaggatggtaaggggtatgaaggtttcactgaataccaagagcctgagaaactgcttgggtgatttgactaataaaggccggtccgttatcggactgtatagaggtgggaagcccaaacccaggaattatggcggacaaaagggaagaaatgactgtgatggccttctcagaccctgtgggaaaggtgtctacccatccagtgaaagtgtctacccagaccaagaggtattttagtttcctgactcggggcatgtgagtaaagtcaatttgccagtcctgggcaggggcaaatccccaaacttgatgtgtagggaagggagggggcctgaacaatccctgcggagtagcagaatagcagatggaacactgagaagtgatttctttgaggacagatttccacgatggaaaggaaatgagaggttctaagaggcgggttagcggcttgtaacctacatggaagaggttatgaaatgacgatagaatagaatgggcctgtgaggctggaaggagatatttttcttggtccaagaaccatttgccttgtgtggggagagactgacaggtggaagtttcagtgggaaagtaggtgggagtgactgatgagacggagaaaaactggccatgagggacagaagttggaaggctaggtgcttctttagctaccttatcagcataagcattgccctgagcgataggatctgatgccttttggtggcccttgcagtgtatgactccagcttcctttggaagtaaagcggccttgagaagagtttttattaaggaggccttaatgatggaggacccttgcgtagtgaggaaacctctttctgcccatataacagcatggtggtgcaggatatggaaggcatagagtcagtataaatactgacacgtagtccttttgcaagagtgagggcctgagttaaggcagtgagttcggcttgctgagaggtagtggaggagggcagagcggtagcctcaatgatagatgtggaagatactacagcatagcctgttttgctggtgagtggcaattaggcctggtggaactgccatcagtaaaccaagtgtgatcaggatgaggaacaggaaagaaggaaatatagggaaatggagtgaatgtcaggtggatcagagagatacagtcatgggggtctagtttggtatccagaataatgtgggaggccggactgaagtccgggccagaaaaatggtaactgtgggagactcaacaaagagtgaggatagctgaaggagtcgggaagcagaaagtatatgcatcaagtgggaggaagaaaatagattttggaaattatgagaactgtagaaagtgagttgagcatagtttgtgatttttagggcctctaaaagtattagggcagcagcagccgctgcacggagacataatggccagcctaaaacagtaaggtcaagttgtttggacaaaaaggctatggggcgcggtcctggtccttgtgtaagaattccgactgcacagccctgcactttggctgtgtgtaatgaaaagggttgggatgagtcacagagagctagtgcaggagcagtctctaaagctgtcttcaaggaacggaaagaggagtggggaaaagatttaggatctatagggtcggctagatttccttttgtgagtttatttaacggttttgttaggatggcaaaaccaggtatccaaagtcgaaagtatccaaccatgtccaggaaggaaaggagttgttgttttgtagaaggggttggggtttgagagatcagtcagacatgatcggcagagagagcacgtatgtttttatgaagaattatgccgaggtaggtaacggatggagaagaaattgagctttggagggggatacccaatatcccttggagaataaatgttgaaggagcaggagggtgtcctgttgagaagattcaaaggaggggctacaaagtagaaggtcatcaatatattgaataaggtgagaagcagaagggtggaaagaaagtaaatcaagagaaagagcttggctgaagtaatgagtgctgtccctgaagccttgcggcagtacagcccaggtaagctgctgggactgatgggtgtcagggtcagtccaggtaaaagcagaggctgggacgaggggtgtaggggaatagtgaaaaaagcatctttaagatcaagaatggaatagtgagttgtggaggaaggtattgaggactaaagagtgtacaggttgggcactacagggtggataggcaaaataatttggttgataaggcgcagatcctgaactaacctgtaagacttgtccggtttttgaataggtaaaatgggagaattgtaaggagagtttataggttttagaagcccatgctgtagcaggcgagtgataacaggctttaatccccttaaagcctgttgtgggatgggatactggcattgagcagggtaagggtgattaggttttaatgggatagtaatgcgcgtgtgatgggttgccagggagggagtggaggtgtcccatacttgtgggttaaggtgggggggatacgagaggaagacacaaaggaggctttcggttgggaagaagggtggcaatgagatgtggctgtagtccaggaataatcagggaagcagataatttggttaaatatttcagcctaataagggaactgggcaagtggggataactaaaaaggagtgcattaaagaacgttgtccaagttggcaccagagttggggagttttaagaggtttagaagcctagccgtcaatacccacaacagttatggaggcaagggaaacaggcccttgaaaagaagataatgtggagttggtagcctctgtattgattaagaaggggatggacttatcctccactgtaaaagttacccgaagctcggtgtccgtgacggtccagggggcctccaaggcgatcgggcagcatcagtcttcagctgctaagctgagaagatatgggaaggagtcagtcagagagccccgggccagagttccaggggctctgggagtggctgcagggcaagctggacagtctgatttccagtggggtcccgcacagttgggacacggcttaggaggaatcccagggctgtgggcatttcttggcccagtggccagatttatggcactttaagcaagctcctgtgggaggcggtcctggaggaaagcctggccactgcggttcagacgttttgaagttcttgtgtgctggagatgtggctggggtttctctcacagtggaggcaactaattgcaactcagaaaaacattgctacttggctgcctttactctattattgtacaccttgaaggcgaggttaattaggtcctgttgtgggttttgagggctggaatctaatttttggagctggcggcttgggtgcggtggctcatgtccgtaatcccagcactttgggaggccaaggtgggtggatcacttgggcccaggggttcaagaccagcctgggccacatgtcaaaatcctgtctatacaaaaaatacaaaaattagccaggcatgatgcacccatagtccctgctactcaggaagctgaagtgggagaatcacttgagcccagcaggttgaggctgcagtgagctatgatccaccactgtactccagcctggcagacagagcaggaccctgtctcaaaaaatacatatatatataatctgggcttgatggtacctgcctgtagtcttagttactcaggaggctgagctgagaggatggcttcagcctgggagctcaaggctgaagtgagccatgattacaccattgcactctagcctgggtgacagagagactctgtctccctctaaaaacaaacaaaattcagtctagctctagacctaatgagaatcttcatcttagcaagatccctaggtgatgtgtgtacacaggagtttcttagaggcagaaatcacttcccagcagtgtctgaggatggcatcacttcagccatcatcaccagggctggggacctggagattaacaacgatgtagtccctgccctcaaggagcttgcaggctagcagagaaacagacaaccagaggaacaaccacaggactggtacaaaggtaggggagtagcagagacggctttacagaggaggtggctctgagatgcttaacctttagtgctagtagaggcatcgtttgttctaagaaaatttgctttacattctttaaagcatgcagagttgatcaatgcaacacctcttgatttcctgataagagctttcagagggtatcatctttgagcagctccttactcaatggagtggtgcagtgagacctctgagcctcaatttcctcatctgcaaaatgggacagtttgtaccatattggcgttactgaaattatccgtgtttttttttgagacagagccttactctgtcacccaggctggagggcagtggtgcaatttcggctcactgcaacctctgcctcctgggttcaaacaattctctgcctcagcttcccaagtagctgggaatacaggtgcccgccaccacacccagctaattttttttgtatttttagtagagatggagtttcaccatcttgaccaatctggtcttgaactcctgacctcgtaatccacccacctttggcctcccaaagtgctgggattacaggcgtgagccaccgtgcctggccttatccgtgcttttatttgagccacaaaaccaccctgtgagagaagcagcatggtgtggaaggacttccataaaaacttgctaaacagaagatacaaaaagaatgctgctaaacagtatgttcaactgtgaaatcatttttgtttaaaaaatgcatatacatattctataatttttttaacattttaactatatataactaaatagacatatagaaaaatgctctattaacactgattttcctggagagtggaaatagcactttatacatttcaacactttattttcaaggacgtgtactttttaaatgggaacattttatttttatttttattttttgagacggagttcactcttgttggccaggctggagtgcaatggcatgatctcagctcaccacaaccttcacctcccaggttcaagcgcttctcctgcctcggcctcccgagtagctgggattacaggcatgcaccaccacgcccggctaattttgtatttttagtagagacggggtttctctatgttggtcaggctggtctcgaactcccgacctcaggtgatccacccgcctcggcctcccaaagtgctgggattacaggcatgagccaccacgcccagccggaaacattctaaacatacgtaagtataacaggagattagaagtcatgttgattctgcgtggcttgattatggatcattgtcttcctctcatcgcagatcctcattttttcggttttctgtgatgcgcttgtccccatatggggctctggcgtctttctgggtctggaggtccccagcgccctctgccgaggcatctcttggtccggcggtcctcaggctggagggtggagcggagaagcctggtcgacgtggatggactcggtgggccggcgcggggcccgttaggcatctttaataagtttcaccgggagccgggtggccgggatggagacggctaagccgcgagaagtttaccttctaccacagcgtccacagtacccggcttggcctcaggcctcgggtcccgacgtcctccccagagcacaaacctacyacaggttaggccggaggccgccacagcccagggtctctgccacctggcccgccccctccgaggcgccggagagcgattcccaaggggcctgccggagcgtggcgtcacaggagcgtcgcgtcacgtgaggctsccatccaatcgcggcgcgcgctctgccctgcgggcrgcgggtgccaggcacggtgtcagcaggcaacatggccgagaggccgggscctccgggcggcgccgtgtccgcgaccgcgtaccctgacacccccgcggaattccctccgcacctccaggcgggtgcgatgcggcgccgcttttggggcgtattcaactgtctgtgcgccggcgcgttcggggccctggccgccgcctccgccaagctggccttcggcagcgaggtcgagcccggggcgctgttggtgctgctgctgcgggcgggcgggcggggcgccgctgggcggaggaggggcgctgcggggcccgcggggctcttggggtggggcgggggtgggcgcagggcgccgccgcaccctcgccggtctgtcccgccggggcccmgggccgcgggcsgcgctgcggtcagctggggtggcagagagtgtttcgcctctaatcacgccaaaccctcgtccagtgtaggtggtaagagacgtcggggactgaggcctcttcccttaccagggacctaaaaccttttctccggttgggctagttcgctctcggggaagaactacacctcctacatccaccctctacctctcattttaagtcccttgtgcctgagcatttctctccacgtgactcttaaggtgagaagcctcttgcccatccctttactccgtaattaacgggtgttgtgaccagatgaccagtctgccccactaccaggaaaattgggagtttgggatactgtaggcataagaggatactgacagagacgttctggatgttttcctgacgctgagaactcctaaacttgcatcctggcgtctgctaaggtgtatctctgcctctccctcccacgtcgtagaccagcctctgcttgctataggggtttcattgcgtctgcagcccaaggttagcctctgacctggacagtggtcactgattatttagggttaagcctatttagggctaatccagtagtagctgccatgcttcaggttagtatcccattgggtgtagttcatggggtaagtggtcgaaagtaaaatgaataactttgtatgggccgtgaagtttgttgtcaggaactagaccttcataaccctttaagcaggttgccactggcccatatgctgctttgtgtaagacaaggttgtccaactcgcggcccaacgcaaatttgcaaatttaaaacatgaatttttttgcgatttattattttttttttagctcatcatatatcattagtgttagtgtattatatgtgtgacccaagacagttcttccagtgtggcccagggaagccaaaaaattgaacaccctggtgtaagttataagcaagcacctttttctcaagacactatgtgttcagctgctgagaaaccattacaagtaataagtatatttagattccgcaccccccccccccgccgccttgtctccaggcaggtttctaactcaccaccaagcaagggggactgcatatcctttgtgtaggaggcttctaaagatcttctcttctcttgagactttctcctttaaaaaaaaagaaagaaaatacctgcaagttctccaagggatgtctgggatcactaaatagtctgaggtggtgtttccctcaggcaaggctgtgccctagttaagagcatggaggtacactgcctgcttgtgaagcctggtggctctcaccgctgtagcactttaggaaggttacttaatgcccctggctctttatctgtaaaatgaagttaaggaataaatgagaatgcttaaacacagcccaggacctaacacagagtaaaagctcaagaatacccagagggggtcagccttagtgggctgtaacttgtataggatttgggggtgggaatacagagcagacattgctaattcatgctttgcctgatctcaagaaataagaactctaccctaggcttactacctacggagtaagaactacttggccctctgggactgatcttcaagcactggtcattgtgggaccaataaggggccggtgttcagtagaaaatactggctttggattagcattttgcttcttcccaagatcatatggccagcaaggtggccaaatgagtatcttctctgaatttgctttatttgtaagatgggtctgctgcccactgagggttaagtgaagccctgtgcaggaaagctctgaggccctctgagctgtagtgggagctcagtaggagcctgggtgccagcaaccacagtcctgggtgtgctttgagggggtctgcaggttgctgcccagggtggacgtggctgcagtgacactttctcctgcaggtgagcatgggtttatgcgtcttaggcattattgtgatggcgagcaccaattctctgatgtggaccttctttagccggggcctcagtttctccatgtcttcagccattgcatctgtcacagtgactttttcaaatatcctcagctcggtgagtagcctgagggtgtggtgctcttgtcctaaatctgggttctgggtgagttgtctttggataacccctcctttcccagacaggagaaaggacaggaactgaagcagaggttgggctgtggcttgacccctggatgagtgctctattcatggagcaaatgtaattctaatcatggaagaattcttaagttagatatgagtgaagcctgacagtaaaaagcctacttgcttgctgttcctccagggtggagccctcattctgaagtcactgtgcatcctagctgtttcctagggttctgtgtactcaaggctccatggcatttagagggttgggattcccagaaacttttctgccctgtgtagtctgaggttgacaagatggagctgagcgtagtcaatcttgagttgagggagaaacaaataccatgtacctgctgtgtctacctgctggcatctgctgggtctttcttgtgtactttgctgaggtccagtgcagtgagggaggtagcctctccactcatgcaggggagattgaatagagtgacttgatgaaggtgacagctaggtttcaagcccaaggcttctggctccagacctttcctcctggcacccttagaaggaagtcagtcccaggagagtgaggttgtgcccacctgctgaagttgagtccctcacagctatctttgtctcgcaggccttcctgggctatgtgctgtatggagagtgccaggaggtcttgtggtggggaggagtgttccttattctctgcggactcaccctaatccacaggaagctcccacccacctggaagccccttccacacaagcagcagtagcaccacttggctagacggaccagctggaaagatcatgatggtggcccagccttgggatgtcatgtgggactgtrtcctagggcgatccagttgtgcagccttctgaccatcagccaagggaagcaggcctctgatggagcargctctggctctgtaaggagaggtgcagctgcagcagtgttctaccggaagtgttttgatcatctgtacagtgctttggattcttcctcccaggcctaccccagtgagccttcgcagatgctggagatcctggggttggtctgctttgtgtatggtacttgaaaccacgctgtaattattgtcctgttgccaaacaaaagccagtcatgtaactctagaagcagtgactggtggggctttctgacagttccatgctgatgtatcaggccatctgtgtcatgcttatgtattatggcaagaagaggaaaactggattaataaatacgttttttgtaagttaaaactaccaggtacggtatcttaattctttccttccctttggagtaagagggagccagagtgagctgaaatcccaatgtggaggaggcaggagagtgaggcaggtacagaagccttgtggcttcggttgctctgacacctgctagagcttgatcttgtggttacttcctgaggtcayacaggctaaggctctttgaactgcacagggtctgttcattctcctggtgctctcaaggagaaaagtttgacctccctttggagaccttgttttacttgggaaagaaagtggttcagaggtccctccattccctgccactctgttcctctagcgtttacctttagggctcttctgtcatttgcttttctttctcagattcccctttggtttttttttgttttttgtttttttgtttttttgggttttttttttttgagacagtctcgctctgtcacccaggctggagtgcagtggcgcaatctcagctcacggcaagctctgcctcccgggttcgcgccattctcctgcctcagcttcccgagtagctgggactacaggcacccgccaccatgcccagctaattttttttatttttagtagagatggggtttcaccatgttatccaggatagtctcgatctcctgacctcgtgatctgcccgcctcagcctcccaaagtgctgggattacaggcgtgagccactgcacctgrcccccttgttctttttgtatcttakaccatgtgaatgtaattcctagttcaaagtgggctgtgtgctgcctgcacactttcccagcacagagcctgaagcccggcacttacctgcctcacttctcccctggggtgtccgagggccctctcagctctcctgagtctgatctctggccccaagtcttcttcatacatttcctgcagttgagagggacctggtagccaggaggctaggagagcgaagggtcttgtccagaccctcctcctcgcccatgtagcaccttcattgctctcctcccttactgtggtcagcacaattgacagaatgagcttactaaaaccattccacggctccttctgatggggatctggccctagcccaccactccaacaagagttctcttccgcaatgactccttagtacccatctccctcatgctagccccaccatgctgagtccccccagacatctgcaggtcagccattctcaaatccaccatgtccagtcctgccaacatgttttgtacttgctcttacccttgccttgggttccctttaccttcacctctcgctggcaaactcctgctcttcaaaacccttgagctcccatgggggccaggacaaagctgtaattcacagaatgttaatcatttagctccactttgacacattgcctcccagccaacccgtgagggagttactcttgttcctgtattagaggtgaggaaactaaggcttggggaagtggaataatttgcctgacatcacacagctgaggagtgccagaaccacaatgtcagcccgatctgactgggctcagctcagtccctacctctgtcctgcttcccacaccaacacctgaaaactcagagaggccctgcagtaaggggcctgttccatactgtgactcagcatgcccaaacctcagaaccctttggtcaccagccacctaccttttcttaggggctctagtgttgatctccctgatctagtctgaccccaccattctaccagtgaagaagctgaaggatattcaaggctttccagggtgtgttcaccatatgggtcagacacccagccaaggccagacctgaaggctgctgatagctggtggtcggcctccctgggcagttagtgaaaagggcagaaagaagtccatcttggagcaagcattgtcctgagaggacctggcctcccatccagacacttgcttaatgcatagagatggttggtgttgacgtggaaccctatcactcaattcaacaaatatgcctgtatttgtacaagatgtacaagatgtatttgtagaagacgtatatttgtacaagatgtaagattttttctaagaggaagatcagtcattcttcaaaaagcaggaagatacaactctatagtcatctaaaaagttgaggaaacgttcactgtatttattttcctcatttcagaggtttattgataagaataaactatatcaatactatatcaatatttgtctttttggtgtgcatcttggatgatggattgaactttgtttgcttggagctggcaatttgacatccaggttcaaaggcctgataggtcattcctttcgtttaattttattttttaacttactctttttaaaagtgtgcaattcagtagtattttagtagattcacaaagttttcgaccattaccgctagctaattccagaacatttttatcactccaaaagaaattctcatacccattagcagtcattttgtattccatcctcccccaggcccatggcaatcaaggatccactttctgtctatagatttgcctgttgtggacatttcatataaatggattatacaacatcaatatatggccttttgggtcttttttcacctagcatagtgttttcaaggctcattcatgttgtagcatgaatcagttattcattcctttttatgactgaataatactccattgtgtggatctaccacattatgtttatacattcatcttttgatagacatttggcttgtttcccttttctattctattctaattttctattagaataatgctgctttgaacaattgtgtacacgtttttgtgtgaacatgttttcaattctattgggtatatacctaggaatggaattgctgatataactatgatacaatatgagataacatgtacagaggagaggtcatttgaggacatagcaagaaggagagaaggcaagccaggaaaagggccctcatcagaacctgaatttgccagcacattgatcatggacttcccagcctgcagaactgtgagaaaataaatatctgttgtttaggtcatgcagtctgtggtatttgttatggcggcatgagctgactgatacaacccaaatggccatccatattcatctatggaatactactcttcagtaaaaaggaagagagtattgatacatgctatcacaaggagaatcataaaataattatgctaagtgaaagaagccagacccaaaaagaatatataccatatagttccatttatatgtaattaaaaagaaaaaaaggcaaaacttcagtgacagaaggcagatcagtggttgcttagggctgggaatcagggcaagaaggaactttttaggatgatggctcttttctacatcttgatcatagtggtcattacacaactgtataaaactaacattctatacttaaagtgggtgaattttattggatataaactatacctcaataaagctagggggaactcagtaagatgccattgatgccatttcatacaagattggcaaaagttacaaagttgaacaagcaaggccaatgttgtggatcactgtgaattcccatgtgctactgctggaagtataaattagtataaccctctggaaacattttactatcatctgacaaaacagaagatgtgcctactgtttgagccagcaattccagtcctggaaactctcacttgtgcacaaggagacatgaacacacatgcttgttgcagcagtgtttataactgagaaaaatgtaaaacaatctaatatcaatgggagaatagagaagttatagcatacagtgtattgaacactatacagtggtgacaagcatgaattacatggaaaaattacatgaaaaaatctcaaaatcataatgtagagtgaaaaaaagtagaagggagtgttaagtatgataattttacaaaaaaatttaaaaccttcaatactacttattattttagatatycacgtttagtaagtatttttaaatatgcaagggaacttaaataccaaactcagagtggtggttactttggggagggaggaaaggaaattggggttgggaagggatatataaggggctgagagcttcagttataacccataagttttatttcttgaacttgatgagggagatgtaagttttcattgctgtttttttttgaatttttgtaaggtttcataaatgtttttagacaatacttcactgataaatgggaacgatcacatttaacaatcattagacatacaaatcttactgctgttgtttagcaagaaaaccccaagatcgtctttgctagccgatgtgtgctctgggctctttgggcctggataaggaatagcagggcccagcccagagtctggaggtgtggtgaatcagataggttagggtgggaggtgagacagaccatgttggttccagtggaattggctccagggctggactgggcagataattattactccaaattccagagccatccagttcctttgggaaacaagggcttggagggctcagatttcccccaaatccactcaacttgtcatagattgagctgagatgggaccccagatagcctggctgagagcctgtcttgtctgtactgcttcygtgttcccttgctggtcttcaatagggtccccaaagttcttcttgcctggaggcctgcagcagtgagtcctgactgtcaccagcatggtccctcacagggtagcccctcaccagagtttaaaagtcagtcccctatgcagttagacctaatgctacaccagggggaaaattcaaaagaaaaaaatacacaatttaggcaacagggttcctagctgcattactgctagcagcagttagttgcctgatagttgagaaatggttaggcaaatatggtagaatatcacgtgcccacgaacaggggtgagcatttgaaataggcggatcctagacagtgtccacaaggcagcctgccaggcatggcctgaagtgccaggtttgctccatgcagtgtaaacacatttgtgtacaatggcaagcgctaggagtggcttaaaaagaggtgacttyggggtttattggattcttttatttttctcctataaagttgtttacatatataataggagtcagatgagagatgaatttatagtttcagatataagaagaaaagattttgctcccacaaatctgtggatgcgtatttactaactcctccctgtctccacacaaaaaaagggggcggggatgcatcaggatgcctatctttatgatttagctccgagcttagcaccatgaacagcagctgtggtgcctagagtccracagggcctcagttgttctttcatcctcagaattggggggtggatgcagaggtgggtcagggattaggcttgaatccccaaaaccaatgtgtattgggctttccttccaaaagggactcccagcatgcgttgggagaagaggacacagcctcccctgacctctgcaggaggcacctgccccacaggcacaggcatggggccgctcccaggcttccacctgagcaccctgtcctgtttgcttatttgttcatttattcatgcattccctcatctgctgagcactctgtgccatgctatgggctagggacacaaaatgagaagattccattcctggctaaggtcctctatgaacttcatcttgaaacgtgtcttctgttccccaccttacctggtggttttcaggctcttcttgcctgatttttccttttctccctcctccccagctccatcatctgtggattaatgtgaagtgtagaccatgccaacttttctgggacagcacattcagagcctcctgtcccatggtggggcctgtgtctggtcctcttggagagcagagagcagagggtcttgagtgggctgcctctgatcccaatatgcctggagttggccaccaggtgctagtgcaatacagtggctgcagttcagcagctggtgggggagggggatgctgatggccccagtggcctgtgactagaccatggtgtcagctgtggccccagacaggaaacatgagaaaagatgatcctttgggaccagctgacagataaaatgccacatgcacaaggaactaaataagggccgactctgctgaggcccggaagttctgctgcaggaagagggaagggaggctcacggggatcctctcctgatgcccaggtggctgcctctctctaggctgcactttttccagctgtgaaatgaggttgttgggatggggggggtcctttgtaaggtccgcggtgtaactcatttcttgcagagaattttgaatgcctttgcctcttcacagcatcctgcttcagacacttgacctgtggcgtgggtgttatyatttcccacctcccagatgaagaaacagaggcacagagaagtaacttcccaaggtcacacagtggatctgtagaggacccaggatgtaggcccagttctgtctgacccaaagtctatttcttttagacacttttatactcactctggtaccctggattctctggcctggaaggcactggcgaaagctcatcttgcacaagccccttatttgtcaaaratgatgaaagaagctcagagaggtgaagcaactaaaacccggaccctctcacccctaggccaggacttttatttagaggctttttccatttaagtagtgaatttattcttaaataggtaattcatgcacatggtgctaaattctgatgatgtaaaaggaaatacagagaaaagcaagcatccttctcccactcctgagcctgtaatcatagggcctagggcttctctgcagacagaacccagccaagacttttcgtaaatgccatgtgcacttcagggcttggtttgttctattatatttagggatgcggtgctgagatgcttgcctgcagaacagcaaaaacctctgacttcattattgttattcagagtaaccagggtcattgctctctggcttgccttaaagccagcaaaggcaattgcccatccctgggcttttggtctggaagagaccgttggcatcattattcagccccctcacttttcaggtaaggagctaatgaagacaacattcccagtgacacacggcaagttactgtggtgttggggtttcagtgtcaggagtctcctctcttcctctggcatttctgctactatgccaggctggctcctttcagtagacataacatcattgaaaaataccacaagtgcccctgtggagagcagagcagatagccattaaaattacaaaagcttatgctttttggcccaacatttccacttcaaggcattcaattcttcctatagatacactcatgtgagggtaaaatgatctctgtataaccttattctttgcaacactgattgtaataaggaaatattggaagcaacccagatgcctatgggtgggaggtgagttacataaattagggaccatccacacaaacagaatatgtgcagctgtgaaaagactgggccacctctccatgtgcaataggaacagctccatcttgccaggcgtggtggctcacacctgtaatcccagtactttgggaggtgaaggtggggcggatcccttgagcctaggcattccagaccagcctgggcaatgcagtgatatgctctcattgtgtaaataaaacaaaataatacattatttgctttgcagatgccactgccgccaggagccctgtaacatcagccatcgtcaaccccaccgtgttcttcaacatcaccgttgacggcaagcctttagacctgcgtctccttcaagctgtttgcagacaaggttccaaagccagcagaaaacttttgtrytctgagcactggagagaaaggatttggttataagagttcctgctttcacagaattattccagggtttatgtgtcagggtggtgacttcatacgccataatggcactggtggcaagtccatctatggggagaaatttgatgatgagaacttcatcctaaagcatacaggtcctggcatgttgtccatggcaaatgctggacccaatacaaatggttcccagtttttaatctgcactgccaagactgagtggttggatggcaagcttgtggtctttggcaagstgaaggcatgaatattgtggaggccatggagtgctttgtgtccaggaatggcaagaccggccagaagatcaccattgctgactgtggacagctcttataagtttgacttgtgttttatcttaaccaccagaccattccttctgtagctcaggggagcaccctccaccccatttgctcccagtatcctagaatctttgtgctctcgctgcggttccctttgggttccatgttttccttgttcccttccatgcctagctggattgcagagttaagtttatgattatgaaataaaaactaaataacaaaataataataatagtacattatttgcttctcagtgcatacaacatctctggaaagatctaaaagaaactggtagtaggattcaacaaggtggacagggggcatttttttccattttgaaccatgtggatgcattatatattcaaaatgtaaaacaaaaaactcacaagcatctcttactttttcaacttgaagaaaagagaagaagaagaaaaccctaaagtcagtaaaggttagcctgggttcctagacttaagcttgatagtaaccagaatgtcaggccacatgtggtgtaggtcatagggtcctggcttttggtcacccactgttaggctcatataacagacaaggaggtgccattgtccgttgtctgtcccttttacatcagctcatcttggctcctgatttcctgggtctgatatggaagattccgggattttattatttctaatcaacatcgccttcccaaaccccgccccttggcagccatagcaaggccacatctagcccaggatcacataaaaagggctgtttcctcccctgaggaccgactgtgtggaagcaccaggcatcagagatagagtcttccctggcattgcaggagagaatctgaagggatgatggatgcatcaaaaggtgagtgggtgaaatctccatggagccccacatgccccttcagccagctggccctaaactgctctcttgcctctgccgggtgcctggggccattgccctctcaccctgacttgtggccctggtgctgcttgctttctgtctcatccctttttagaaaacccacaaacttttcatttaggcataatttcagatttacaaaaagattgcaagaataaaaagaagaatttccatatatcctttatccagattccctaaattattactgcatttgctttatccttctcgatcagtggacagatagatgatatagacagatagatagacaaatatatattttttgaactcttgagagtaagttgcagatattacattattaaatattttggtgtgtatttcctaaagacaaggacattctcttacgtaaccaatacaattatgaagaccaggacatgaacaccatttcaatactgttatccaacccacagattttatgcagatttcatcaactgtcccaataatgtcatttatagcagaagaaaatcctgggttaggctttgcattccgttgttgtgcctcttcggtctcctttgtctggaatagttcttctgtcattcttggagttttgtgacttcaacacttttgaagagtacagaccagttattttgtagaatgtctctcaatgtgtcctgtcctttctcaaggtcacctgatggatttccctactgcagagggtctgtctgctgctgtcagcagtgtcattgcttctcagagtggggaatagcagagcggagtcatgtgccaggctctgtgtcccatgaggatgcagccgcctaccaccaccaagagcagacaccagagccctcagttttacttcagggagtccgggtgctgctagggaacaacgaggctgggtttgaacccctctgctgactccccagcccacaagccctctgtaacctcccagcagggtttgctcagcagccttctctcttgcttgagaagctgcttgataagccaaggaatggctgctttgaaactctgcaaagggactaagccagaccctcctagtttccaccttcttttttggagggtgacattgcgaaataaatcagactcttctttttagtcccaaggccacagagttttgaattcctccttagatggctgacgcctcagctagactcagtcttggagggtacagagtccttaggactgagaaagggtggtgtggtgtgatgggaagcacctgctgatttgagagaagattcatgtctaaatagccctgtggctttgggcaggttacatcaatcccgtgaaagcactatataaattactgaggactacctgaaggaaaggtagtcctgacccacactgtcattttcaagaggtgtgacctgttcactggggaggtttgatgacttgactgaggtcccagccatgggtggcagagctgggacacaaacccggcgtgtgttcatttcatgccacactatgctgcctccctgctgggcacaatttgactttactctcaaggtctaaatcaccaaagacagtcatctcctggccaccagtgttggggtgttggtgaggggagctgacgctccctgaggtgtcctttctgatgggcttgtgcaagtaaccatcacatgccaccttacaacattagcaagttgtgatgactccatggtgttttcatgaatatgatttcatttgttcttccaaccactctaggaggtcaggacatccaaatagggacctggaagatggtgatatgtgtgggataaaggtaggatttcatataaatggaggaaatgagaaattgtgcactttatggtattaggacaactggttagtatttagagaaaaacaaagccagatatctatctcatggcttatcccacaacgaatcccagaaaggtcgaagacgaaactgtaaaggcaatagaagaaaatgaaggcaatatgaaaaataatcttagagtagagaaggtgttacaaaggaaaatagaaaacctagaaacataaaggaaaagaacagtaaaactgactccagaaaaattaaaaatatgtgtaagacaaaacctccagagtcagaaggtaatggaactgtgaagggtactttcaacacatatgagaagcaaatgctgttctgtagtataaaaagagctctcagatctataagaaaatgaccaacatcccaaaatatacatggacaaagagcagtattaggtagttcaaagaaaaagaaatataaattgtaatatatgaaaagatgctcaaccttacttgtaacgagggtggtcatgaaataaaactgaaacagcaggccaggtatggtggttcatgcctataatccccaaaatttgggaggctgaggtaggaggattgcttgagcccaggagttcgagaccagcctggaaaacatagtgagaccctgtctccacaaaacaatttaaaaattagccgtggcccagcaaggtggctcatgcctgtaatcccagcactttgggaagccaaggtgggcagatcacttgagatcagaagttagggacaagcctggccatcatggtgaaaccccgtctctactaaaaaatacaaaaattagccgggtgtggtggggtacaccggtaatcccagctacttgggtgactgaggcatgagaattgcttgaacctgggaggcggaggctgcagtgagctgagactgcactccagtctgggcaacagagcgagactttgtctcaaaaataaataaataaataaaaataaaaattagccagacatggtggtgcatatcggtagttccagctactcagctactcaggttcaaggctgcagtgagccatgattgcaacactgcacttcagcctgggtgacaggccaagactctgtctcttaaaaaaaaaaaaggttatataaaagcaaaacagcaatgagatttcattttttcatttatcagattagccaagattaaaagtttaatagtaaatagctttaaaaaggcatcttctcatctttttgtaggagtatcactggtgcagtcgctagaaggctctctggcaacatttgctgaaattaaagatgcccatatcctgtgacacagcaattctgctttggaagatttctcttacaaatattgtcacacatgagtgcaaagatacatgtacaaggaagtacattgtagcatataagattttaaatggtctacatgtccatccagggggataatagctactaaaaagtaacaaggttgagaccagcctgggcaacataaggagaccccttcttcacaaaaaatgaaaaaattagctgggtgtggtgatgcatgcctgtagtgccagctactcaggaggatgaggtgagaggattgcttcagcccaggaggtcgaggctgcagtgagctgtgatcacaccattgcactccagcctgggaaacagaatgagactctgtctcaaaaaaagaaaaaaaaattaaaagaaaataataacaagatctacttgggtggttaggagataaatttcaagacatgtgtgtgagagagagagggagaaaaagagagagagagagagaagcaaggcgcagaatagtgtattgagaaagctcctgtttctgtaactaaagtaatggtttatggcagagaaaactggaaagatacctagatactttatagtgattttctctggagaaaggatctgggagtctgggatgggagagaaacttaatttttgtaatgggcatttattacttttgttttattattattattattattattattattattattattattattattatttgagatgaggtctcactctgtcacccaggctggagcacagtgacgtgatctcggttcactgcagcctccagttcccaggttcaagcgattctcctacctcagcctcctgaatagctgggattacaggcatgcgccacattacccagctaattttttatttttagtagagatggggtttcaccatgttggccaggctggtcatgaactcctggcctcaagtgatccgcctgtcctggcctcccaaaatgctgggattacaggcgtgagccgctgcgcctggcctcttctttatcctatttgtgattctttgtggttcctaaataagaggattcatgtctctcattcattttggaaagttttcaaccatcacctcttcgctgctgctccccattcttgattctctcctttcagaacaactatagtatatagtttagcccttttcatccaagactccgcgtctctaaactgcttttcatatttacttctattaatatttctctaggttgtattataggtatttgtttccagtctattttctagttcactgattctctttcagttatgtctatttgctgtttaacctgtgagtttttttcattttgagaaccatattttcatttttagaagttatgttttaaaaaatttatctggtcattcttaatagtggcttattcctttctcatcattctgatttattctcttaggtccctagccatttttgacttggctattttatggtctctctctctctctctctctctctatatatatatatatatatatatatagtttatttaatttaattaatttatttatttatttttgagatggagtttcactcttattgcccaggctagagtgccatggcgtgatctcggctcactgcaacctctgcctccccggttcaagcaattcttctgcctcagcctctcgagtagctgggattacaggcatgtgccaccaagcctggctaatttttttttttttttttgagacagagtctcactctgtcgcccaggctggagtgcagtggcgcaatctcggctcactgcaagctctgcctcccaggttcacgccattctcccgactcagcctcccaagtagctgggactacaggcgcctgccaccacatccggctaattttgattttgtatttttagtagagacggggtttcaccgtgttggtcaggctggtctcgaactcctgacctcaggtgatctgcccacttctgcctcccaaagtgctgggattacaggcatgagccactgtgcccggccctatattttttaatattttattttatttattattttttgaaataaggtctcaccctgtcacccaggctgtagtgtagtggtgtgaacatggctcactgcagccttgacctcccaggcccaagagatactcttgcctcagcctcccaagtagctgagactgcatgtgcacatcaccattctcagttaattaaataatttttttttaaagacagggtttctctatgttgcccaggctgatcttgaactcctgggctcaagggatccccctgcctcagcctcccaaagtgttgggatcata

SEQ ID NO: 96535 - DNA, 73606 bp, Homo sapiens
ctcaggtccgggtgcactgccagcagctgtttgtgtacttacagccccctgggtgcagacggacccccagctgccagccatatgccttatgtttcattgtcccacagctttcaaagaaaacaagtcttttaattcagcaagtattcactgaatgtctgacacccccagtgcagaccctgtcccaatcccccaatggggtccacctctatccaactctgggtgaatgaccatggtgctcttgcgcgcgggcacacacacacacacacacacacacacacacacacacacacaggcacacacacataactcaggcttggggcccacctctctgggctcagaggtatcaaagcaggggcattcctatcttaaggacttcttgtcttaggggctttggccccacctgcacaggacagaaaattagtggatttctaggagaaagcaggctatggcagggtatagccagggactcagctcttccttccagacatgcaggaaccataaggagggatggtcaaacagggcctgcttaggcctcttgctgggatcactccaagggtctctggggtcactcagaggagccgggaggctgcctgctgctgtacactgagacagactcctggggtgtttggatcacggcagcccacatgctgcctttttgttatcttttctgttttgcctcttccgggctgtacttgtcttgagtttttggccttatgacatccatattaaatggggtagggcagagcattgctcagtaaacagcaagaatggccctgggcatggccaaggcagttctgctaagtgtgaaagggaatgtgcctgccatactttgtgctttaggcccaagtgacctaggggccagcctgcctactggcctcactcccaacattacaggtgtttgactctactccaccccgtggagagacggagcacaggagccacccaccggggaccacataaggtcatgcacacccacagagtgcccagtccctgcctggccttgtccccattttccctccacctagggttggggtgacaatggaggtaactagaagacagatcaaaaggttcttggtcttgacacagatgcaagaaggaggcagataatagacacctcccttccccctcgcccacataggctccggtgggttctcagggcaaggcctggctccctcctctccgacttcaggtacaggtgagtgtggagggaactgaaagaggaaaggtgaagtgctgtttggcttcgacctggagggggacagaaggctctctgggcaggcagggccggtcttttggcaagaggcgcgctctctctcccttccccttccatcgagggctgggtgtgaaggtgagagcaatcagaaaagaaggtgaagaggtacttggccttgacacggacggggggggcggtcccaggccgaggccgccccgcccccgccccgctatacccggcgccgcctcccggcgtctgagctgacacctccttagcgctggccgcgggccgcctctgcggcagcgctagtcgccttctccgaatcggctccgcacaggtaagatcaggggacccggcgcctgagctgccgaggaaggagtcgggggtgctgcgtgagactgagagttgggaggcaaagaaacaaaatcggatttcctcagagggccagaggaagagactgaaacacggtagccccaaatccttgggcggctgggaggtggtccctgtcatgcccacgacgggtgggcgcgtctttaccgacagcctgcatggatccgcagatgtgctgggcgcttagatgcctgcggctatgcagagacgcagtccagagaggtgaccccagatcctggtgggggctggatcccagggccccgacatccctttgcaatttccagccagcagctaaagactcccttcccggggctttagagaggctccaggctcgcgatccatgaacacacaaaaaccttccttgctcatgttctgaaaaaaagccccgcctcagctttgtgaatgttaataatagggggaagatttgttctctcttgggtgtgtgtacaggtggaacaatctgcagaaaaagaccttttttcggaaaaccttttcagtttgaagtttcagcaaatccatttttcatttccttgcatttggggagatgacatgaaatttaagctccagctttggggctgtctctgaagttctggggttcggcttacctttcccgggatgaggttttgatttggaggaagtaaaatgggttttgtcttaacctgggctcgttctttaaacttgtgaggccggggcggtggacttactgacatcctgtattctctcacctgcagctaggagaaaagatgttcactgtgctgacccgccaaccatgtgagcaagcaggttagtatctctcagcaggtagcaagcgtggttttgccaaatcgcaagagaaccccagcttcggcctacagtttttcatccatatcccctgcaaatgattgtttaactttattggtttgagactcagtactcagctgggtttcaacaccggcattcctcaaataaaagtaatgcttttcatcaaagccacacaaaacaaggactaacatgcatgtttcacttaaatggtttttccggtttgtataatccattaatttggcccttgtggtttcccttagctagctgtgtgtaacgtttgctttagaatactgtattgttgattttgtgatcaattgtacagtacttggatctttcctgtattcccatccaaatgttgctggcacagtgcctacaacacccccacccctcactgtgagtcagtgttgttatggttgatactgcaggcacaagtgcaggattttctcacactggaaggcacacacacacagacacacacacacacacacacacacacacacacacacacacttctaagcttgccccgcctgcctctagagcactttttggagttgctcatgtggaagcccagaaggctctggcttctccaagctcaggtaggtaccttgcaattaccatgtttgtccagccctaatgacagcacagctctaggctgcatttcctaaatgagtaagacctggtctcatccattttgctttgtaataagcttttctgcaaggacaagagtttgcttaaggtaatcatagctttttacttgaaaactgctgaaacacagaagacttaggaggccagccacgtagctgtggtcaggaaactgcatacatatcacacactcctcccccatggatagacattctttagtcatgcccctaaattgggtattcttgtcttccaaaaggatatgattttaggatagtaagggcaatctatatgaacttttatttttgtaaagggacattgcacttgaggagctgttttcctttgatctttaggttttcccccaaaacactttgaaatgttaacacagattgtaacgtcactcatacagactaacctgttacattccttccaaaggacaagtttaacttggcagattaaatttctaccccattttgttagagggaaaaaatcccttaaacttctataactaacactgacaaatgcattctttgaaagctaatgcaaaagtttgcctctgtggattaactggttcctgtacttttatttggaatcacagaaaagtgatacaggacctctttacatgctctgcaggtcaactccatggcagttggctctcctttccattgctattacccacaattctgtaatgagtaaccttgtgtctaagtcattttacacatgtggagctagttctgtgggataacttcccaaaagagtgattgtgagtcagatggcatgcttatttgcagttttcataaatattgacaagttgccctccattgatgctgtaccagtttacactttcaatgacaaggtaggaggattaaggtgttaagtgaccaactttgacaccaagaagtgtctgtgactgcagctacactgcaggggaatcagttgagatggaaagagttagctgttctgagccatgaagacctactgcgtgactgccctcctgtagcaaatgttgtgatgtgactgaatttgggggctgaatctaattatatcgtgggcgcatagacatgccctgttattcttctgggaaaatggcttacagaaataatggaggggtaaagcataggttataatgatctaggaataatgttctggaataagacaggatctatccaattgctgttcaattgatcttcctataatgatgaaaatgttatatggctgcactgtccaatatagtagccactagcccacatgtggttattgaacactggaaatgtggctagtaagattgagagactgcatttttttattttaattaatttacatttagatagccaattgattagatatatattggaattcgatgaatctagtgatctttctattagtgttcatcatatttcaaccatttggttgtcatttatgttgatgtcccaatagttttaccaagactattattattatttttttagagacaaggtctcactctgtcaccaggctggagtatagcggcacagctcactgcagccttgagctcctgggatcaaaggatcctccaacttcaacctcctgagtagcttgggctacaggtgtgcaccacatgtacagttgatttttttcattttttgtagagacggggtctcactatgtggctcaggctggcatctaacgcctggcctcaagcatcttcccatctcagcctcccaaagctgggattacaggcataagccactatacccagcccaagattattatttagtcagtattttcattgaatgtctttttatctttttaaaaaattaggtataacttctattcagtgaaatggatagatcttaagtcgtgcccctaagttgggtgttcttgccttctaaaagtatgtttttagaatagtaagggcaatttataagtttataatgtttttttaaaaggaaattatacctaagacactgatttgctttcattttcaagttttctccaaaggactttgaaaggtttgatgagttttgacaaatgcacacatccatatactccacactctgtatagcgcattgccattaccccaagaaagtgcccacatattccttctcagtgaatccctgccccaacttctgccccctggcaatcactattctgattcctgttaccttcctacttttgaacttcaaataaatgaaatcatttcagtatagtatagtactaatttttttatttttattttattttattgagacaaggtcttattctgtcacccaggctggtgtgtagtagtttgatctcaactcattgcaacctccacctcctggcttcaagcaattctcccacctcagtctcccgagtagctgggactacaggcgcatatgatcacacctggctaatttttgtatttcttggtagagacatggtttcaccatattggccaggctggtcttgaactcctgacctcaagtgatccacccacttcggcctcccaaagtgctgggattacaggggtcagccatctgcccagcctaatttctttttctttaactgagattatttttaaatgaaatattctatgagattatttttaagtgaaatattctatcacctggtttaattttttaaaaatagattttttgaatctccattaaaactaatgttagctgggcgtggtggctcacacctgtaatcccagcactttgggagaccgagacaggcagatcacttgagcccaggagttcgagaccagcctggccaacatggtgaaaccctgtctctattaaaaatacaaaaattggctgccgtggtagcaggcacctgtaatctcagctattcaggaggcagaggcagaagaatcgcttgaacctgggagttggaagctgcagtgagccaagatcacggcacagcactctaacctgggcgatagagtgagactccatctcaaaaaaaaaaaaaaagaaaagaaaaagaaaaaagtaaaacaaatgttattgtaattcatctcagggataaccaaaatatcagaaaactagaccatgcataccctccctgcaacactgttttagtacacaatttgtgaggaagggcaaataggtattgtttgtgcttccccaaaactggggagaaggggagcttatttgctactccatcttagaagtgtgggtctcgctaacaccagagaaggtggtttatgcacctgattatggggccagtccatcaattctacaaagaataccagtgcctggtttttacctccccctcaagtgtcttctgggtcttctcattttaggcctcaaggccctctaccgaactccaaccatcattgccttggtggtcttgcttgtgagtattgtggtacttgtgagtatcactgtcatccagatccacaagcaagaggtcctccctccaggactgaaggtaagtgtgaagggactggcaacaaagggaagaaatgakcataaaggggaagaaatcaattattccaaaaccatgagttagaagagcagaaaatcctttccccccatctctggctgaagccaggagaagttagtgtaagacgcaagggagaaggtctggacatgctgggtttgtgatatttgaggctacaaattgagggtagtgactgacaccttctccaaggactgtgtagtcttgctttgacttctgacttcaaagctaaaatttgtaaccaagagttgcagatagctatcaaagatttaccagttcagccaggtgcggtggctcacgcctgtaaggcactttgggaggctgaggcaggtggattgcttgagtccacgagttcgagactagcttgggcaacatggtgaaacccatctctatcaaaaaaaaaaaaaaaaaatttaccggttagtgcactttccattttgaccagtttatctgttctcccaaccacacaaccctgataatgagtaaagaccgaggctgagcacagtggctcatgtctgtaattccagcacttcgagaggccgaggaagaaggattgcttgagcccaggagttcaagaccaacctgggcaatatagagagactccatctctaccaaaaagaaatttttccaaaaaaaggaaaaaagaagtcaagaccaggagacccaggcacctcttctagcctaggctgagtgaacaaaaaatcaagaacttgagaaggtctccttgagctctatttgtgctgctactcttgagtctagaacatgtgctgtgttccttccaacacttccctcaacaacacccccccggcaaaaaaaaaaaaaaaattactcaggaccttgtgcttagtcccagaggcccctcttagttctcaacaagtccatccccaaatgatctttaggctcagaatcataatatatccccaggcttggctctgagggtgcccttggagacaggaggtgattccatgagaggctgacaagggaaagatgaagcaagttgatgagtccttcaatcattttgggtaggggtcagcaaacatttctcataaagggtcaaatagtatatattttaggctttgaggtccatttatagtctctgttttataactcttctttgttttttgactcattaagaatgtacaaacccttcttagctgtgccatagggaccaggtaattcagccatgttctttgaatctcatttaacatttacacttgacctcacaagtcttttccatatcttcctgctgttagtgactattcaaaggtaatatttgaaatacatagacatttttaaaagaaaagaaactaatattgttttggactctaaggatgggtttgagctaacattctaaggcagcttttctaaaagattagagtaaaatctccattagataatataatagcatttggttccttgataggatattttatttaagaatctcagccctcatgaataatgtgaattaaaaattaaaaaaaaaccttatgcaatcacccaataatgagaagaaagcaaattacccagttgtccaaagatattagctgaggcctaaaagaaggtgttttcccaagctccaggcactgccttctacaaactactgtatataaaattgggactttgggaggccgaggcrggcggatcacgaggtcaggagattgagaccgtcctggctaacgtggtgaaaccccatctctactaaaaatacaaaaaattagctgggcktggtggtgggcgcctgtagtcccagctagctactcaggaggctgaggcaggagaatggcgtgaacccgggaggtggaggttgcagtgagctgagatagtgccaactgcattccagcctgggcaacagagcgagactctgtctcaaaaaaaaaaaaaaaaaaaaaaaaaaggaactgcaactaagagtaatatattttttattttttattttattgttattattttgtgagacggagtcgtgctccgtcacctaggctggaatgcagtggcatgatcttggctcgccccaacctctgcctccacagttcaagtgattctactgcctcagcctcccaagtagctaggatcacaggtgcccaccaccatgcccagctaattttttcttgctgtatttttagtacagatagggtttcaccgtgttgaccaggctagtcttgaactcctgacctcaggtgatccacccacctcagcctcccagagtggtgggattataagcatgagccaccgtgcccagccgcaactaagagtaatatctctttacactttgtatagtgctattcagttaagtcagcgcttttccctcattacatcacttagttcttatgccaaccatagaaggtggacaaagcgagcaccatgactgccattttgaaagtgagaaaatacaggtttggtcagtgaatgacaggtccagaactgaaacctggtcccttctgttcccaaggccagggctctcttcactgcctcccacttctccctgaccctgagttctgaatggagatcccaaatggagggaagggattggcctcagataagagaacacttcctgctttgcacaggatggaaaggtagggaggatgcatgcagatgtgggaaggtttgttgaattgaaggagaggagttaagcctagtaccacccttagaccctgatagctgggctgcctgccctgggccccacatttcagaaggaccagctctagttgcacttcaggcttatctctctctatgacccaaacgaatgtgtttacccagagcccatgtttccccttctagaacacactgtggtgcccaagacttcagaatctagggtcttcgtggacctccagaaggtggacatcaccaatggtctgaggggtggccaagaggcagctgcttacagggagtgtaaacagagcatagctgtgtggtctgaactgtccacacacaggtgcatgggctctttattctgtgagaacaggtttgggaaagggacagggcagaagcctctattcataaaattttgtctctaatcctacaaatgttagaaatgggctggttaaggcagttgccagctgatggcttctacttgttctggacagtaacaggcaagtcctctgttcaaaatggagagacatggaggaatcagatggaagactagtaaaatgagtagataaaaatagatccctgggcagtctagagggcactgttgaaggagaaaaccacacatgttgaatgctactgtcttaggttgggctctccaagtcaaagacatacrtgcaagtagatcatctggggatgatcccaggaaacactggtgagggactagggaactgagatgggtsaggcagccaagagagggcctgctatgcagcaggtcggcactgtgggcaactgggactcagtcctgcttgagaccctgtgagctggtacagagaactcaaagttgtcccatatcaaggggcatacaggcatgtgcctcccagatatcccagtcaagggcatatttattcaccagcttccatcagtcattagctgagaggctgctccctggatgttaactctctagtccttctggcatattttgtgatcaggtagactcgggccactagttaagccttcaggcaggtggaagatggatrgttctacatcacagtagtaaggcctgaggggatgtgggcagagaattgtcagtgactactccatgtaaataatattgttattatccctgtattgcagatgagaaaacaggaaaagaaagggcaaatagcttcccatagttacacagattgaaaatagcagaactggtgtaaaggaaagaaaagagaacagacaacagtggccttaaacaagggtttggaggaaccaggagacacaccctccaccaatcagcaggcagttcaaagaggggattttaaatctcttctgaatcttggtaacagaccctagccaycattgcaagggacaggaaattgtaaaacacaggaagatgagctcggaaggtccattctgcttaattgggtggattaaatgtgagaaaagacagatgttctgggccagttgaaccagaaacggaatgacagctttggaagagagtgttccacatgcagtttttctcaggatatggagagatctctctttttttgttttgaagaggattgcaggtgatgaagttgagcaaatatgagggattttaaattatttgttatgtttatttttttataccatgagccctgttttgctttcgtgtgcagctgacagttggttctaaagggccagctctacaacagcctgtctggagggctctgaaatgttacagaggactctcatgcaaggtcgtatctggctattaaatctaaccttggcttgcctaaccctggtttatgtgaggttatggtcagaactattaaaatgcagtcaaggggcgaaaatgtctgagtctcttgtgttactggtctgacttgctccacaagcttgaagagtaaacatgatgccatcacttgtaattttcactcggcccccagtcccccgctttatcatcatgaagtccaataccttcctcttgaggcttcaccctccctacccctaatcataaccatccaagaactttagagcttctcagtccaatgatcaatactattgtactgcctcttgcagccatgtgatgtcactgttgaagatgggttctgcacagtctaaaggttttaaggatgggcttttccactgtgacctgctcagcccacattagttccccatactgggtccaagatcataagccattttagtctacactcccatgctcagccattactctccaaagcaaaaccactggcccagtctgtgttgaaatcattcccttttaaccctcattgagccttgctcatcagcctggatttctggtgccttgtagcccaccctggtctacttcttggagagtaagagttggataattagtttctttttttttttttttttttttttcagaaagcctcggtctccttatgcaaatgggtcctctcctccagccagatctgcacaccccttaactaagactttactttcaagggactttttgtttaaataagaaagtctgcaatgcacctgattactgaacagtcatgccattacacttggtttccttggagctcagtgaaaacatcatggctatgattactgaacagtcatgccattacacttggtttccttggagctcagtgaaaacatcatggctatgagtacaggttttagagtccgttagactcaggcttgatcccaggtctgtgatcttgggcatttacttactactgtaagcctcggtttgcccatgtgtcgaatggtatgatatgatatgatatgatatgataacatatgtcttatacaggcaataacacaaagcactttctgcagtgcctagaataagtgcaggacaaggcttattactactactatttattatcatagtaataatgataataataataaacaaatctaagaaagttgaccttatgcttctgctttcgctattgctttagacagatcacacaatccttaagtgttggaccaaggagactggccctttcagttaacattaattgcattcactgttagatacagagtaatttaaccagtttccttattctatacatttctaaactgaaagactgcttcctttcagttaatccactgtgtcttcagatccacatttgagccatggttttttctgacactgcattagacagaggattacttactactttttatccgaacatcaccttgccagctgaactgaaattcattcccatcccctctcccccaaaagaatcacactgagtttcactgtttaggcaaaagagctctgaaaactggttaaagaccatttttcccacttttgaaaatgtcagtgaatgatggtagggctagatccgtgtgagtcggtagaggtgggcctatatcagcaggtgccggagggacagccatttctccagtctcacagagcaaagtctggctgctgcagaccctggtgaaagctggatcccagttggagttacaaatgagaatggatactcttctctctgatcttggcccagcagccctgagcttcagaaacacaggaaaaacatgcaccctttttgaagggttggaataaagatttgaggaaaggaaggtgacagtttttctcctattctctctctcctcttgttttatggttcagcaccaggcgtggcagggcgggctggagtggtggtgatcaggtcaggagcaggggggaggaaagaaagcagaccaagaatatagaggcctggacctctttagtttagtgcctggtttccttcttgccttcagtttcaacctgtactttaatctccctgtgagtcgctgcctgtgacagattatgaacaatgccacccttgttccccatgagggatgtcaggtcaggatcctgatcaacattcatcatactgaagggctgagattaagaggctgtccaagttcacataccagtgaacacagatgttctatttcaaaataatggagaggctatgattcaggagctggagcaactttttaaaaatatggtcccatttcaaacaaaacaagcatttgtaatatagataataaaaagttggaaacctcctaaatgtataggatcaggaaattggttaaattactctgtacctaaaagtgaatacaatgaatgtatgaaaatggtgatatcaatctgtttctactgtcaggaagacatgttcatgatatacttttaagaaaagagcattgcatggccagatgcggtagctcatccctgtaataccagcagcattttgggaggcggaggtgggtgaatcacttgagcccaggagttcgagaccaggctgggaaacatggcgaaaccctgtctttacaaaaaatataaaaattagccaggtgtgatggtgcacacctgtaatcccagctactcgaaaagctggggctgagaatcgattgagcctgagaagttgaggctgcagtgagtcgttggtggcaccactgcatatatacaatgatatatgtatatatccagatacatatatacatatattgttagaaaagatacaacaagggctaacgcaatagttggatttgagggatgctttgttttcttttctgtttttcttgttttgtgattttatttgtttcttttgcttgactggcttttctatatatgctaatagcctgtatttacgagtagccattaagcattaggcatatagccttctatttacttctgcaagtaagtcctctaaagatgagggaacccagaaaggttaggcaacttacccagtccagcatcataaaatcgagaatccatctgagtcagcttgcctccagacccaacttcatcatcttctgtgggacaggctaggttaacccaaaggtggtgcggtgggagacttcaggccaccctgaaggcctctggatgccctaggatgactctgagcacaaacagatacggggcttaggtatgcattgctaattccaaattctataggctactaatacatgctctttcctggtcaggtttggtccagagcctgggctgggccaaacctgcaggtgaaactttctagtgcctgctcaagttggacaaattggkccaggactctcagcctactctcctgcacacagccagccccagcactgcccagcaacacctgcctsttcatttgttgacatacacattgccaaagtgtgatcaatatgtcaatattatttttttattttgctttttttctccttaattatgaatactttaattctgagcactgatacaggtattaacatgcctcagccgggcacggtggctcacgcctgtaatcccagcactttgggaggccgaggcgggtggatcacttgaggtcgggagtttgagaccagcctgcccaacatggtgaaaccttatctctactaaaaacacaaaaattagccagggatggtggtgggcacctgtaatcccagctacttgggaggctgaggcaggagaatcacttgaacccgggaggcagagtttgcagtgagctgagatcgtgccactgcaatccagcctgggtgataagagtgaactgcatctcaaaaaaaaaaaaaaaaagaaaaaaggaaatgcctctaccctgtgaaaaacttcttataacttcttcctatgcttttattttggttgtttatttttagactgataagcctagaagtttggaaatagagggcatccaggtgactattcattttccgtctgagacgaagatggcttttgtacctctccccagaggtctgaatgaggaagaatcaggcaactcaattgtatgcaagatccatcatgaagtacaattctcaaccttggctgagtgttggactcacctgggacttttaaaacctgttgatgcctgagtccactctcagagattctgatttaattggtatggggtgtagacttggcattgggggattttttaagctctccaggtgattctaatgcattgcaaagtgataattatttcctagaacctgccctacctttcctcattcccttccctcacaatccaaggagacaaaattggtttggagaaaataatttttcttattgattagcccttccctaagckaagcagtgtggattaaggtactcagggttctcagtggcccactgagaaagcagtcctcagaggagtcccgcccattctgactctscctttccctttttattcagtatggtattgtgctggatgccgggtcttcaagaaccacagtctacgtgtatcaatggccagcagaaaaagagaataataccggagtggtcagtcaaaccttcaaatgtagtgtgaaaggtaaggactgaagtgtgtctgggagtcacaatgggcagcaaggtagagttctaagtgttttggaggcctggagaggtcctgagatgttgcttggaggcagggaatgagcattggactgggagtcaggaaataggagatcgtgtgctagtgctgctactcatcagtggaataaacttgctctagtcacttcccttctctgggcctcagtgttttatctgtatacatggaaaggggtggcgtcaagaactgtgaatggtctgagattttaccctgccatattttcatgggtgctggaagacacaagactcctgggtcagaaataaaggacaatttgttactcacaggagtagcccagagtatcagcattttcttatactggttctgattcccaatttgcccaggatgatggaaagacggacagatagtatgcactcatgcaataggttctgtcataggaaaggaaatctgggattttagggaagcatttataatgggcagtgagcatgcctgccttttgctgtggagggaaacacaagggacacatggatagctgtcttccagcagtgataaggagtagtcctgtgtattgatggcgaggcagacagagaatgacaatatgtaaacaaatggacatggctctgttccagtaaagctttatttatggacactgaaattttgaatttcatataattctcatatcatgaaatgtaattcttcctgtaaattttttcccaccattaaaaaatgtaaaaactctcttagctcacaggctgtacaaaaaaaaggtggtatactggatttggcccatggggtgccaacccctgaaatggagtattatcagcaatgataattaatgatccgccatgcagctccctgtcttttccacaacatattctgagttttatattaactgtttccttgttctttatagttttgtcttatgtatgtagtgtttctgttttttaaaacaaaattaaacatgtatttatataaatggaatcaacatattttatgccgtatttgctttgttcactaacaacattgggtttttaagattcatctgcactgatatgagtaactatcttgttcatttcctttcctttttttttttcttttttttttttttttttttgagacagagtctcactctgttgcccaggctggagtgcagtggcataatcttggctcactgcaatctctgcctcctgggttcaagcgattctcctgcctccacctcccaagtagccgggattacaggtgcctgccaccacgcctggctaatttttgtatttttagtatagatggggtttcaccatgttggccaggctggcttcgaactcctgacctcaagtgatccacctgcctcggcctcccaaagtgctgggattacaggtgtgagccaccgtgctcggcctcatttttccttgttgaygggcatttgtattttcttggttattaataaaacttaatatctttccatatatttataggcatttctgttttctgtgaaatgcatgttcatgtcttttgttcatttttctattgaattgttgaatttttcttactaattcattgaaattctttataaatattctaaatatgaattctttgccattattattatcatattattgctaataccgtctcacagtttgtagtttgtctttttagtttctttgcgatgtgtcttgatgaaaagaagttcttgattcttatgtaaatacaaccatcaatattcctttttgtggcttgctcttttgtatgttttatttaagaaatccttttctatcttgaggtcatacagacctttttctatgaaaagtgttataattttgccttttacaattaagtaattagtccaagtaattgagcctagttagggagtgtgtatatgtgtaagcctttttcaaagccacttatcttcctcgttcgagcattaggatcttcagttggcctgtagcctcccaaccagggtgttctgaatgtgcccagtgtatccttgagcccacaggacaacaggttagagactccagacctgtcctcccagccygagcagcctcctttgtttccctccgtgagctgccaaaacattgtaagttcatggggatcatggcattgaaaaacttggaaagcagagttagtctttctcaccgggagaccaagagtcttctttggctaatcagagtgaattctgatcatctgccctccgaggagggcagccaggagcttgcctaccctgatgcacaggtgttccaggttaggctctccagaagcagatgtagagacagattatggagtgcaaggtggttattagagatgcactattatagcagaaagtgggcagagagaagtactggacaaaaaaagagaagtcaaacttcaactcaggcctgatgaagcttcagctgatccgttatgctgcactgggttgaaatggtgtaaagtggcttggctgtaataccccctgttgctgccactctkggatgtttgccaccctggaaagagcaagatcttgagcaaggcagctctctgcagctcaggcagaccctgaagaagctgacagctgggacaataagtctatttgaaggggtatattgcacggcacggttttggattcaccacataagggacttggatattttcctttaatttttttttttttttttgagatagggtctcattctgtctcccaggctggagtgcagtggcacaatcatggctcgctgcagcctaracttcctgggttcaagcagtcttcctatctcagcctcctgagtagctgggactacagacattgccaccacatctggctaattttattttttgtagagatggggtctcactatgttgcccaggctggtcttgaacttctgggctcaagccatcctcctgcctcagcctcccaaagtgctgagattacaggtgtgagccactgcacccagcggatattttctgagtattgcttgcttgttatccacaagatgcaggcagctgtagccttgctctgacctcaaccagcgatcctctatctgctcaggtaatgcctgagccatttcctcaccttcaaccatgaaatagggcagcaggctgctcctttcaaagacagagactatgtgctccaaggaaagagaagatagtgtaggatcgagattgagacttcacctcatccctactgtgtgaaccctggaaagttatctaacctgagtcttgacttcctcatctctaaagtaaaaaacataataatagttatacctaccctacaggagtgatttgaagactaaatgacataatgttgtaaaagaaatgcctggcatacagtaagtgctcaataagcattaactgttattcatggggcaccacaatcagagctcctggtggatcctcttgccacttgttactctgtcccacagttacaagatctctgtctttagacccaggagggcaattcaaccaagttagtcctgatggccttacaactgtggggaaaaataagacttacatggggaggtgttatggcagtccctcaggggaagggttccttggcccaccctggatggcatatgtgatttgaggaggcacagagtcatggaggccacagcatatccataaatggatcttcccttctttgatcacagtagcctcagggatctatatatactctgaatgaacagaagaccacaaactaaagctcaaattacagagttgaaggtcagcaagtgtcatcccctcaaaggcttgtggcttctccaaggataatttgggtttctgcttcctccattgcaaacttcccaggactcccctgtcttggccaaacagaagggggtgatgaatgcttgctcacccagcagggattcccagatgcctaggccctcagaaatttctttctggttggtatcaacccccagttgctactgttttccatgagttcattgcctttgctggcggtttctgtgctggtgtctgtacctctggctgcttgtggtgaagccacctcctggaggtgctgggttctctgcatgcgtctcatctcatctgcagtactcatgcctgctgctgcctttccccacaagggacattcataatgtctttcctttaaaccagtgactaaaaattacttaagctccactagagcctaaacttaactatctcctccattaaaatccctcaaagagttgcatcagaaaccaggccaccatagtattaaaaaaacatcctttgcctctgggtgcagtggctcatgcctgtaatcccagcactttgggaggtgaggcgggtggatcacctgaggcaaagagtttgagaccagcctggccaacatgatgaaactccatctctactaagaatacaaaaattagccgggcttggtggtgggcgcctataatcccagcttctcgggaggctgaggcaggagaattgcttgaacccagaaggcagaagttgcagtgagtggaaatcatgccactgcactccagcctgggtgacagagcgagacttcatttcaaaaaaaaaaaatcatttgccaatagttggccggagctcaagctgaggtgcgtgtctttggcttctgtttcccctcaagtaagttttgtgccgtctgtttaaccctctctccccatattgaaatagcaatttcagtgctcctctcatgggaccaagtatccaagtccaagcagcttagaagcctgtgaatcctatctccttttccctctagaaggcttaatggaccttatgcaaacaggctgtctggtgacatactcccaaggtttcaccattctatctcgcctctcaccagccgctaaccagagaccagctccttgcagattatattttgtttatcccagattggactagccaatctccttactacagagatgtatagtggtttgaaagtctcattgattgattgatttaataaatatgtattaggtgcctgctgtttgatacgaactgttcttggcaccaggaattcagaaataaacaatatatacaaaatctgtggttatgtgttatgagacttgcattccaatgaggaagatagacaaaaaaataaacgggcatataacgagtgtcaggcagacatgatgtgaagagaaatcaggcagggcaggaaaaagagagtgatcatgctgttttgaacaggattgtcagggaagtatgaagaatatgacagctaggcagagacaaaagtgatatgagacaatgggccatgtaaatgtgtgggggaagaacatgctgagcagaggcatggcaagggaaaaggccaagcatggaagctgctcagcattttccaggaaaagccaaggggccagtgtggctggaagaaagatgagaaatgagactgaagctagagccaaggcctgctccttggagggacttgaggtgtcctaagggtttgactgtgacacaaatgaagtttcttcaaagtatattgggaagccattagaagattctaactagggaactaatacgatatgacttctgtttttaacggatcactcagttgatatagaacacgtagtcaggggctaagattggaagcaaggacaccagttaagtgctgttaaatcagtacgggtgagagattaggtgatggtcaatttgcccttgactagtgcttctcaacacaaggtgaatttgtctcccgggaaacattttgcaatgtctggagatcttttcgattgtcatgactgggtccgtggtgctactagcatctagtgtatagaagacatttctcatctttcttccagccacactggccccttggcttttcctagaaaatgctgagcagcttccacacttggccttttcccttgccattctacaatgttctaagcattgtacaatgcacagaacagcctccacaacaaagaattatctaccccaaaatgtcagtagcaccaargttaagaaaccttggtttacgatggttctggggaagggggtgagaagtgcttagatttgcgaggtattttgaaggtaggaccaacatgattttatgatggacttgatgtgaggcatctgagttcataatgcatgagcaagagtttggatatgagcaactgtgtgcatcacaacaccatttactgagattggggaacactgggagtggagcatattgggggcagggcaaagcttaaagagtttggttttgggcatattaagttggagatggctataaatcatctgagtcaggggaggcaaactttttctgtaaagagctacacgataaatattttagacttgtgggtcatatggtctctgtcgtaactgctcaactctgcccctttagcatgaaaacagccatagacaacaggtagatgaattagcatgtttgcatttcaaaaaaaaaaaactttacttgtggacactgacattttaatttcttataattttcatatgtcatgaaatgctgttcttcattttatttttttccaactacttgaaaatataaaaattattcttcacttgcaatccatacaaaaacaggtatggggtcaaatagcttgctcattcctgatctatacagtgatgtggagttgtcagataggcaagtcgggagttcgggggagggggaggatgaagaaataaagctgagtgtcatcagaatacagacgatatccagccccagctcatctaaggagtgaatagatactgaagaaaagagatctgaggacttagccttacacactccagtactgagaggttggggagaggaagaggatccagcaaaagaacttaggaggaatgacagccagtgaggggagaagaaggtcagaacccaaatccaaggtagttgaagaaagaggaagtgcgcaattaggtgaaaagtgatggggagcttataatctaagaagtcagacagacatgatatgcccccagtgcggtgatgtacactaggaaaaacctagcacacctaggaagtgctcttgccaaaaaatcaaatctgaatctgatcacatttctagaaattaactcccagtttataaaaaacacagaagacaaaggaacatgttcaaggacacctcacggatccaatcagcgaaatccaaaataagagacctactccattaaaatgatttctttaataaataaatggcaagataaaaggggggcaggaaaactgttacagaatgagaatcttaaaaaacatccaaatgcacatacaaggtatggactttggtttctgcatcacactataaagaaaaagttattctgggaaatttgaacactgacaggtctttaataatattaagaacttttttaggagtgatttttttcttaggtatcatggttatatttttcagagttcttccctcttaaaaacatatactaaagtgtttgtagatgaattaacataatgcctgggattttctttacaataattcctagagatggaaaaaagaaagcatataaatgaaaataagatgggctgtgtattgattaactgttgaagctgaatgatcagtatatggggattcatttcactagtttcacagtaaagaattaagactaatgtgagcactgacctgtgatgttcagcatagttttgttgtttttgttggctttattggcattttggagagaaaaacctgttaactaacctatctcataggaatatgcctgagagcttaatctcacattttatttactgagagaattgtgtgtctttttaaaaataactttctaattacaaaataatatattttcattgtgtgaaaatcagaaaacacaggtaaataaaatggaaccaggcacaatggtgtgcacctatattcccagctactcaggaggctaaggcagaaggatcacttgagcctaggagtttgagaccagcctgggcaacatagcaagaccccatctttatttaaaagtagaaaaggaagtaagatcatccataatccttcccaccagaggggaacatttttctttttttaggattaatatatttttatattaaaaattattcatacaggctgggtgcagtggctcactcctgtaatcccagcactttgggaggccaagtggatcagctgaagtcaggagtttgagaccagcctggccaacatggtgaaaccccatctctactaaaaatacaaaattagccgggtmtgttggtgcatacctgtagtcccagctactcgggaggctgaggcaggagaatcacttgaacctgggaggcggaggctgtagtgagccgagatcatgccattgcactccagcctggacaacaagagcaaaaactccgtctaaaaaaaaaattatatatacatacgtatataaacatatatatttatttaattgttgttattgttattagtgtttcttacagctacttcagttctgaactcctgagatcaagccactgagttcatcaagcccacggcttatggtgctgtcatttgtctgttgtaggaggtcattgccccaggagggaaaattacattagaggctctgtccttggccaaggttgagaaagcctgtccttgcttctctagcactgtcgatgaaatccacgtctgtgcatcttaatggacacatccaagcaaaacttgtaattacaatgctcaggtttttttattggtttgtggtagttggaagatgggtgggaaaggttaagaaagggcagctgaaggaggcagtggctctatcaattccaaagaaggaagtttccagagggaccatattctctccatcttccttgtctgtcctatactttgtcttccttaaagtagacttatttaaactcagagcctggactgggagaacaaattaagttatgttcatgcaatggcatgcaatgcaactgtaaaaagaaatgaagaatatttatatactgctatggagtggccactaggaagtattgttgaatgcaaagaaaaaaaaagtggagaaaagtatatatagtaaattaccatttatctaaaagttggggtgattaaaaatatatatttgcttattttaaacaaacattggttaaactttttttaaaaaagaaactacttacaggaagaggagacaaggagagaatctagatgtctctgaatatacctagttttgtagatctaattttagaactacttaattattttagtaactataaaacaaaatcgttttttaaaaagtaattcctaaaactcaaaagtaaaatgcaacaggccagtcatggtgtctcacacctgtaatcccagcactttgggaggctgaagcgggtggatcacttgaggccaggagttcgagaccagcctggccaacatggcaaaactctgtctctacaaaaaatacaaaaattagccaggcacggtggcacgtgcctgtaatcccagctacttcggaggctgaggcacaagaatcgcttgaatctggcagacagaggttgtagtgagccgagatcacaccaactgcactgcagtctgggtgacacagtgagactccatctcagaaaaaaaaaaaaaaagagaaaaagatatcactatttgcaacccctaatgaaataatggagctaaaccattatcattgatgataacagcacaaaaagagaaacaaccagatactgtgcctcctattgtaagtccacactaatccctatatattttttttaaatttcaaacctgatctgatcaagcctctacattcagttaaccatttatagaaatacaagggaccaagtaagatgttaattgaactatgagggtacaatcgacaaactctagactgtggaaattcttcaggacgaagaaattgcaagtaaaatttttaataattaggagaaaaatagaaagggaaggcagaactaatagacagaaagagacttaagattgcactgtaccgaatttattgggatcctgactcatacaaatgagaagagggtgatggatgaaggaagaaggagggaygaagaggaggagtaggaagagaaagagacacagaggatgagaatgagaacgaatatggaggcaatgggaaccatgactggatagttaatgatattaagaaattatttttttggcaaggcatggtggctcatgcctgtaatcccagcactgtgggaggtcgaggcaggtggatcacctgaggtcaggagttcgagaccagcctggacaacatggtgaaaccgtgtctctataaaaaaaccaaaaattagccaggcgtggtggtgcacgcctgtaattccagctactcatgaaactgaggcaggagaatcacttgaacctgggaggtggaggttgtagtgagccgagatcgtgccactgtactccaggctgggcgacagaacaagactctgtctcagaaaaaaaaaaaaagaaaaaaagaaaagaaaaagaaattatttttaatttgtacaggtrtaataattcaactgtagttagggctttttcaaagaatgtttactttttgtgacacatactgaaatatgggaattaaatgacacatctgcattttgctttgtgggaagcaagtggaagattgtatggatgaaataagagtcgatcattgttgaagctgggagatagatgcatgagtttcaatatactattctctctacttttatttatatttgaaatttttataatgaaaacatttttttaaagtaggccctggcttactttttatacaattgtaattcattcttttagaggttgcaagtatactgatcagtgtgaccatacgggacttaccacatccagctgttttcgaccccctaccaaaccccaataattttcaaagccaatttgttttttatttaaaagttgtatcactgcgattggttcctggaaatgctgacagatgctgactgcttgcttttcaggctctggaatctccagctatggaaataacccccaagatgtccccagagcctttgaggagtgtatgcaaaaagtcaaggggcaggttccatcccacctccacggatccacccccattcacctgggagccacggctgggatgcgcttgctgaggtaaaggctaagtggcacaaaggagcccatttgaccaaaataaccaagaatatgttgaatcttgccaagaatgtaactctatttctgggaacaaccctcgccccccaaaaagaagcccacattctgccataaatttgggctttaaaggttgggaarcttttagtttttattttaatacccagaaagaaacagttctaaaattgtttccctctcccttggtgattttactgagaactttgaaaaagagagaggtcatatgaaatctgctcatgggatataactctagttctttgaaaagtagttgttttgacagttggcatttgacacctgtgaacaaccagctaagtttggtagtaagtacaacccatagctatgtagcttccgcttgtgtacaaaataccactgaaatctgctttaaaacaatggcatgtctgcacctcaaatcagtcaaagcttttggagttgttatgaaacaagcatctaatttcactcactcaaattagttccttctaaatttgtagtcatggcttttagcccagttgcattgtttttgaatgtcttttctcttttttctccattatagcatttccttgaccttgaaatttcaaaaaaaaattccaaaaagaaacaccaaacttaaatctactcagagtaaaggctactactccaagtgttggaataaggttttatcacaagaaaacaacactcattctgcttcagagccactttatctacgattccaagcacgcaaaattatctatgtctgagcattaataaaaaaagaacaaacagagctcctttaacatgataatgaaaagaaatcatgatgtgctctccattagactgggccttttccttatagtctcataattcttgtttctaatctgatttcctggttgaccacattgaatgtggaaggaagtcagatttctctgctcactcttggaatctgcagtgtatttccaaattatttcatttacgtgtaatagaaatgatctaaaaactccttccttttgctttttctttcttataaaaacagttcttccaaaaaggatggaactgaaaccatgtaatctcagagaacacagaaaggcagcccctttacaggctattaattccatggacctaaaatcctcatctgctatagtggatgcttccttaacacgacatgtgtggagctacttatagaaaagccagctgcaggatgtgctcatgaagttttcaatttggagactgaatgcttagagcttagtttgtgaaatccttctgctttcagtctattcaattcccattttcagactgaatttcctatttcagaatacattaggatgctgtttactctccctgggacttgacttcaggtaataagtttcagaacaggacctgagcaataccaacaatatgaatgtgataagtgactacaatcagggagaaatactggttcaattccattaaatgtctgtaaaagttactctaaaatatctttgctttaccagtagtgtttgtacatatgtaaacttcttggttgaactggctctgaacttatgacttaagtagacttctagtactctaaaaacaaaaacaaaacaaacaaacaaacaaaacagctcttaagaaactgactttttcttggttgcttcccctccctcccccagtctttcagtgagaaataattaaaaggctctgcaatttacagctcatgacaaaaaccatggaacagaaagctcacctcttaggaaaaaatgaatgtctcctttgaataaattaagtactaactctttcttgtaaaactgttttctaatgatgatctatttcttctgagaaactagctgatattttaattactagacaagtaaaatagaaaagaaaacaattaatgagaattagctgggatgagaattgatgaaactgggaaaactctgaattattttccaagmagtgataattggccacggaattggaatggatcctgcttatagccttgctctttcttcttcctgagccaagagtcagccagtgcccctggctttctacccatggatgaaagatgaaataatctcccaagtgagctttctttcatagggtaaaatggcagcagatggacgccataacattctgtcaccagggatagaatgctgtgttgccactcctctaagagtcagcacaccaatggtttttcaatccagtgacagccatgatgactgtcatatcccttcatgctgaagccctcccaaagagtgaagcaaaaacagctaaaaactcaatgttcttcctttcccccttcctactaagctccctttccgtctggtcagatgagggttccttcatatggtgcctccaagagattatttatgccactcttatgacttcatcaatcccctttcctctgctgatctaagacagagcaatggcagttaaataggaggctcttttgatacatgaacagatgagatgggtggggagaacaaattgtacttatgctgaaagcaattttcctgcttggcagtttgacaggtaacaagtgcatcctgccttcacagttgccccagaaggcttcaacttgcaaaagggattgtggtgtacagcacacatctggaaaatcattcatccccaccagcagggagacggtgaagtttgcattttcacctgagtgagactatgtatttwaagactgtattgtctgggcactcagacttgtttgttctgtgccttgtacaggttgcaaaatgaaacagcagctaatgaagtccttgaaagcatccaaagctacttcaagtcccagccctttgactttaggggtgctcaaatcatttctgggcaagaagaaggggtatatggatggattacagccaactatttaatgggaaatttcctggaggtgtgtgcaaacaaatgcatggtttttaatcttactgtttatcctatcccctgtgagtgatagcctaagtagaggtacatgccatcagggatatctgccctgtatcactcctaccatgtaacgcattagggaaatacctatgagacaatagctaagaaagacatatatagctggggagaaaacatggtcataaacaggactaaatgctagggagggagggaatcttgtcactttactagcttgtaagaaattgaagggggtgggatctaaatttaacactaggctatgggtctttgggagggcagttgaagaataacccttcagagaggctccatgaccatctgaaatgtacaaagccctcaggaagtctgtatccctaagtccccagagacaggaggaggtcttcactctgtgttcccaggtctcctcacagtccaatccctgcactccctgctcccttggtgcagaggaaagttgactccaagagacaactgccatgttacagggggcacaaaacaggagttactcagagcatatccagcccaagacctattttgttcaccttcaaatgtattttaaatttttaaataattaccaacaattaacatttgggaaatttcacataaaaatccatacttctagcttcttctgacctcctcactcctcccaaaaatcggaggaactggtcacagtagactcacattcctgcacggtaacaggaacagagtgtaaatcatggactctccagtttgccacagacccaccagtccctattatacacctaatctacttcactcatttattacttacctatgttacctgcccagttcctgtaagcattttaattcaccacctctaaaagaaaaggaaagaattggcctcacatgctccctctgtcctacttcttagtaataggagacgaggcttgggtggagaactctgggcaaasagagatggtgcctttggctttctttctcacttccttttcccactgtgcagaagaacctgtggcacatgtgggtgcacccgcatggagtggaaaccacgggtgccctggacttaggtggtgcctccacccaaatatccttcgtggcaggagagaagatggatctgaacaccagcgacatcatgcaggtgtccctgtatggctacgtatacacgctctacacacacagcttccagtgctatggccrgaatgaggctgagaagaagtttctggcaatgctcctgcaggtacttgagtcgggggtagggggtggcaggtgttctcttgagggtttgagctgaggggagaatgccctgccttctggggtctgtcctctccacttcaattgaaaggtagatggaaataacagcattttccaatttactcctgggggtccaagtccctttcctctctgtctctttcttcccctccgtctccctctcatgttgcccacttccagtaaatttgagtaagaagtctagggaagttccagagcttcagttgttttgtaaatgactcaagacctggaatccctttatggacacaaactgttttaaaccaggagctaaataagcctgagaattttgagactcccctgggtgtagacaaaataatattagtggtcacaagagaaatgtgtgctgaagggggagagggcagagcccttcccaggctcagcctccttttagatgggtctatattaggcagacttgatacccttatayggcagaactttagagcaaccacattccatcatgttgatcagtaattcatttgataagtgttccagggcccagaaggctaattcaggcatcagctagaaagctattgctaatattaaactcaacattatgcagtgtgtgttcatgagggcactaactccacaggtgagaccccagacccaaacaccagtgctcaggggacatcaatcttagccatggctgggtggctgagaggatgggccttgactgcctagaggggtatgaggaaatcagaagccacagatcctggcttcttatgggactcaaaggcaggggaatcagcctatgaacaaaatggacacaacttcagtaggttaacccacgttcgtccaacctactctgataactgaagacaggaacagactctatcctgcagaggagttgaagggatcacaaaagtgcatcttcagcaggactcacaacttcagacccctgcatttacccagtgttcatgcagggtaggttgtgggaactcagcttccagttctggcccctcccccaaacatctccccaatcctcccagaaatggctgaggccccaggacacatgcatgggacatttattgtcaggagagtctgagcactgcctggaaaggacagatgtgagaaccctgcagacagccctcaactacccttctgtagtaatccatgctcacactactataaagaaatacctgaaactgggtaatttataaagaaaagaggtttgtttaattggttcatggttctgtgagctgtacaggtttctgcttctagggaggcttcaggaaacttaaaatcatagtagaaggcgaagcggaagcaagcccttcttacatgggggaataggaggaagagagagagtgaagcggaaggtgccatacaattttaaacaaccagatctcctgacaactcactcactatcatgagaacagcaagggggaaatccacccccatgccccaatcacctcccaccaggcccctcctccaacactgggattacaattttacatgagacaaagccaaaccatgtcaccttccatggctcccatcccaacttccacctccctgcccagtcagccaaaccaaaccctacaggtaactcaatcaaccctccctatcaggggatctcaatactcaccactcatccccacttgctcatcaaagtagttcaaccaacatgcttctttctttctgggagagaagctctggaaaatcctcttttctccagctccttttacctctagcaatgcctaatgtcctttgctccagctctgaccctagcaggggtagaatgtggaggctcaggtgaaatcctcctttttccagggtgagtgaggatcagagaggctaatcttttaaatttggctggccctatggaatgtgtgtgtttctgtctgtctgcgtgcctctgtgtgtttttgtactcatacaatgtttactaaagaatgattatctatgtatccagcagtccacrgagaagaagtaaatacttcacctttctgaggtctgatttaggcttgagaatgccagtctccaaatgtgagcccagcactggccatggagaagtgagcacccagcctctcacagtcagctcacagggacagggacacatgtcttcaatttgcatggtaacctctagatgcctgatagggtggctctgccctcagaggcttctgactcatgcaagaggagagacccagatgagatgaggattactgacaaattcatgtcaagactcacctgaccaacagtttcataggtcaaatatgtattgccaagccctgacttggaaggttcacacaaattattgcattgtaaacactgactgagtaaattccatcagtctggatcttgtttcctcatctgtaatataaggaactacgtagtgtggtgagaatgatagctggatatgtactttgcaagttactttcttatcaataagtctccagtcaccttagagctgaagtctcactctgacaacatgttagatattaggaatgtgcattcactttctatctttccctttttaagtaagaaatttttcttctgtttttaatgtaatatatgttcagtgaaaaacatttaggagatgcacaccaaaaactataaaggatttatttaaaaacagaattaaccactattaacayactattgcattttcttccattttttaaatgtatgaatgtgtaaaaacttggcttcatatggtatatataattttatatttaccttttattttacctaaccatatattatgatcattttcctgtgttgttaatgtccttttaaaatacgattttttatgagagcataatattccaagtgccataacttaaaaagaaaaaaaattgaccattcgattatgaaagaaagtacattcttattgtaaaaatttaaaaccatagaaagagtgttaaagtcaaaatgaaagatcctccttccaatcccatttactgaatgccatcactggtcaaagcttaatatgttgttcttctacactttccaggtcagtatattaacttattttctttactatttactatcccataatttatcaatcataccctccctcatggacatcaggctatgtcctgttttgttgctacaacaataatataataagccttcttactcatataatcttagcgattttatttctgtaggacaggttcaaaggacaggtgtatttttttatttaaatgaacaaataggtaatcttccaacaaaattagaaccattcagattaccacccatgttgtgatgactttttgaaataagcttcaggaattccaaaacattctaataataagtacttagataatgaggatctgtttctggattttctgttctatacattcatttttctattttggggccaatatcatgttgttctacttgcaaaagtctatttttctactctcagaggtttattttgaacttcaaagtcatttgaagcagtaacaaaaaaggaagttttttgttgagattgtgattgcaatcacattgattcatatattaatttggttaaaatgtgcttattagtgacatcaacaatttctatccagaattatacaatgtatttccatttatttaattcttggcttgtatccttcaataaaatgtatagttttcatcattggttctgtacctctgttgttaaatgtattttctttgtgtatattttttaagctttctatcactatcaagaatagtttctatcattgttttttccagttttaaccagttttactctaagatcagattatgctgtagttttctagtggacttttctccctcgagcccattgactgactttttcatgacagtgccctgcaaacactaagctcggtgaagactgttgaatgttgaatgcctgaacttggcacattggcaaattatacttaaagaatgccataacaaaaattcaaacacacaaaaaaagaaaagaactaatacttactaagcttttcctatgtactaagtcagaaataatttatgttatcttgtttcttctctgggccaagccagaaataatttatagttttaatcattttaaaagtataaatctcccttcagactatactagaaaagaaaaaaagtacaaatcagatttggaagtagatactaaatagccaattgattagtttgatttttttttcttttttctttttttctttttttttttggagatggagtcttgctctgtcacccaggctggagtgcagtggtgtgatcttggctcactgcaagctctgcctctcgggttcacgccattctcctacctcagcctcccgagtagctgggactacaggtgcccgccaccatgcccagctaattttttctatttttttttagtagagatggggtttcactgtgttagccaggatggcctcgatctcctgacctcgtgatcygcccgccttggcctcccaaagtgctggaattacacgtgtgagccaccacgcccsgcatattttttctttcaaccaatatttcagccatagggtgacccaagtatgatatgctatagattatatgtaacaatttttgaaaatcatagatttttttcataccatagaggcagaaaggggcctgtttgcctcyttctcagtcatatgaagatttttctggaaaacactcatttgggttatatttgatgaatattaagcttttataggatttttgcagaatcttgtcactgacctttgttaaataattgcattacttgaatatgtacctcagtttcctcatcagtaaaatgaaagggttgggctaaatgtctgagtcaagattttactgtagggtggccaggtgcagtggctcacacctgtaatcctagcactttgggaggctaaggcaggagaatctcttgtgcccaggagtttgagaccaacctgggtaacacagggagaccccacctctacaaaacaaaaaataataataattaattattttaaattttttttttttttttgagacggagtcttgctttgtcacccaggctggagtgtaatggtgcaatctcggtttgctgcaacctccgcctcccgggttcaagtggttctcctgcctcagcctcctgagtagctgggactacaggtgcgtgccaccacgcctggctaatttttgtatttttaggaaagacggggtttcaccatgttgcccaggctggtctcaaactcctgacctcaaatgatctgcctgcctcagcctcctaaagtgctgggattacagatgtgagccatcacacccagccaaaagaaaagattttactgtaggggaagcagtatgccttagtggcttaagttgaacatagttcaaatccaattccttagaaaagagagttcataaattgaatcaacaacattcaggactttagcataaaatagagtattttgcaccagtagattaaagattgaatagtcatatggaaaaagtaaagccaagtctctgagtctttaaatcaaataaatttcaatggataaaagatttatatgtgacaagkatatttgtttgtaatggcaaaatgattgggaaccacctcaatgttcatctagatgatattccttaaataaagtatggtttatttgtacagtggaatactatgcagctactaaaaaaataggccactgtataagtacaatgaatggaaagatctcaaagatatataattttaagtgagaaaagcaacgggtagaatggggtatataaagtgctaccatttatggctttaaaaaaagaaaagcatgggasaaaatatatatatttgcatgtgcatgccagatctttggaaggatacacaaaaactggcaatagtgattgtttccagaaaaaggcctgatggctgcaagtggatgagaaggagacttcactttcatatgtttatttgtaccttttggattattttgctagrtggatgggtgatattctacttaaaatgatacattatatatatccattttctcaccaagtgaagttcataaaacctggttcatagggctatcataagagctggatcagataatgtgagagagagcctagcgctatgcctggtacgaggtaattgtcacacacacacacacacacacacacccttttcccacccctacttgaattatctagacaacctgtgatcaaagacatgctgacacagaatggtattttttgtttctctcttggcattggagggtagtgatagaatttgcaaaagggaaatacttggctctccacaaaaaaagtggtttctaataccttactctttttttttttttttacttagagattttattattattattattattatactttaagttttagggtacatgtgcacaatgtgcaggttagttacatatgtatacatgtaccatgctggtgtgctgcacccattaactcgtcatttagcattaggtatatctcctaatgctatccttcccccctcccccmaccccacaacagtccccagagtgtgatgttccccttcctgtgtccatgtgttctcattgttcaattcccatctatgagtgagaacatgtggtgtttggttttttgtccttgcgatagtttactgagaatgatgattttcaatttcatccatgtccctacaaaggacatgaactcatcatgttttatggcttcatagtattccatggtgtatatgtgccatattttcttaatccagtctatcactattggacatttgggttgattccaagtctttgctattgtgaatagtgccgcaataaacatacgtgtctaacaccttactcttatacctacagaattctcctaccaaaaaccatctcaccaatccctgttaccctcgggattatagcatcagcttcaccatgggccatgtatttgatagcctgtgcactgtggaccagaggccagaaagttataaccccaaygatgtcatcacttttgaaggaactggggacccatctctgtgtaaggagaaggtggcttccatatttgacttcaaagcttgccatgatcaagaaacctgttcttttgatggggtttatcagccaaagattaaagggccatttgtggtaagagcaaaaccttctgaaagattcctttccccattgaatattcatttctcacttttctgtttctcctctgctgacttgttagccaccttcttattcctcacccataaacctttctattataccccattctgagaactaattttcttctgtattacttatttccaggcttttgcaggattctactacacagccagtgctttaaatctttcaggtagcttttccctggacaccttcaactccagcacctggaatttctgctcacagaattggagtcaggtcagtatttaaagagaagsgatcaatgtcagtacaaaaaaatatggtagaatctattctatgtgtgtgtattctgaatttagcctttatgctcttctatttccatcacatctgtaaaataaaaggaataagggaatctactcccacacctgtggtgtgaattaatgttataactacatgcacaatggttagaacaatatttggcatataataagcactcaatgagtttaaagattagtatattgtgatattatatagggatattttcataattatattgtgtgattatatgattgtattataaagtattttctattatgaaattatgggtgataagattctttaaaacatgacttttaacccaaggtgttcattttaaaacatacctgcctgccctgcctctcagatgttttaaacctttcagctcccactgctgctccccaaatttgatgaggtatatgcccgctcttactgcttctcagccaactacatctaccacttgtttgtgaacggttacaaattcacagakgagacttggccccaaatacactttgaaaaagaagtaagttaagcacaaatcattttctcttcttcttcccaacagagaggtttgtatgtgtgtgtggaacaaatgtagaaggtaaaagggtattaatgagttaaactcactgggtggaagctgatcagactgatcccttgtgagtttcccagaagaggtcatggagaatttagaagagttgctcatgggtatacattctcctggaaaagactggaagccaagggccaatggactaggcggtcctggagggcagagacctgtcttggtatcttcatattcccagcactctgcacaaggaatagagcctagaaggtacttagtaaatgttggttgaattcataaataaatatgttaaggatatgagacttttcatcctgaaaagaagctttaaatgtaacagttttttaaagaggatagtaactaattcttctcyattttattcagatatcagagtaagatacaggccttagggcctgatggatttgcattagcattaaataaatattttctctttgaatgaacctgaagtcattatatttactgacaaagatttgggggatggggaagatattcttagctcagggtttaatatatttaaaaatatgtatatttatagatatctataaatacatacatatatatatatgatggtcaagtgaccagaatggtccaaagctggaatcacagctgtcacctggtgacaggtgaaaggacctccataccttgtttttaggcagggctaagccttgtgaatatgttcagccagcactatgttccccaggttccagagaattttctcatttcaggaatagctgatatgaagcctgaaggatgtctggagtcagcctgttcaataccagcttcagcaataattagattaaaccaatcaatatcctgcattaggcctctgactatctacttttacataaataaaattgagtcatctacaaaaaaataaggatgtctggagacataaggactgttggtagcatgtactctctaagctttgcttctaataaatctaattaccagtaaagtatattataagaatggagaatgactttccatttgaatgccagtttgagttgacataatattctaagttaaaagttccctttttttaattataaagaattttgtgtccagccaaattagtatttaaatgtgaagatgtaggctgggcacggtggctcacacctgtaatcccagcgctttgggaggccgaggcaggcggatcacctgaggtcaggagtttgagaccagcctgaccaacatggagaaaccctgtctctactaaaaatacgaaattagctgggcatgttggtgcatgcctgtaatcccagctactcagaggctgaggcaggagaatcacttgcacctgggaggtgaaggttgccrtgagccgagatcacgccattgcactccagcctgggcaacaacagcaaaactccatctcaaaaaataaaaataaaaataaataaataaaaatgtgaaggtgtaaaaagacttgagaagatttgctgcacaraagacttacaatgaaaatatttttggtggaagtaataaaataagaagagaaataaatccaggagatgttacaaaaacactggaagtaagaataaatgatgttgtggcttaaaatttacattaaaaaagccrggtgctgtggctcatgcctgtaattccagcactttgggaggccgaggcaggtgaatcatttgaggtcaggagttcgagaccagcctggccaacatggcaaaaccatgtctctactaaacatacaaaaaattagctgggtatggtggcatgtgcctgtactcccagccactcaggaggctgaggcaggagaattgcttgaaactgggaggtggaggttgcagtgagccgagatctcaccatttcactttagcctgggcgaaagagcaagactctgtctcaaaaaaaaaaaaaaaattatattaaaaaaaacagaaaacgaacactaaagaaaagtatttaaaaaaaactccattcatatgactcaagtatagaaaatatccacatgataagggtgtggtaaggagttataagatacagggacataagagtaacctaaaattctcttcttgtcaaaggaaacacagagatatctttttctttttcttttctttttttttttttttttttgagacggagtctcgctctgtcgcctaggctggagtgcaatggtgtgatcttggctcactgcagcctccgcctcctgggctcaaacaattctcctgcctcagcctcctgagtagctgggattacaggcacccaccatcatgcctggctaatttttgtatttttgtagagacagggtttcaccatgttggccaggctggtcttgaactcctgacctcaggtgatcccgcctcggcctcccaaagtgctgggattataggcgtgagccaccatgactggccacagatatcatttttaaggcaggaaagaagaaaaaatatatatagaaaaatagcactaattgaaaatttaaaagtaagatattagaaagaagtgtaaatatattaataatcacaataattataaatggactaaacctaccagttaaaagagagatgtcaaattgaatttttagaaatcaagcaggtgccatttataagagaaacatggttcaagcataaagacatggaaagatagaaagataattttgttaaattatcaaacactacccaaaagaaagctggtataactatttagtatctggcaaagcagtctttaagaccaagagcctcattctagacacagagggttacaacataatgataaaatgttcaattcactatgaagattgcaaaggtgaaacatttatacacctaataaaacaccctaaaaacatgtaaagcaaaaatagatagaactaccagaataaattgacagtcagcttcccatttgggctgattttctattcttaggaactggtcctgggatcagtaaaccactcattagcctctttctctagccacaaacactcctgtgctcctggacaacaggaacactttcactgttattaactgtgccgtcttcactcttggctgtgacaagattgtgagaatttgttcttttgactatttcttctgcagcgctggaggtgagatttccccaagcctttgtggctacagtgtggtgtcttaayttgggcaagtcctttgacctctttgggccacaatttcccatgggagctttgtgaggttgatagcagtatgactccggtatgtgattgcagccttgagccttgccctgagcgctgagccatctcctctactccacaggtggggaatagcagcatagcctggtctcttggctacatgctcagcctgaccaaccagatcccagctgaaagccctctgatccgtctgcccatagaaccacctgtctttgtgggcaccctcgctttcttcacagyggcagccttgctgtgtctggcatttyttgcatacctgtgttcagcaaccagaagaaagaggcactccgagcatgcctttgaccatgcagtggattctgactgagccttcaaagcagctcctggagtccaatggctgcttagagtcagcctgggtrgcaccaggcaatgcaggtgaagtggctgccttcaggaaatacaactaactaaaatcaaacacctaggtcacgtgcctctcaaatactgatttctgccacagcacctcttgaggcatcccttggctattctgtgcatattgttcttcagagacctcactacccacatgctgatctattggggaacagagaagagacaggccacgaaggtcaggctctttatattaagttccccagaggaagagtaagttgagaaggtatcagtttaatgttgaagaattgacctcagggctcagtttccatttccctccctcagtattcttcctggcaagatacccattaagcatttcgccaatcagaatctcattttatagtttttcccattggtctttaactaagactttcttgtagcaatctcgtaagcagtgaaccccctcagatcagtagaatatagtatctgggggagaagacttacttccttcagggcagcagccacagccaggcttctgtcatacaggtagatcccgaagcacagagacataaaaaaggtctcccagaaaactatagaccattctccaagtggaattcccacttagggctctggtcactagattgcaacctgtgtgtttgtcatcatcctcatctcaccattgtattgctatgccctcccataaaaacacattgatccctagcaagattattgcattccagattttactgcctttgctaggcttttgcttagcaaagggctgactttccattgttatcatggtgtatatatttttgtcaccattcccacaagtatacttgatgttgtcatagaacgaacatcctactctatgatttactaaccaattactttcccagatcatagacctctctgcatagtagtcataggtcttgactttggggaaagaaaaggaagctgcaggaatatttatctccaaagtcgaatgagaaagaactccagcaaatccaatggctacaaactaaaaatcagcattatttcatattgctgtttcttagctgaatatggaataaagaactattattttattttgacttgcaaggggtgtgtgtgtgttaacttccatatggtactctttctcctaaggaccctaggtgatatttatgagagaaatttttttccctagcaaattaagaaacccattcattaatatcacctttattccagagagttcaaagtgcttttactttgataaacctttgactgcttgagattattgagtcaagcatttctgtaccttatttgaaattctaagcctctgtgagtccacaacctgacactcaaatcttggttctcatccagaacggctactcctatcccaaactgtacctttgctcccgccatcctctctactatattatagatcctcctcccacccatccaaatcatgtatgtttctcaaggtccagttccttcatataagtcttccacaaagctttccttgcacacacatactatgctctatctcctggaccactttttcaaaaccagccacgtaagtcctcatattgttatttatcttggcatatgtgtacagcttatttctaaaagacagagtaggctacttaagggcaaagcctattgtacatcactcctcatttattcaacagacatctaaaaacacctattatggctgataccttttacgtgtgattttggatttggacatatgctatgaacatagtatttattcatatttgttgattgaggttgtttccatgagtgactaagaaatgggcaataaactatagagatagcagggaaaaaacagcatccaaatcaccaagagtttgcaagaaaaaaaatttgtatgtgcaagaaagagagccaaagctccatgaaggcaaatcctagtcaacatttctaactcatttgggaagttagaataaactgaggtacttcaggttttctgacacacaccgaagaatttttgactgggtgcagtagctcacacctgtaatctcagccttttgggagtagctgaggcaggagggattccttgagcccagaagttcgagagcagcctgggaaacgtggcaaaacctcttctctccaaaaaatacaaaaattagccagaagttgtgggcacacctggagtcccagctacttgggaggttgaggtaagaggattgcttgagcctgggaggtggaggttgcagtgagccgagatcatgccgctgcactccagcctgggtaacagagcaaaactatctctctctctctctctctctctctctcwcacacacacacacacacacacacacacacaagaatttttatagatagaccattgtgaaatctgcagttcaagtggcatatctagcactgttactgtggtgaacagaatactccttccccctctggtgttactccaattatgtggttacattgtcacatggcaaaaggattttgcagatgtaattacaaatcagttgaccttaaaatggagagcttatccaggtaggtctaacctcaccacatgagctctttaaaggcagagcattttctccagaagacraagtcagagattcaaagcatgagaagaattccacatgcagttgccggcttggggatggagggcgccgtgtgcaaaggccctaagtgcagcctctagaaactaacagcaatccctggctgcatcagcaaaaaaccaggaacctcagccctacagctgcaaggagctggattctgccaacaacctgaatgaacttggaagcatattttcccccagagctttcagataagagtccaggtcagatcatatcttgatttcagcctactgagaccctaagtggagaacccagttgagcccactctgacttctgacctacaaaactataaagtaacaaaaagatgacgtttaaagccactaaatttgtggcaatttgttacacagtcacagtaaactaatacaactatagaaccccaaaccccaaagctccaaccaaagcaagtcttttgatttgaaatatgtgaagataaaagtgatgagtagcacaaatagtgtctattcctaatcacagctatgtaaaaaaagcatgggttcagaggtaaaagtacctgacagcattactcagtcactgagtgatttggggaatagggatcggggcttgagctttgggcctggttgagtctaaaacccattgcataactttgcctttcacacagaaaggcagtatcatatagtagttaggaatttggctttatatttccgtagtctaacatacccattcacatacagacacctgatttataacagaggtgtcacatcagagcagtgggaaaatgcaggacaattggatatcttaatggagaaaaaatgaatttgaccctttcctcactccacttgcaagaaatgtttccaggtagcttaaagacctaagtgtgaaaaacctataaaggtttagaagaaaatgtaggagaatatttttaggatactgggtaagggaagggtttcttaaacactacacaaaaagcattaaccataagaaagtatttaatacattaaaatgtaaaacttctgttcctcaaaaaacatcattaaaagagtgaaaagacaagccacagagtggaagaaggtatttacaacatatataactgataaaggactactttccaaattatatgaacaacacttacaaatcagtaagaaaaaggaagatgattcaatttttctaaacaggcaatagtcttgagaagacacttttcaaaaggagacaactaagtgtctaataaacataggaaaagatgctcaatctcattattgggataatgcaaattaaaactacagagaaatagtacaatatgctcattcgtttggcaaaacttagaagtctgacaataccaaaattagtgaggatgtggaactggaactctcctatactgctgtaggaatgtaaattaatgcaaccactctggaaaatggaggtattgtctaataaagttgaagaaattccagtccaaagtatataccttagcgatatatagtcttagatataccaggatacatgcctaagaatgttttaagcagcaaccaagatgcctatcctacggaataaatgaataaataaatagcgatacagccatactagaaaatactgtacatcaatgaaaacaaaagaactacataatcaaaaggttttttgtttgtttttgttttgttttatttttgttttgagatggagtctcgctctgtcacccatgctggagtgcagtggctcaatcctggctcgctgcaacctccacgtcctgggttcaagcgattctcctgcctcagcctcctgggattacaggcatctgccaccacgcccagctaatttttgtatttttagtagagacagggtttcaccatgttggccaggctggtctcaaactcctgacctcgtgatccccctgcctcggcctcccaaagtgctgggattacaggcgtgagccattgcayctggcctaatacaaaatttaaaaacaggcaaaactaaacacagaaggttaaacgctaaagaaaagcaaggaaattattactttgaaatttgggaggagatggaggctgtatctggaaaaggataaatgggtgtcttaggctgcttgaactgccataataaaatactataaattgagtggcttaaacaacagaaattaatcttctcacagttttggagcctgggaattccaacatcaaggcatcagctgactaattcctggtgagggctcaattcctggcttgcagatggtggcctttatgctgtgtccacacggcctttcctctgagctctcagggagagagagtgagagagagagagagggcactctgggatctcttctgacaagggcattaatcccaccatgagggccactccttcataaccttgtctaaccctagttatctaccctcccaaaggctccatctccaaatcctacactgggggttagggcttcaacatataaatttgggggatcacaaatattcagttcataacaacagggcttctggggtgacagtgttattctacaactaggtagtggttacagatgttccctttttcaaccatttatacatcatctgtatgtcctatactacaatataaagtgacagatctgggttaactcaagaattttctccttattacctctatggttttcatcatatctttcagtctccttgagtcttgacttcctccatatataaaacaggcataatacctacctcatgggatagttaagagaaaatacagcacttagccagtgcctgacatggatgtagctaataaatacaagttttaaaacatatttatttcacccatttacttattcactcatgatactttcaccaaaagtctactgtgcgacaagccctgagctaaatgactaagggtgtaatagaaatgagacaactgtcttttctctcgaaacatgagacttgaatgccctctgttggagctatggaaaaaattcttcccagggtgagcctcccaccctttttttaaacctctctaaaggtattagaaaaaaaaatcattagttcaaaaatagttttaatagtataaaataaggagataattggaaatctgaacactgaacattatcaaggaattcctgttaatttttgtttaggtaaaataatggaaccggcctggcgccatgactcatgcctgtaatcccagtactttgaaaggctgaggcagatggattacttgaggtcaggagttcgagaccagcctggccaacttggtgaaaccccgtctctaccaaaaaatacaaaaattagccaggtgtggtggtgcacacctgtaatcccagcttctcgggaggctgagccaagacaatcacttgaacctaggtggtggaagttgtagtgagccgagatcacgccactgcactccagcctgagcagaagagcaagactctgtctcaaaataagtaaataactaaatgaaataatggtatcttggatttttttttcaagaacccttgctgtttagatcaatggtcctcaacctttttggcaccagaaaccggtttcaagggagacaatgtttccacggacagtgtggggctgggtggggatgcacagatggtttcaggatgaaactgttccacctcagatcatcaggcattagattctcataaggagcaaacctagatccctcacacacgcagttcacaatagggttcgcattgttgctgatctgacaggaggcggagctcagrtggtaatgctggtttgcccgctgctcaacacctgctgcgcagcccggttcctaaacaggccacggaccagtactggtctactgcctggctgagggttggggacctctggtttagatacttgctgaactgtttccagatgaaatgatacgtctggcgtatcagtcaaagttcaaccagagaaatagagccagtattaagagatctattgcaaggaattggcttgtgagactatggggctagctaggcaagtcctaaatccacagggcaggccatcaggaagagcaggctggaaccctcaggcatgaactaaagctacagtccacagatagaatttcttccttctcagagaagtcccagttctgctcttatggattttcaactgatttaatcaggctcacccagattatctaggataagtccccttaaaaatctactaattatgggcagtaatcacacccacaaaatactttcacagctacacctagattaacaaataactgggtgctatagtctagccaagttgacacataaaattgaccaccacatctgtgaattgattcaaaattacaggggagggagaatgtaggggtagaactggcccatactttgatggtccttgaggttggggtgatgagacataggagtttattatagtattctatctgctttgtgtatgtttacaattttctaaataaaagttaaaatacatattttgaggccaggcatggaggctcacgcctataatcccagcactttgggaggctgaggcgggcagatcacctgaggtcaggagttcgagaccagcctgaccaacctggagaaaccctgtctctactaaaaatacaaaattagctgggcatcgtggtgcatgcctgtaatcccagctacttgggaggttgaggcaggagaactgcttgaacccggaaggcggaggttgtggtgagctgagatcatgccattgcactccagcctgggcaacaagaatgaaactgtctcaaaaaaaaaaaaaaaaaaaaaaaaaaaaaaatatatatatatatatatatatattaaacacgcagaatctcactgctgtatatttgatatttttctttctgaatctttttctctacatatttgtacatagttaagatcatgctggaattacaattttatatttccttcgttcacagcattataccattagcattttcagatctcattaaaaattattcccaaatatcaaacaaaatgattaagaactcaggctttcacatcacaaaaacctggttcacacatcctagttctgctgttcattgttgtgtgatctttgtctaaaaatcttaagttttctatgcctcagtttcctttaatacagccattcaattcaactgcttgttcatttgttcattcaactaatattgattgaattcatcctctgagtaagatcctgtgtaggtggcataactccaccaattaacaatgtagacaaagtccttgccttcagggagccaacgttctagtgggggagacagacactaaccaactaaatacacactgtacaggggattataagtgatctggagaaatataaagaaaagtaaggggaaaggaaagtgccaggagcatgagatggggacgccattaggtcagaaaagtcttttcagataaggtgacgtctgaacgaacacttggaaaatgtgaaggagtcggccatttgaatatctggaggaagagcattctaagcaaaagagaccacaaatacaaaggccattgtgattggagcagaataaatgactggaagatggaggagatagggtaagggagttaagacggagtagatggtgcaagggggccccatttagagttctgaacaaaggaggggtatctggcttctgtttctagttacagtgataaaaaacaaaggagacaagagcagaaacaggaaaaccagttggtgggtgattttaataatccagatgagaaatgctgatggcttggatcaggttggtagcagtagaggctgtgagcaatggtcagaccccggatatatgtgaaagtagagcccacagtgtttgctgatgaatgtacatggagtgagagagaaaaagaggggttaaaagttattccaatatttttgcctgagtgactgaaaggatagagttgctattaaatgacatgtgaatatagcagggagagagggtttagtaagaggaaggttaagatccagactattttcttaaaaaaacaaaaactgtttataccagcacatatccataagcatggagagaaaagaagaaaagaaaacaacaaaaacattttggcatggtggaccaggggtaactgacttagcagacccaagaaagcacaatcctaaaacaatgagaaaataaaaaatcaaccaatgtaaacagcagtgttctcaaaaagctcaggaatctgtggcatcaagtacagctgcaagttgggttggcaagcacaaaataaagataattaaagctgtttaagaatagtgattctggccaggtgcagtggctcatgcctgtaatcccagcactttgggaggctgaggcgggtggatcaygaggtcaggagttcaagaccagcctggccaacatggtgaaactctgtctctactaaaaatacaaaaattagccaggtgtggtagagcacctgtcatcccagatactaaggagactgaggcagctgaggcaggagaatcgcttgaacgcgggaggcagaggttgcagtgaaccgagattgcaccactgcactccagcctgggcgacagagcaagactccttctcgaaaagaaaaaaaaaaaaaagaatagtggttcctagataccttctactctttgctgatgagtgactgcctcttcctaacccaagcacaggaactggaaggcacaaggcacagttacaggtggaggtgtcataccaaaacaacaagattaaggaaaccaaggcatattcagtgtttagactccaagcctctaaccccatcaactcccaggttctaggttaactctaccctctagtcaggactttggaagattcttttgtgaggaatccaagaagtccaggagaaaggacacaaatgtgctggcatttgcagtttgctagtcagattatcctacagtgaagcttgaatcaataactcaaaacttccaatcagctttttatcccctcaccttaaacagaaaacaaacgaggtgccaggagtggtggctcgctcatgcctgtaatcccagcattttgggaggccaaggcgggtggatcacctgagctcagcagttcgagaccagcctgaccaacatggtgaaatttcatctctactaaaaatacaataattagctgggcaggatggcaggtgcctataatcccaacttctcggaaggctgaggcaggagaatcgcttgaatccaggaggcggaggttgcagtgagccgagattgtgccactgcactcgagcctgggcaacagagggagactccatctcaaaaaaaaaagaaaagaaaagaaaaagaaaaagaaagaaaagaaaagaaaagaaaagaaagaaaraaaacaaggcaagtatttaaggacagcccccactgttgttctagtcaggcatcaggaagatatgcacttagatatcagtttgtgttttatcagccatttttacccagaagtctgtctctcttgttattgttacctccctctatcttctgtcatctgctttcttcttttctaaataaaagtagagttccaagaagcccatgtttttattttattttattttatttatttatttattcatttattttagagatggggtctatgttgctgaggctggacttgaacccctgggctcatgcaatccttccttctcagcctcccaagtagctgggactacatgtrcacaccactatgtctggcaggttcctgcttgtgtccctttgctcttatctgcttaaaagtcacctctgaatcatcactagaacttgacttctcacagatgaaaaggcggtgtgatgaatacaagtaaagattgggatgatgcacttgaaagatggaggaaggggcaagtcaaggaacataggtggccatgagaagctgaaaaagcaaggaaacaaattatcccctcagagtctccaaaaggaacctctaaaagccaaaacgttgactttagcccagtaaaactgaattcagacttctgacctttagaactgtaagagaataaaacttgttttaagccattaaaacaaaacaaaacaaaatttgacctctcacaacagagaggaagtcttactgcctttctgtagatttcagaaccatggtcagggatccaaatacactctatgagggtgacatgggctccatcacacactccagaaaggagtgtaaattaatctaacgttccgaaaaagtagctataatatgctgcaagattttaaaagtgcacattcctcaatccaacaaccgtatttctaaaaattaattctaaggaaaccttttttaaaaatacggacattgttattacagatacatattgaaatatttatggatacactgatataatgtctgggatctgcttcacattaatcctgtttggtgagcatattcacattttctcataggggagccactaggcacatatggctattgagctagtccagttgagatatgcaatgaatgtaaagtacacactagattttgaagacttagtaccaaaaaaattaaaatatgtcattaataacttggaaactggttatatattaaaacaatattttggatacattgagtaaaataaaatgtattattaaaattaatttcacaggccaggcacaatggctcacacttataatctcagcactttgggaggctgaggtgagatgggaggatcacttaaggccaggagttccagaccagcttgggcaacacagggagactctgtctgtacaaaaactttaaaaattagcaggcctgttggcacatgcctatagtcctagctactcatgaggctgaggctggaagatcggttgagtccaggaatttgatgcttcaacaaactatgattgcaccactacactccagcctgggcaatagagtaagaccctgtcttaaataaataaataaataaatttcacttctttctttcatatttttcaaatgtagctactagaacattttaggttacattaagttaggttttaaattacaaacatggttttcctttgtagtttacattatatttttattagacagcactggtatagaatccatatactatagataaaacaagatggcccattaaacatgaacatctttggatacttgaccaaaaatggctattgttgaaactaaataatgggtatgcaggagtttattataccattttctttacttttgtacatgattgaaaattccataatgagtctgggcacggtaactcacacctgtaataccagtactttggaaggccaagacaggagaattgcttgagctcaggagtttgagaccagcctaggcaacataaagaaaccctacctctacaaaaaaaaaaaaaaaaaaaaaaaaaaaaattaattagttgggtgtgggtcacgtgcctgtagtcccagcttaaccagaaggctgaggaaggagaacagattgagcctgggaagtcaaggctgcagtaagctatgatcgtgccactgtgctccagcctgggtaacagatcaaaatcctgtctcaaaaaaatatatattacataatgaaagtttaaaaatatgtgactaaagctgctttcagaaaaataccaatccctatttatataatagtaaaaagtgaaaaagtaagcccgatcttcaatagcagtagaggaatggcgaggtgaattatgttcatctatatgctatgctaaaagagtatgatgcagccattaaataataaaataaaaaataacatctaacatttgaatgcttactatattccagacctgtgctaagcaaattatatgcattacatcacttaatttttataacagctctctgagttggataaaatttttattctccaacctcttcccttgactccaaatttatatattcattagcctgccaaaacccattagctagattatatggataaagagcctaacaaactaaaagaaaaaatgaattggcagaaacagaaactatgcaaggaaaaaaatattttaaacaaaaaaaagaaactcattaatattataagaaaaataagggacactgcatcaatgaaatagaaacaatttttttctttttctttttttttttttttaagacaggatcttgctatgttgctcatgctggccttgaaaacctgggcccaagcctcccacttcagcctcccaagtagctggaactacaggcacaccccaccacatctagctcagaaacaatttttttwaaaggaaagatgagatattcagaacaaagaaacagttcttggaaatttaaaacatgatagcagacattaagaactcgctagaagggttgaaagatagcattgaggcaaaccctcagaaaggaaagaaaaaacacaaagaaatgggaaaaagagtaagaagacaaaattctaagactagcccaccaaaacccccatctgaataacacaagtttcaaaaagaagaatcacccatgaaatacatggaaaattttaccctgaccagaaggatatggacatgattgaaagggcccagcccaataaataaaaattactttacaccaatgtacaatgctataaaagttcagaacattaaaaagaaaaagaataccccttataaactttcagagagggagaaaaaaaaaacaggccacatacaaatgatcaagatgagaatggatttagttttctcaacaataactctggaagcaagaagccaatggagtaatgccttcaaaattctgagggaaaatcatgtttgagctagagttctgtatccagccaaaaatgatcaattaggtatgagaatagaagagagacattttctgacagcttccttttacagggagctaactggaaggtgtgttccaccaaaagaagagactaaaccaaggaaacaaaaggcatcgactccagaaaaaaaggagatccaatatgggagaaaatgggaaggaaatctccaggatggtgatgaaggtgtagaggggaccagccagaatgaagtgactcagtagcctctaaaggaaatagccaatagacacatgaaaaaatgctcatcatcactggccatcagacaaatgcaaatcaaaaccacaatgagatactatttcacaccagttacaatggcgatcattaaaaagtcaggaaacaacaggtgctggagaggatgtggagaaataggaacacttttacactgttggtgggactgcaaactagttcaaccattgtggaagacagtgtggcaattcctcaaggatctagaactagaaataccatttaacccagccatcccattactgggtatatacccaaaggattataaatcatgctgctataaaaacacatgcacacgtatgtttattgtggcactaytcacaatagccaaagacttggaaccaacccaaatgtccatcaatgatggactggattaagaaaatgtggcacatatacactatggaatactatgcagccataaaaaggatgagttcatgtcctttgtagggatatggatgaagctggaaaccatcattctcagcaaactatcgcaaggacagaaaaccagacaccgcgtgttctcactcataggtgggaattgaacaatgagaacacttggacacaggaaggggaacatcacacaccggggcctgttgtggggtggggggagtggggagggatagcattaggagatatacctaatgtaaatgacgagttaatgggtgtagcacaccaacatggcacatgtatacatatgtaataaacctacacgttgtgcacatgtaccctagaacttaaagtataattaaaaaaaaaagatgatgatgaagttgatagaactttacatctgggccatgcgtggtggctcatatctgtaatcccagcacttggggaggcaacctagtgagacccccgctctaccaaaaaaaaaaaaaaaaatggccaggtgtggtgatgtgtgcctgtagtcccagctccttggaaggctgaggcaggagggttacttggagcccaggaggtcgaggctgtagtgatccatgattgcaccactgcactccagcctggaggacagagtgagaacccatctcaaaaaaaaaaaaattgtgttacactcatgcaatggaatactactgagcaataaaaaggattgaactcctaatacctagaataacatggatgactctcacagacataatgttgagctgaaaaaatcagacccaaaagaatacatactgtatgatacaatttatatgaaggccaagaataaacaagaggaatctatggtgatatagaggcacaatagtggtagactccaggaaatgaagttaagaagaaagagggaacttaattcggccacagaaatgttctgtattttggtctggatggtggttacgaagtggttcatgcctgtaatcttagcactttgggaggcttaggcaggcagattgcttgagcccaggaatttgaaaccagcctaggcaacatggcaagacctcgtctctacaaaaaaatacccccaaaaaaattagccaggcatggtggctgtacctgtagtcccagctacttgtgaggctgaggtgggaggataccttgagcctgggaggtggaggttgcagtgagctgagatcatgccactgcactccagcctggtgacagagtgagcctctgtctcaaaaaaaaataaaaaataaaaaatagaagggtaacctgttgacaagaacttccagcccaggattttatacaagaaggctgttttctgtgtaagcaaagcagtttattttaacgttttatggtttctcctaggaatatgccattgattaaattatgaaaaagctttaggcggagcacggtggctcacgcctgtaatcccagcactttgggaggtcaagacgggcagatcacctgaggtcaggagctcaagatcagcctggccaacatggcaaaacccagactctactaaaaatccaaaaattagctggggtggtggtggcttcctgtaatcccagttacttgggaggctgaggcaggggcatcgcttgaacctgggagggggaggttgcagtgaactgagatcaagccactgtactccagcctgggcaacagagtgagactccatcagaaaaaaagaaaagaagagaaaaagaaaaaaaaagatacttggctgggtgcagtggctcatgcctgtaatcccagcactttgggaggctgaggtgggcagatcacttgaggtcaggagtttgagaccagcctagccaacatggtgaaaccccgactctactaaaaatgcaaaaactacccaagcatggtggtgcacgcctgtaatcccagcaggagaatcgcttgaacccaggaggcagaggttgcagcgagccaagactgtgccactgcactccagcctgggtgacagagtgagactccatctcaaaaaatatgtatgcatatgaaaaagttttagggccgggcatggtggctcatgtctctaatcccagcactttgggaggccgaggcaggcggatcacaaggtcaggagttcgagaccagcctggccaacgtactgaaaccctgtctcaactaaaaaatacaaaaaaaaaaaaaaaaattagccaggcatggtggcaggcccccgtaatagcagctactcgggaggctgaggcaggaaaatcgcaagaaaagaaaggaagaaagaaagaaagaaaggaaaggaaaggaaaggaaggaaggaaggaaggaaggaaggaaggaaagaaagaaagaaagagaaagaaagaaaaggaaagaaaggaaaagaaagaaagaaagaaagaacaaacaaagaaacaaagaaagaaacagaaagagagaaaaagktttagacccaatttatactttccatgtatacctcctcataggctaatttgttcctcagtttggcggttttttgattgtttctaaaatgctgtttctaaaagaacacttatctgccctaaaatgacatttttggggttttgaacaaaatccccagctggtgttttgtgacattgcaggaacaagcctatgttttcctgtatagatttcagtgactacttatgactatcatttccatcctatttcaactgtgccatttccatataaagtcttaagatttaaaatttcacatcctatagcttgctgctgcccacataacatgtgtaaagtagtaagtacccatttcctgatatttacttttgcttttttccatagtaatagttctagaatatctgatttttagcaaggctcatagccaccagaagtggagactcaatttcccagcattgcttgtaggtttggtaatgaggctgagttctggccaacggaaaggaagcagaagtgtcctgatatggcaaccaagactcttcctgagagaacagtggacacccatcttttgcccttttcctttatcctgctgcaaagtgtaagggcaggatctgtaggcctgaagtaatgagaataagagccacctcatggatgttagggatgtagggagagtaagctgggtccctgagctgagggaccaggccagctcaggacccccacaaaagaggaaaataaatgtttaagccacagttattgagagactctataactcattgctaaaattgatgcacactaactcccctccagatgcctcttctgggtctgatgccaccactaatgggccaggtgaccagaattgaatgtaatcaacttcttcttcagatgtgaccctatgatttcgctcaagtttcctgggctctccatgtcctgctcatgctgaagctccaacctgtggatgtatcctcaaactcattctttcaaaatggtcagtagagatttttattttcaaatgcccaaggggggttgttgtgcacaaatggactatcaacagttactagccattaaaataatatttaatttttaaagtcttatgtttaaaaacctagattttcttaaaccttttatttcaacttgtaaagttattattctgttttataggtagtaatttttatgtaaattagaaacaataactttagcttgctctatgatgaatgttcaaataagtcaagtctaagagattaaatttccagaaacattagcaccacttaaaatcatgattaattaaatcccctgaaaactttaagtctacttcattaatgtcatattggtggcagcagtgacccatctagagtggccactgccaagacatcggctgcagcagggaggcacggctggggttgtacactccatggaacaggcagaagccctgccctccccaggtgccactgcagctgcccaggcccggctgcaaacccaggcatctctgtgctcttgggggcccaggaaggcccccctgcgaagtgtctgctcccactgcctggcctctccctgctcccagtgcccgctccaatcatgaagcaaggttggggccgaacccgggcactgtcacagcccagccaggtgggcacacactgaggttggcactgacacgccagacccctgccaccttggccccttccggactttgggcactgacacatacaggagggaagccaagcaggggctgaggacagttgaaacatgatgaatgtgttagatgtttttaaacattagagatactttaataaaaaatactcagagattggctacawttaacaacaaaatgtattattatgggtttgatttactaaatgatggctctatgttttccttgtgttgcagactctctcacccaactttagtagcatagcctggatcacaggtgagccgagatgaatgggtcaaaggtgtaggatagcaatataattacccacacgtcagatacagatgtttaagtccaggacacaggagctggctccacatacatcatggatgattctaccttagccacaacttaaaacacagaatctccatttgctatttcaacaagctgctccaaacctttcagacaggatttagtttcacaattaataaactacttaacccatttattcaacacatattactgagcgcaagcaattaatgaggcaatgttcaaggcacttgggttacaggaaagaacaagacaacgttttctgctttctcagagattaaattttagtaggaacagacggagggaagacaacaaaataatgatgtaataaagcaataaattattttctgtcagaactgaaagaggatagccaggatgggcctcactgagaaggtgacatttgagcagacttgaagaagatgcaggagccagcaggcaagatatgggagcccttgagggaagagtgtcctaggagaggggacagtcagtgtgtgggctccgggcagcaggttgcttgccatactgaagaacagcaaggaggccagagtgctggaagaaaatttgcaagggcaagagtgataggagatgaggaaagagaaaggataggggatcagaccgtgaaaggccttgcaggacacttagcagggaggtgagtgtcatgatgatctgacttatgttttaaaaggatctctgactgctgtgtggacgacagattgtagtgtaaaggtcgaaggagggagaccatgtaggaagctgtattaagtatccattgctgtattaacaaatacctcaaaactttgtgacctcaacagcatttattatctcactgcctctgtaggtcaggaatctgggcacaatttcgctgagtcctctggttcagggtccttcacaggcagcaatcaagttgtcagccagggctacagtcatctcaaggatccactgcagaaagatccacttccagcttcacttgggcaactgtcagcaggattcagtttttttcaggatattgtatcctgggcctcagctcttgtctgttcagggggyttctcattttcttgccatgtggggctctccaccggagagctcacaacagggcagcttgcttcatcacagcaagcaaacagaaaagagagggaggcagagaaagagaaagaaaaacagagagacaaacagaggtgtcacagtcttttatactctaatctcagaagtacatcccacaacttttgtcatagtctatgccttagaagaaagtcactaagtccagctgtttctgaaagggaagggattatgcaaaggtgtgaataccagaaggcagaaatcactgggggccattttagaagtgtccaccacagaggctactgcagttatccaaacaagagatagtggtggcttgcacaaggtttattataacagaggaggagagtagtcaggttcttaataaaattttaaaggtagagccaacaagattttttgtctsactggatatggggtgtgaaagtgaaacatcagctgggcaaggtgtctcacacctgtaatcctatcactttgggaggccaaggtggaggatcacttgaggtcaggagttcaaaaccagcctggccaacacagtgaaaccccatctctactaaaaatacaaaaaaattagccaggtgaggtggcgggcgcctgtaatcccagctactcgggaggctgaggcaggagaatcacttgaacccaggaggcagaggttgcagtgagccaagatcgcaccattgcactccagcctgggtgatggagagagactacgtctcaaaaaaacaaacaaacaaacaaacaaaaaaacaaacaaaaaaaaaagcgaaggattgagggtgacttcagggtatctgctctgaacaactggaaggatggagttgccattgacacagatggagaaaactaaacagtaaggtttagtggattaatagggaggggttgctgaagatcaggagctctatgttggtatgttaagtttgagatcaccaacagatgaatggataaagaaaatgtggtacttatacacaatagactgctattcagccatcaaaagaatgagattctgtcatttgcaatagcatggatggaactggagatcatcacgttaagtgaaaataagccaggtacagaaagacaaacatcacatgttctcacttacttgtgagatctaaaagtcaaaacaattgaactcatagggatagagaatagaagatggttaccagaggctgggaagggtagtgagtggtgtggtggggggaggtggggatggtgaacgcatacacaagaaatttagaaagaatgactaagactagtatttgatagcacaacaatgggactatagtcaataatttaattgtacacttaaaaatacctaaaagaggccgggcgcggtggctcatgcctgtaatcccagcactttgggaggctgaggtgggcggatcacgaggtcaggagatcgagaccatcctggctaacacagtgaaaacccatctctactaaaaatacaaaaaattagctgggcatggttgcaagcgcctgtagtcccagctactcgggaggctgaggcaggagaatgacttgaacccgggaagcrgagcttgcagtgagctgagattgtgccactgcactccagcctgggcaacagagcgagactccgtctcaaaaaacaaacaaacaaacaaaaaacctaagactataattgggttgtttgtaacacaaaggataaatgcttaaggagatggatacccgattttccatracatgattattacgcattacatgcctgtaccgaaatatctcatgtaccccacaaatatatacacctgctatgtagccatgaaaattaaaaatacaaaaaaattaaaaataaaattaaaaataaaaaaagtttgagatcatgatctgacaactaagtatatcacaagtccttgagctgtccttcaagttctctttaatttttatcataacttctttcaactcaggtttgagtagatgcaattttattcctcgactaggatcgctgctaatttcctcaatctaattggatccacctaacaactttacaccctcaatggattctgcacggttaagagtatggactctgggtctgaaccatgcactgactagccatctgagggggcacaagttatttagcctccctatccgtttcctcacctgcaacgtaaggataataatatcacctctattctagaggttacatcttgggcttttgcaaggattaaacaatttaatatttgtaaggcactcagaatggtgcctagtgtttgttagaagtgctataaggactagctacacaaatgttctatgtgagtgtgtgtgtgtgactggttctcagccacaattctggagtcacttgataaaaatttaaatactggtcttcccaaaactgatgttgtctcttggaaggcttttgatcaactacaggctctcagaaaatatggacaaaggygcaagaacccctccaaaactggaataaatacttgaagatattagggaatttttgttaattttcaggtgtgataatactattggggttatatttattttaaagaaatcatcgtttagatacatattgaggtatttatggctaaaatttcttgaattggcttttaaaataaaacagaagacagagtagtaaatgagtagaaatgaaataagattggccctgtgtggataatttttgagaaagtgtaatgtgtacatgggagtttattatacatactattctatttttgtatatgtggaaattcttaataatagaaacatttttgatccaggatctatgccaagagaaatttaagccctagtactgcttcccatggtaaatatttggtacaacttgggttctgaatatttattagcaccacagtgacctctgagacagtgtccctgctggtatggagacatacaaaacacaggttttcaggcccaacattgtccttttaacatattactactgcctttaatgaatgttaactcatgtaatcctttaaaaaaaaaaaaagccaagatgtaacacccatccaacttgtctccagctgcaaccttgcctcctactgtctatgatgaggagggcattcttaacccaacagcctgtaccatctttaaaaacatgtcagatcatgtcactgctccatttaaagcatccactggctcctatcttgagagtraaagcaagtccttccagtggcttccaaggttccacatgccctggctccttcatcttatactatctctccctcaatcaccccacttcagcctcattggtcttcctgctcttccacacgcatgctgagagagaacttgctgttccctctgcctggaatcccagacatccacatgaattgctcactcatctcctgaagttctctattcaagtgtcactttttcctcaaggccttccctcacttccctatttaaaataactaccctttccccctaaagcaaatccaccctagtactctccatcctcctttttatttttctgtggcacttaccaccatatgacacactatttgtttattttctgtatctacccactagaatgacagttccatgagagtagaacttttgcctgttttattcactactatgtcttcaatgccttgaatagtttctggcacacacgaggcatttagtgtttgctaaatgaattaatacatgctcattccttctagatggcaccacgttagcatctcttctccctgaatgccctgtcactcattctgcatccttgttcaccactatgttcactatgctgcattatccagcacctgtccttgtagtcattccttttggggagagttgtttccatggtgacacaggagcttttcacctacttagcaggcctctcagaaagctctttgcaccmtggttctatttctagtgttgttaagactccaacacacacagaactttccattcctatcctggaaagcattctcgatcagtatagctagctggtgcttttcagcagttctgcaggcaggtttatttaagcagacctcttttgatagacatttagtatgttctaaggctttgccttttcattcattcactcaaaatatttataaagggcctattccactccaggcactgttttagtcacctagcatacaccagtgattcaccctggtttcccagagttgaattatcataaattactccacctattgtttatgttgttgtgaaaagtgtcaaagatcttgatcttgcttgctgatctctagctcctgactttgcagcccactgatgcgaaatatgtacagttaaaaaacaaaaaacaaaaaacaaaacatggcgcggtgcagaggctcacgtctgtaatcctaacactttgagaggccaagaggatcacttgagtccaggagtctgagaccaccctggacaacataatgaaaccctcatctctacagaaaattcaaaaattagctgggcatggtggcacatgcctgtagttccagctacttgtgagactgaggtgggaggatggctcaagccagcaagtcaaggctgcagtgagctgtgactgcactccagcctgggtgacagcaagactctatctcaaaaaaaaaaaaaaaaagtacagaaaccaacactacctccttgtttgttaaatacaatggacagaccacacacacacacacacacacacacacacacacacaaaagcctatctaggcatttggagtgttggacaaacttgtactactgaggagttgggcactgcatcccaagtgtcctgacccattccagagtctatcagcctctttgggaacaggaagttggaagtgggcaatcactgaattgctaagatgaccttcatttgcttctcactcagatttctgtaataggccaatgttcctcttcattatggacatttttgattccagagtgtgtcattacctgtggtttgtgagcttacctcctgctttgcaaaagatctagaacttccccattgatataatgctcagaataccttcttgctataccatcagcattcctaaggaataagtaaatacaagctcagttgagaagaaaaatctgcatggttattcatcaggcaggaaaaacaaatacaaataaagacagctgcaaagttaacaagaractattgctgccaaggacatgcttaatctttagtgtcataataaccctctttgagtgactactgctttctcactttctcactgagaaactttgttcctaaaatcaaagaccctcagaaatttgctgtttgaaattttatcagtaggaataaaatatcttgcttggaggacctaagtcactttaacacagagatacagcttcaatttacaagcagccagttgcaaagcttcagaaaaggttttcaaaaaaacaggacaatgggtccactctgcagtctaggcctgatgttgaccctttttcacagtcctgctttgttttgaggctattaaaaccctgcttcatttaagttccatctaaactttacacttcctcaaaatcctgtaactttatattttccttcccctggtaaaatgtcccatggtgtctctggtgtgcaatctccctcattaaaaaagatcgatagacctggttttgctgactacaggtttgtccctggtggtcttaggctgactgggcttgaacagtcttgctcagcttcagggttcctaagattgcaaatttcaaaaactgatacaacaaacattttttcactcctaaatacaaatgcacctgtccacgttgccaggtagttatgcacatggctaccatgtcaatttggtcataactagggttaggtcacttctctggaaggttagttattaagaacaagaaagaaagtcagggttctgcacagcttttggtttgattcttgtactgacttatgtttctttttctttggggctacaggtaaatattttgtctgctaaactgacgcccccatcgccagtgtctgaacaaacaaaactgagacatatctagtcagctgaagctgacaaatacaggggccaatctggytacaggcaggcagtcctggcctcgtgacaccgcagagactgtgggacaagtggacgtgctcctactgtccctcgcatcccccatctgggccgcgggactagtgccctcaggtctatgacccactgcaagaacccaaagctcgacgcccgcccagcccttcacatccgtcccttgcaacaagcaagagaagaggggcgcggcttcaggggacgggcgacggtttacaggacagctcgtacacagtaccagctgacatcccctaagcctgagtgtctaggcccctgcctccacatttaagagccgactgcgccccttggtgattggacgtccggacgcaccttgagtagaggccaagcaaactatcgagcccgtccaaaacgccatatttgtatctgacgtcatcctcatgttgcctctcctctctgtgattgaggaaccaatcggttgggtgtagcagacggggcgtggctcttcaggtagaggccgaaggggctgagagcggtcccaggcggccatcttgattcctggcatcactctcaacgtgccctccctctccgtgattggacgagcagggcgggccttccggaggcacacagccgaccaaccagagatctgcgcgtgctcgatctggtcatctgttttctgacatctggagccactagcagttatcctgttcattcctgggcgcctgcgaccttccgaaggaaacaagacttgcttggggaaagttgccttgccagtatagtggagcttggtagaaacttaaaaactgcctggggctgcctgggatggggatctcgagatgcttgtggggagcacattttaggaaacagggggctcaagctgcatgaaatgctgcgggaaataggaatgagagacgcggaatggtcggagaaaaaagctaggaaggtgtttgggagtaagattttggagtgccttgaatgccagactagggagtttggactatatcctgtaagataggggataaaaatcaactttaaacaggagtgatataacaagataatgtactttagaaaataattctgtaactgtagggggagtcccaaagtgtttctcaaattgtgttcggggaagttcaaagtgtgtttgagagcttgtttttatatgcagattcttgcccctcaccagacctgcaaataaagttctctggttgtacagccaggaaactgcattaaaaaaaaactttttaggttaacatacatttggtgagaaaacgcataaaccatatggatagggctctgaattttcacaagcaaacacttcagccaggcggggtggcccgtgcccctaatcccagctactcgggaggcttaggcaggagaatggcttgaggccaggagtaccagatcagcctgggcaacatagcaagacccctgtctctaaaaaaatttaaaacaaaaataataacacactcccgtagttaacaccagatgaagaaacaacatggccagcagctcagaagctccccttttcccctttagccactgctgcctgcaccaaaggtaaatatgatcattacttataagaactgtagattagttttgcctgttttgaatttgatataaataaaagcatacaggatatattgtgtcagcttatttgttagtgttatttatgaaattcatccgcattgttccatgtagttgctgtagactccgttgctatagattgttatcacaatttatccagtctcttgtttatgggcctttgggtaatttccagtttggagatagtagcaaaaaaaatgctaaaatgaacattcttcttcattcatatcttttgctttgtaaattataaagcaagacaacaagacctaaagactgattcattcactacctatttattgagccccttaccagactaaggtgagaaaataaaacagaaaagacagcaaaggtcctgccctcatggaacttattctaactggaacgaaacaacacctacgtgggcagcaaaacaagtcaaacaattgcaattgtgataactctgagggaaacaaggtgagctagaaaaagaagggtggggacttaacttttttttatgtggtagcctggttaactctcagaaaaatatctaggaaaaaatacaagagataagttggcactgctacacgatgagtattaacaatgggtagaccattcctggcaagagagacaccatgtataaaggtcatggaggaggagagagcttggcccattcaagaccagtgtggcttcaacacaatgaaggagggatggcataaggtgtatctgggtattaaagcatatgatacaaggccagagtaagaagttgagattttattccaaatattatgaaaagcaatcgaactgttaaaaacaggaaataatgtgatctgatttacttacttaaaagatccctctaactgctgagcagagaacagattaaagacagaatttaggaggctgctagagcagtctcagggaagatatgctggcatagagcttagaggaaaggcttgaaatacatctgggaactgtcatggcaaagatcatcaccttaatcaagtgataaaaggtaacacctctctgcactggcctgggtaaaaatctaaagaataaaataccaccacaatattgggaacccatgtgtggtggtgtattcctgtagtcccaactattctggaggctgaagcagaactgcttgagcccatgagttcaaggctgtagcaggctacaatcagacctgtgaatagctactgcactccagcctgggcaacacagccagaccccatctcttcgaaaaaatgtatatgtgtgtggccgagcacggtggctcacgtttgtaatcctagcacttctgggaggctgaggcaagtgaatcacaaggtcaggagttcaagactagcctggccaaaatggtgaaaccctgtctctacttaaaacacaaaaattagccgggcgtggtggcaggcacctgtaatcccaggtacttgggaggatgaggcagagaactgcttgaacccgggaggcagagaactgcttgaacctgggaggcagaggtggcagtgagccgagatcgcaccactgcactccagcctgggtgacagagggagagtccatctcaaaaaaagaaagaaaaaaaaaagtgtttgtgtgtgcgtatatatatagagagagagagagtgaagagagagagaatgtattctgatgtgatgcaccaaggacatagcatttctaccaaaaattcactatctgaatccaatgaggaaaactccaacaaacccatgttacaaatttaacagttaaatctaaaactatcagttaaagactagagacctgataaataattgcaatttgtaatcctccattagatcaagagcctggaaaaacaattttttttcccatttgctccaaggaacataggagcaacaacttataaatttgaataaggactgaaggttagataatagtactattgcaatatcaatttcctgattttgataagtgtactgatgacataagagaatctctctgttgttaggaaatacacattttaagaacgtatagataggctgggcatggtggctcacgccggtaatcccaacactttggaaggccgagacgagaggatcgtcttcactcagaagttagaggctgcagggaaccatgatcgcgccactgcactccagcctgagcgactgagggagaccctgtctctataaaagaatgtaacgccaggcacggcggctcacgcctgtaatcccagcactttaggaagctgagggaggcagatcacgaggtcaggagttcgagaccagcctggccaacatagtgaaaccctgtctctactaaaaatgcaaaaaaattagccggccatggtggcgcgcgcctgtagtcccggctacttgggaggctgaggctggagaatcacttgaacccgggaggcggaggttgcggtgagccaagcccccgccactgcactccaacctgggcaacagaccgagactccgtctttaaaaaaaaaaaaatgtagcgatagaaggacatcatgtcggcaatttcctttcaaatgatatagcacatgcaaaacgttaacatttgtggaatctagaagggtttgtgggaattatttgtactagtttagcaatatttctgtaactgtgaattacttgaaaatgaaaggttaacaaagttactgagattaggagagaacgtgaggagcgaacagacctagccatgaataaccaacaaataaaactcgaggaaataaaaaggaactcaaatggcatgcgaccaacggaagacatagcttctgtactcttaaccctaaattactaagcgatgaccctcctgcagctttctaatccaaatcaccaaaaacaatctcgccgcccaactttgccaaaaagcaacttaacgccagccgactccgccatgttttcccagtgagcttgcgagcgcgtgcgtacgcacgcacgcacgcacgcaccaaccaatcggtgctcacgtcggtgactcgttaccgcaggggcggtgcgttcttctacacatgcgcagggttgggcgggtcttcttccttctcgcctaacgctgccaacatggtgagtcttactgttgcgggctccggggccgtcgaccatgccgctcgacctccacctccgctgggaagctgaggcgccgaacggctcccagagggtcccgggaagcgcatggtgagggtccccgggccggctgtgcagcggaatcgggcccttcccggactcgcgcccttcccggactcgccgctggcgagcgcgtggagggcccggcaggcctggcgcgccttgggccacgcgtgcgcgcctccgccgctggagctggatggctgatgcggctcgtggtccgagagccttgtcctgccgtgtgggccttgcggacctgggagctggtgggcgttgggaaccgggcttaagctactgaggcgtttgctgatttcgtccatccaggttggcgcctggctctcgggcgtttgttccctgcggcattctttttcgctgaatttaaccatgttgtctttagctgcagaaggtgacatatgtagcgagtatttctaagtaagtttcactgtcctttctcctccaattttaggtgttcaggcgcttcgtggaggttggccgggtggcctatgtctcctttggacctcatgccggaaaattggtcgcgattgtagatgttattgatcagaacagggtaagtgtcacaactttttactaaacatggcagtggacatgtgccctgcagatggcaataatgaattgtctcgatggctgtgtaagatgaggatgctatgggtagtcgctttattttaccattgaggaaacaggtaatggtacgggttttaagcacagcctgaagttagctattagtattgaatttcagtattagccacttaagctagagccagttataggctgaaacgttggttagttttaaatgagttactatacgtaaagtgagtttagaacagatccagcacgtagaaagcacttttgtatttactgctgtgtatttgaaacaagcaaactaaggagttgaccactgactataaatcagcagggatcagagtcctaaagttgcctgtaaattacatgtggttggtttctatggggtactatatagtttaagaaggagcatttaatgatgtggagaaatgtttgtgttgagcaaaagacatacatatatataacccagataggacaatccttgtcttttctgagcaatttattaaaatagtagtgtgggtttgatggccctgaacggataagtaatgttacagaaccatctgaccattttaattgctgttagattttgcactgaagttcttgatgtttgtgttctaggctttggtcgatggaccttgcactcaagtgaggagacaggccatgcctttcaagtgcatgcagctcactgatttcatcctcaagtttccgcacaggtaactgtccactaatcactcctccctcccatccccagatttgtttatgctagtaaaagtttgttttggagtaaacaatacggaagattcagagccatcctgaagagggatttgcatcatagaagtagacagggattatttacttttaaaatgtcttgcctgcgcgtgatagctcatgcctgtaatcccagtactttgggaggccacggtgggagggtctcttgagcccaagtttcaagaccagcatgggcaacatggcgaaaacccccatctctacaaaaaataaaaaaaaaattcgttgggcatggtggcacgcgcctgtaatcccaggtaggggggccttgggggtgctgagttgggaggatcgttttagcgaggtcgaggctgcagagagccgtgatcatgccactgcactccagcctggatgacagagtgagaccctgtctcaaaaataaataaataaaataaatgccttgaggtcacttttctatcctggtagtttagggctttgcctttgtttagacttgccatcttcttttcttctggtttctgccaaatttttagcttaaagtaa

SEQ ID NO: 96536 - DNA, 47978 bp, Homo sapiens
agcctaggcctaagttgaacagtctgaactgtggtagtgcagtaaagttctcagcatacagctgtctcttggcaactgtgggagactggttccaggacctcccttgataccaaaatctgcatatgttcccatcttctatataaattggcatagtaactgcatataacctacctacaccctcctgtatactttgaatcatctctagattacttaaaatacctagtacaatgtaaatgctatgtaaatagttgttatattgtatttttaaattttgttttttttttattgttgtactggtttttttttttttgagatggagtcttgctctgtcacccaggctggggtgcagtggcgcaatctcggctcactgcaacctccacctcccaggttcaagcaattctcctgcctcagcctccacagtagctgggactataagcgctcgccaccacgccttgctaatttttatattttttagtagagacggggtctcaaactcctggcctcaaatgatccacctgcctcagcctcccaaagtgctgggattacaggcatgaatcaccacactgggcctattttttatttttaaaaaatattttccatttgtgattggttgaatccatgggtttggaacccataaatacagagaaccgattgtatacactcctattctgtgaggacagaggcagcttcctataagatgcctcttggagtgacaggtgcacacccaggtccttgagcaacaacatcatctgcattatctccaagatactcaagcttaggggatagattggcatgccagcaaatacagaagccacaaggaacacaccactgggagaagggacagagaaggtgtttcccacaatgtaagaaccacttccacatgggggagtcaaataagaaataagtgagtacgccaagccacacattgtaagccagcagtcagcattccccagaattaaccagccccacagacatagccacaggacttacagacaagcatactgagcctgcatattgcaatgactcttggacacatctttactgagaactcacatcatcaatgtgatcccagcccagctgtcttcagaaataatagaacctaaaacacatcctataaacacacctcttggcacttaaacagagtttttactatgttgatttccattcactcaatttttttttccttctatatgtttcctatatgtatcctaattccccattagtctggggctcattgggggcagagacatttcttcctctgcattgcacaaaaaaaaccacagaatgaacacactcaataaaccatactaaatgtttcccctcacagttaaaatgtatccgtacctaattactccatcctcagaattctcggatctaaaaatgcaaccacagtctcacatccgctgatgtgaaatatttacattcttcctcaaatttgttttgctctaaaatcttggaatcactttcttaattccttgcccaatggatactggatattcatatggaaaaagtatttctccatatttcaaagtctagttcttggtagcagtttattacaagtgcccaggcttcatgattcatttccatgggttagaacccaggggcctaagtcactagctccaaacctgttttgagatatttcaattttatttaaaaggcccaagaatcagggctttgcaaacagatgttgttagctgtaattccgctgacttgactctccctcctgccattgctcattggtggctgcaagcccagcaaggtctttgcaagccctgcaacctatataccacccaggctggggttggcatacccgcttattgctgtagctcccccgagaaagggaaggacctgtctaggggagaaaggtcagagtccggaggagtctgtggcagcacacattcttaccgcatcgaactccgcttgatcatcctcaggtaggtcgctagtttcataaacatctggctcattcctggcctgcaggtagaagcagtgaccacccaacctcactacccagcatccaacaacaccccttcccccactccatttgaataagctaacagagaaggcggggtgtgatgtcagggttctgtcctttctcctccacctgccccgtgagtcaacagtatgtcagttcccatgtctcaaggggtagggatgacagcggagacaactgggacctgacagtaaacggtgagtgtaagtgatagcaacgatgttaccctaaatctagaggcgggcaggtccttggcaatcactattgccaaagaaggtgaaggctatcctccaattaggccccgtacaccaccaccctggcacaaggattgagagtgactcaggaccttagtactcaaggtcctgtgtcccaaccctcaccttgagaagcaggcagggcagcacaaaaggaaggtacacgccaggattgtcatgggagtgggggctgggggagggcataggttccctcaaggatagagctccccatctggcacaagagggttctgccagatggcagaacctcttccttggcaggatgaaggccatcgttaagtggtctggtgtgtgtgtctggggtagcgatggggtcttatggagagatttgggggggacatgggaggcgttgacacggatggtggaaaaactcaggcacaagaggtcagtacccggagtcgatttctgggccgagctaccggcgactgccggaaagggggcctggtgcgccgtccggcggcccggcccagtcgggtcagaagagttcggggggtgctgaggccgatcggagaacgagcggcgggagcccttgggcggaggatgggctgcaggcgggaggggtcgcgggctggtttctgttgggggtccttgggaggtcgggggcgcggtcctggggagccggggccggtcctgtactcacaatgccgggaaggtcggcgtatttagggtccgccatggcggcggcgagacgggctgggggacccgggcctcggtggagccggggccggtgttcgggtaggggagaggctgggttcgggtcccgggctaaggcggcggcaaagggagcggcagatgagcaggaagtctcgcgacagcagtagcacagcagaagggtaaagcaaaagtcgcgagaacagccctgctgccacacccctggagaggccgggattggggagaacgaggccagggaatgaggtaatggccaggggacgccgcctaggattgtgggatgtgtagttttggtgtactggagcttgggcggggagcgacaataacgaaccttggggagctatttcatacagccttttctctcacttttacagcaagtcagtgaaagaacatttataattcctgtttggggctcccaggaataaaatgactagattaaatgatacaggtagtcatactgtgacacagccggggtttcaaaaacaagaagtttgcttgatactgtgtattataaaaacaaaataaaaacaagaagtaaaatttagtaaacgcgtagtgtatgttaggaatgaaaaagttaggcaatcttctcaagtaagggctttcagataatttgaatttcagataataagtaggtgtgtgtgtgtggtgtgtggtgtgtgggtatactaaccccccaaaaattaagtatctgaaattcacatttaactgggcatcctgtttttgttttttgtttttcaaatctggcaattctatctgaagttcataagtaggtaagtggtgtctccatgtctgtctgaacactctctgggctcttaactacttcgttaatagttctcagacttttatttatttttcaattttttcaattttgtgggtacacagtaggtgtatgtatttatgggacacatgagatattttgatacaggcatgcaatgtgaaataagcacatcatggagaagagggtatccatcctctcaagcatttatcctttaagttacaaataatccaattactctttaagttattttaaaatgtacagttgagttattcttgactatagtcaccctattgtgccatcaaatagtaggtcttattatactttctaattttttgtacctattcaccaaccttaccttccgttctcagacttttaaatttcatcgttcaataaaattaaaacaactacaaaccttgaagatttgcctttttattttatcaagtaagtatattacaaatagaaaacctattatttactgtcaccatcattacttggtagaaaagcaagaaggacacactcagaataaaagatagtcctttgaaacttatcaaatccatctttatattaaaaaaaaactcaccattgttcttttggaggtgagggcatactcagtgaacttttgtctctgaccagtgaccctccatggactggcattttgaaacccctttactaaagatgccacctgggagcccctggggacccaaggatgggatgtttcccaggatgtttcctgagcttgcaggatgctgcaacacttagaaattgtgccaaaccaagtgactagagagttcctgagttcggaactcgttgtctttctttctcctggctcctccccaagcctctatccctttctccatagtcctacagctttcctgtcccattccttatgttggactcttttctttcagttcccttaagattcaaggtaggttagaggtgtagccccaatgtgggaaaccccctgagttctgaatagttaggtcttgtctggccaggctatcagcctcttacttttgtcccatagtgtcttaagtgaccttaaccactcaccagacagttgctgagcagaactttcctttcctcctccttctcccatccaccctgcccttcctctttgcctagaacctcaactcctgcagtccaactctctgttggccagcagaggcctgtgacatggagaaaaatcaatttggccagcttcttggtggttctttccaggggctgcagcaggagtctgacccaaaggaaggaaggacaaggaatctctgggcttggcatttctttcgtttttcttcccccacacctttttttttttggccagggaagggggctgaagtattgggactctatcctccaatggttactgagacagaaaacacacactcccgtaggtatctgaatttgcctgaaacccaaatgccggctttgcctcagacttcaaagtctctctggccttacccatccccatcattgcccctccttcactgctttctgactccctttctcttgcaaagatgtttcccacccatcttcctcccatcctcagcctaggacacaaaaataagtattgtatctgcttttgaattcccataacccagaatgggagtttatcttccctgaaactggggacctggtgtgtacgttggggagacagtatagtgcacctttggatgtggaaggggaagggagtagccagaacctcccacgacacccaacttcataggagtacaggcaggggtccccccagaaagctgagtgggttgggagtccagcttccgtgcatgtggggcatgggatgggcgtagggggagaatgagaagtgtgatcccagtttggagagaggactgtgacgggttgggggatgccctggaataaagggagagggagatctgttgacccttttcgctacacaggcgacaggcccacctcagtccccttatcccttccagggggtggagtctgagggagggacaaacaggtcgggggtataggggtgggatgcagtgagttgggtggggaagggtcgagggcaaggttatctccgaacgttaggggtgggggagggaggagaggagcggtgaggttccacccttcgggggtcgacgtcgagccagcgtccccagtggagggagccccgcccccgctcctccatcgcggccccgcccaggcccgcagcgcggcgctgcagcgcgaggggcggagaggcagagagcccgaaaggaccagacgcccaggtcgcccgcatcccgctgccgcaggagagagacagcgcgccccggccctgctccccaggcttcgcccgggcgccctcaactctgtccccagagactgagcacctgtcctccgcctcggcctctgctgagagccctctcctctggagcacacaccacccctgcagcccaagaagagtcccagccccacgccggctaccaccatggcggagaccaacaacgaatgtagcatcaaggtgctctgccgattccggcccctgaaccaggctgagattctgcggggagacaagttcatccccattttccaaggggacgacagcgtcgttattggggtgagtgtcgcccaggagggaattcggggagggggcaggtggctgaatctccccgccccccgcagagccttagtctctgctggtccctttgctccccctccccgccgctcatccttcatcctcttccccgcagcccctcctctcccctgcatcaggatggctgggtgtggcctggccaggccagcggccgagtctctgcagagtggcagggggctgctttcctaccttcgggagatccaactcccctttgctgctgtctgcagcgtctccacccgttagaaccagtcccatgtttttctgatgttttccycttctccaccacccgctccccaagagaaagcgcatcttccctttgttattggctcagatctctacccccacctcccggaaggtaaggcggaagacttttgggtggattagatgggaggtgagcagtccagggtctctgcagagtgtggatggaagtgggctctaagaccaaaccttccatcattccctaaagtagttatagcctggatttttgtgtgtgtgttgtggggagtaggtctgatgcagggtttactgggaaagaaatcattgatgccacacccaatcttggggggagcctctggaatcctaaggtcaggtctgccttttggtcccaggtacagtaggaagagggtttcagattccccaactgacccccctaaagaaaaatgcccaaaccctgagatcctagtcagtacctgcttattcatcctttctcttgaggatccaatagaaagtagccatccagctctacctcatcatgacagccctacccaaggaggatatcttaagggaactaatattaacagtgggcctgttactctacgtatattatttaacccccaaaacaacattcagaagtagtatcaatatttccattttacagatgcagaaattgaggcccaaagaacttgaataactttctcaaggtcatgctattcatccatggatctgaacctaaatctgtractgcaaacctcccatctcttctatcacattgcctacccaggtttctgttctgcacctttatctgtaatggcccaaagggaaattctaggccttgcccactccccctgaggttggtagggacctcaggctgtgtgtggggagaaaagatctggggtcgagtcctgtagggcttgaggggtgctgggccaggaaacaaaaactagcttgaggagggaggggcatgtacgagggcagtcaaggtcagaggtgcttcttatgtatctttatccacagtgcttggcacagagcacctggacacaggcttgttaaaggaatgaaggaaagaaggggaggaagcctgggccttctgagtcagtgagaatgggactttgaataaacatgcttcgggggagacctgcttaccagtccccaagggccccagtctgtcaccaccttgcacccttacccacactgttaactcaaatggatgcttttggtctctctctctctctctctctctctctctctctctgtgtatgtatttgccacatggagagggcctctgtttctttttgcttcagggacctcgctggccctgcagtctgttcagtctggctgggctaaaaacaaaacaaaacaaaacaaaacaaccacaaaacaactcctggatcaactctggaggacccctctcagagtgtcctrgatagccagcattagttgtgagagttggagcttcagatccccctgagacataaaggctgagaaacaggaggagggtgatgatgggggcaaaacttttaggcccaatttccttgctctgggaggtttttccagtaagactgaaccaactcctttaggctctctgggccatcctagtatagtgggatggggcagggggtgatgttggtaagaggggtgtggtgtcgatctgttgttagcccagctaaacaggagagacacacagtgggaggtgggcaaggaggaaagatgaatagaagccccaggccccctgccaattcagattccatctcagctccacagctggatcttccttgtctgttttgcctgatatctgtagggctgtacctttgtcttgctcgtatcttccctcaccctagccctccctgtcaatctctcacttgaagataaatgcttacgggggggccattttgtcttaggcaacatccttggagtttgctttttcagacttaatattcattcatcatttagggaatgagggctacaggagacatgatttttaggagacccttgagggtcccaacaagggaaggaaattcctactcctttttctcttttcycctctagctctttttggagcccaccaggtcggsagctggcttaggaattaatgggggaggctgcttcaggatgtctaggaaggtgcgggaagagtgaaggtgggagagataatctttcccaatgcagcccctactccttcctgtgactgctctccccttcgcctctgcagcactgcggccagcgctgagcttcagagtcccttctgttcgtgggctttgttctgcttgttagagggtaggagaataagctggagagacagctctgtgtgccttttttctcccctactcctctgacttcttccaggaacctgggggatggggcttagccaaagttaatggcctgagtcatagcagaagggtgtctgggtcaccgtctgtgtgtggtgcccatcttgttttgcttttgcacactcagaatccagtgtgactttttcgccagacccatttaagtgtctgtcttcctctgccttggtctttctcagcagtgtcccagtgcctgctgtctggactgctgcatctgtaccagatgtgggagggatgacagtgaagaaacacatacatacacacacacactctttctctttccccttcattcaagtgtacacagctacctccctcaggtctcccaatggttaagtgggttcttaatgcaagaaactaggaccattgtgtacctcacttggcaaagctaggttgggacctgcagggttattggagcagaatcagtattgtttggggtggcctgggatttgatatctgaagtggggagcagggctgtcctttgctttgggggagtctcataaagaaaaatggagacgagaagtaacgttcattgtggccagtgtctctccagcattaccatggcaacaatccccacgggtgtcactatggaaatcaggcctggcacttgaagttcagcttataccaagtgctttactgagggttgaacaggttggtcatctttggacccctgatcttaaacccccagccccaattagcttcagtcagcacacatgatagaaaagtacagaaaggtgctgggatacacaaatggaagaggagacaccagggaggctcggagtgtgattaaattaaaagagaacaaagaaccctggactgtgggactctgaagagaggcccttcagagaaggctataaggagcacttagactgctgggggtgggagagagattggatttcggcgacatttctaagaggaggagggactctgtgactatttctcattaacaactcacagagtcttcgattacctggaggtagagagggtgggtggcagaattacatacttctgaaaatgggattgaggttggaaaaagggagtgatgaaaggctttagttctgtctggaaatacttggaaaaatgcccaaatgtgaggaggggggatatggagtaggggaagaaaaagccttgataaggctctgacacagtgttggcatttcagttcttggatcactttgcagtgtgggtctggaatcagattgcttgaatttgaaactgtgctctaccatttctcagccatgtgactgtggggaagctacctgacctctttgagcctgtttcgtcatctataaagtggtaataataatagtatctatgtcctaggattactgtgaacattaaatgagataatgcatataaactgctttgtaacatggcaggcacacagtaaaccctcaataagagttagatattatcactattttatatgctatctccccacaagctagctttgacaaaattgggaagtgggtaacacttttcctttttactaattgtttcatgcaaacctccagatcccaagtatcttcttgctcccttccttgtcaatatctatgtttagtcaacaaatatttatgaagagcatctgtcatagtcctctatatgttgctataaaggaataccccaggctgggtaatttataaagaaaagagatatatttggctaacagttctgcaggctgtacaagaagcatggcaccagcatctgctctgatgagggcctcaggaagcttccagtcatggtgggaggcaaagagggagcaggaatcacatggcgagagagggaaaaagagggagagcaagaggtgccaagctctttttaacagccagctctcacatgaactcataaagcgataactcactcattaccatggggaaggcaccaagccactcatcagggatttacctccttgagccaagcacttcccaccatgccccacctccaacaatggggatcaaatgtcaacatgagatttggaggggacaaacatccaaactacatcagcatcctataggccagggactgtgtttggtgttggggatttaaagggaatccctgccttcaagaaaatctggatcaaggttgtgatccatagcccatggagtggcctgcgcagaggcaggggagaggaacatcagatatggcttttgctaactatctatatactcccccagattctgataaggaacctcccacaacatactacagtctgattcagagtattgtgtgttatgagagctgtaaataatggtggtgcttcccatgtctatgggcaggaaaagtggaagaccactggtctagttattttcatgaaaagatcacttttctctaggcacattgcccatgggttagccctgctgtacaaggagcagtaatgaaaaaaaaatcaggcaaaattaattcatcctgagtataatcaatagaaaattaaaagaaatgtacaaaacttagccgagcatggtggtggctgcctgtagtcccagctactcaggaggctgatgcaggagaattgcttgaacctgggaggcggaggttgcagtgagccgagatcttgccactgcactccagcctgggcaacagagcaagactccgtctcaaaaataaataaataaataaaaattaaaaaaacaaattggctgggcacggtggctcacgcctataatctcagcactttgggagacagaggcgggtggataacaaggtcaggagttcgacaccagcatggccaacatggtgaaaccctgtctgtactgaaaatataaaaattagccgggcgtggtggtgggcgcctgtaatcccagctactcggaaggctgaggcaggagaatcgcttgaacctgggaggcgaaggttgcagtgagccaagatcatgctgctgcactccagcctgggcgaaagagtgaaactctatctcaaaaaaaaaaaaaaaagaaaaagaaagaaagaaaaaaaagaaaaaacaaatttacattttaaaaggaataaacaacttaaagacataaagagccaggcttggaattttagagcccagccaagaatacagaagtaggtagcaggccttcccagaactcctgaaatcatatctcatgtcacatggctttccctgctcaggagattactaaatgcaccaatttttagctcttgggtatcttttttttttttcagacggagtctcgctctgtcacccaggctggagtgcagtggcgcgatctcggctcactggaaactccgccttccgggttcacgccattcttctgcctcagcctcccaagcagctgggactacaggcrcctgccaccacgcccggctaattttttgtatttttagtggagacggggtttcaccgtgttagccaggatggtctcgatctcctgacctcgtgatccacccgcctcggcctcccaaagtgctgggattacagatgtgagccaccgcgcccagcccactcttgggtatcttttagactcagatctgagaatctcttccttcttccctctctgctcttttctttcttcccagcctagactgatgtaaaggggttcctgatgaaaaggggctataattggcttcagcatttggagagcgctctccattttaatgcgtctgtggagccttctagatcctgtaactgggaatgttttgagggagtgtgtgtgggggctggggtggggtggttggtgtgttggtgcccatgtgtttgtggggggaggggaggggcaagattggcttgagagttacatttaatcccctttggctgggtgcctggcttcatgaagcatggatagagattgttggtgggaaagagatgagaaagccagtctcatcttttcacatttttctgcctgttttatattctggctgcactggcagttgattaaatgatgcccacccagattaagggtggatctgcctttcccagtccactgactcatatgttaatatcctttggcaacaccctcacagacacacccaggatcaatactttgcatcattcagtccagtcaagttgacactcaktattaaccatcacaattccacccctcatcaacttgaacccatacacatctcctgagatcgtacaaatcttcaaataaggacaataataaggtcataattatgcgcctaatataatacaactatccttcgtacaaccggaaatgcaccaatccccaacccaaatgctattatataaagttaacatacttaaatgctgatacgaagtcaataagtcttatgtcacataataaaggaaaaaggaaattaaaaaaaaaaagatgagaggcattggcttgagatagacatattttgcttgtttctgtttcttggccactgggtgggagaaacattgaggtagattacaatttaaaattaattacaattcaaaattaaggtagatttttctttaataatattaaaaataatgtaattacaacactaatacattttaattgttaacaaagttcaagacaaaggaaaggacaccgaagaagctaaaaatcacccaatatcttaccaccccaaagaagcactgttattaataataatttgatgtatttttccagtgttttttctacatatatacatatgttaattttaataagattatatatcataaactatatattgttttgtaaccttttttctcaaacaaaatattattactattttgccattgttaaatatttttacataactttattattttacaatttttctgttttttttttgagatggagtcaggctggagtgtgcagtggtgtgatcttggctcactgcaacctctgcctcccgggttcaagcaatcctcccacctcagcttcctgagtagctaggattataggcatgtaccaccatgcctggctatattttacaattttcaatttaactttcgaatgtcttacctgcacatgtgacaaaatgcaaaggatatgaaaaggtttatattgtttccttctccttctcacccctcttttccagccacacagttcccttttcagaaggcaacttcttgtggatckttccaaaaacctactatacatttataagcaaatacatatatacatgcatacctttttttacacaaatggtagcgtattatacatccattctgcacctttaaaaacaaaaacagcctgggtgtggtggctcatgcctgtaatctaagcactttgaggccgaggcgggaggatcacttgaggtcaggagttcgagaccagcctgaccaacatggtgaaaccccatctctactaaaaatataaaaattctggctgggtgcagtggctcacacctgtaatcccagcactttgggaggctgaggtgggcggatcatgaggtcaggagatggagaccatcctggccaacatggtgaaacctcgtctctactaaaaatacaaaaattaggccaggtgcggtggcttacgcctgtaatctcagcattgggaggccaaggcgggtggatcacctgaggtcaggagttcgagaccagcctggccaacatggccaaaccccatctctactaaaaatacagaaattagccgggtgtggtggcgggcgcctataatcccagctactctggaggctgaagcaggagaactgcttgagcccgggaggcagaggttgcggtgagctgagatggagccactgcactccagcttgggcgacagagcaagactcttgtctcaaaaaacaaaaagcaaaacaaacaaacaaaaaacccaaaacaaaacagagtcttggacacccttcctatcagcacataaagatttatctcattcttttttggttttgttttgtttttcaagacagggtctcactctgttgctcaggctggagtgcagtggtgcaatcatggctcactgcaaccttcaccttcgaggctcaggccatcatcctgcctcagcctgctgagtagctgggaccacaaggcccatgccaccacacctggctatttttttttaatttttgtagagacagggtctccctatgttgcccaggctggtctccaactcctggcctcaaggatcctccagacttgacctcccaaagggctcggattacacggtacatgagctatctcattcaactgtataatttgttgtagggataggccattatttaaccaggcctctgttggtggacattaagggttgttctaatcatctgctrttacaaacagttgaatgaccttgtataaatattttttgcatatgtgcagtatgtctacaggataaatttttcgaagtggaggtcataaagcatatgcatttaaaaatgtgaggctatttccaaattgcctttcacagagttggctccaatttctatgtaccctcagcagtatgtgtgaatatctatttactcacattctcaccagtgtaatgcgttgtctattttattttggccactttcataggtaaaaatggtgtttcatagttttaatatgcattttgcttattaacagtgaggtcgmgcattaattaatattaattaatatattttaacatttaggagccactataacatcattttatgatgttataatttatgatagtgatataatttacatacagtgtacagatcttaggcaaacagcttgataaattttatgacatatgtagacacccatgtaaccactacacagatcaagatctagaacatttctgtcactcctgaaagctccttcatatcctcttcctgtaaataccacttgtatgttgttaccacaatagcaggtagctgctgttttgacttctagcactacagataagttctgtccattcttgaacttcatatgaagggagtaatacagtatgtgctcttttgtgtttggattctttcaacgtgtttttgagatatattgacgttctatttattaatgttctattatgatattttaattttatttatttattttttttgggacagagttgcactttgctgctcaggctggagtgcggtggcgcgatctcggctcactgcaacctctgcctcctgggttcaagcgattcttgtgcctcagcctcccaagtagctgagattacaggcatgcaccgctatgcccagctaatttttgtatttttagtagagacatggtttcaccatgttggccaggctagtctcgaactcctgacctcaagtaatctgcctgccttggcctcccaaagtgctgagattacaggcgtgagccaccatgcctagccagttatggcattattttaaataacagtgaggaataaaatatatgtatatgctataatttaattcactccttaggttaaccagtctcctaaatgttactcctttaagtcgtcttcaatttctcattattataagcaatgtgatgataaacacccttgtagcgaaatcttgatttccatgatatcaattcttagaagtagaatttctagatcaatggatatgtaaaatttaaggcttttgattatgcatttttgaattgttatatggatgtactctccaaccagaaaataatgaaagttctcatttttttgaacccacatctacactgggtattacaatgcaaattttgttttccagtttgagaggtgaaaagaaattttaccatttcagtttcttttcttggaaaatgttgaacatcttcatgattgctgaacatttatatttcttcttctgttgcttgtttctagttcttgttcacctttttctgtttagtttttgtctttttgttactaatttatgagagtttttaaggcggggcatggtggctcacgcttgcaatcctagcactttgggaggctgaggtgggtggattgcttgagcccaggagtttgagaccagcccaggcaacatggtgagactctgcctctacaaaaaataaacaaaattaggcagatatagtggtatgtgcctgtggtcccagctacttgggaggattgcttgggcctgggaggttgcagctgcagtgagctgtgatttcgccactgtactccagcctacatgacagatgagaccctgactcaagaaaaagaaaagaaaagaaaatagagagattttttgattatttgtttgtttatttgtttgtttgtttgatacagggtctctctctgtcacccaggctggagtgcagtggcccgatcttggctcactgcaacctctgccttttgagctcaggtaattctcccatctcagcctcctgagtagctggaattacaggtgtgcaccaccacacccagctaatttttgtattttttgtagagatggggtttcaccatgttgcccagtctggtcttaaactcctgacctcaagtaatctgcctgcctcagcctcccaaagtgctgggattacatgcatgagtcaccgtgcccagcccagcagttgttttgtaaaaggaaatcttagcactggaatcctggtgcagactatgaacagtatggacatttaaatatttaatagaattgtcctccagaaaggttctatcagttggtaatttacagagagcacttttctaacttcttttcctttgtggattctgtttcttggacttcagaggctttcaccacagagagactggataaatattttaggtaggatttttttctataagccaaatttaattgttttaatattaaaaaacatttattagttttcttttatacaaagaaatataaagaagaaaagaataaaygattatttcttttttgccattaaaactttttaaaatataatgctcgtacatagtttaaaaatgtaaaccatgcaggatacaaaatgaaaaataaaagcctttctctcagtttctctcctcaaagtaaccactgttaacacttttgtataattccttctagaaaaaaaattctgtagatattcatgcaatgttattgctatacctagagccacatctccagctctagccaaggtttacaactttccttaattagttaaaacatatctcccaaactctgcaaactctggcgtctgtagatcttgaggtttacatttcgattggataaagatggactctgtagtaaaacaatttgacaagtcagtcacctatgatagagaacaagcattgtctcatttactcgtcccagagatttacctctaatgcatctagccatcaaatatattcattggttagcttcctaagttgtaagtattttgtgtctttatcattcttatcagcacatgtgatttacaacatattcctgaattaaacaaggatttgtaagtctgaatgatttgcttcacagttctttttttttgagacgaagtcttgctcttgtcccccaggctggagtgcagtggcgcaatcttggctcactgcaacctccgcctcctgggttcaagcgattctcctgcctcagcctccggcgtagctgggattacaggtgcctgccaccacgcccagctaatttttgtatttttagtagagatggggtttcagcatgttggccaggctggtctcgaactcctcacctcaggtgatctgcctgccttggcctcccaaagtgctgggattacaggcttgagccaccgtgcccgacccacagttcttctttaattaaagcttgttctgttcttaaagggagacccacatatctgatttcatatattcctttcacaaagagagagagcttgtgttaatgtttccacagaggctctcagtgtagactgaatttcatttacatggtagggaacatgctataaatatatgtcactaactttgcatctttcacttagtacatctaaagatctttccatatcagggtacgtggatctgttgaggaagatatttctagcttgagatactttttagtgttaatgaattgttcttcaattttcatcacctgtggccctattgtcttttttcatctggtttcccagggaggagtttggggtagtggagtgctcaatcatcacaccacgactaagatcccctaacacaatctcactgtgcgacactcctctaccccacagacacaactcctggcatcagtacctttagtttctcttattctcccacatttcttttcttttcttcttytttttttttttgagatggagtctcgctctatcgccaggctggagtgcagtggcgcaatctcggctcactgcaacctctgcctctcgggttcaagcgattctcctgtctctgcctcccgagtagctgggactacaggcacgtgccaccacaccaggctaatttttgtatttttagtagagacggggtttcaccatattggtcaggctggtcttgaactcctgacctcgtgatccgcctgcctcagcctcttaaaatgatgggattacaggtgtgagccaccacgcccggccattctcccacatttctgttcattaagggcattgaagaaaagggtgcctttctcagctgctggaaggaggttgtggtatttcttttccctcacatcctgcctgttgacrtctgatatcttttattttcattccaggggaagccatatgtttttgaccgtgtattccccccaaacacgactcaagagcaagtttatcatgcatgtgccatgcagattgtcaaaggtaatagatttctttttagaatgtctcttctcagcaccccatttcctacccgacctatctccaccagtactctttctctactgtctcttccagatgtccttgctggctacaatggcaccatttttgcttatggacagacatcctcagggaaaacacataccatggaggtgagggttctggctttggtggttgaggggctaggagtgttaatggaagatcagggaatctcagtgggggaaggtctaggaatcaaggattgcctggtccagaggcagatagatgagtacagaggatgaactgaagggcaatattaggggaagtttaatggaatccctccaacccactgcagtggatcatcctttccactactccagtcttcttttgatcgggaaaagcaatggaagtccaaagggctactcaattatctccttgctcctctaaaaggcagacatggtggtgaccatctcctaacttaggatgttcttcttattgactcttgccttggtgttcacctgcatacatctgagttgtctcattctycctgagccccagcttcactctcaaataccttcactcgccagggaaagctgcacgaccctcagctgatgggaatcattcctcgaattgcccgagacatcttcaaccacatctactccatggatgagaaccttgagttccacatcaaggtgaccagggcacracagctgggcattcagatggggactgggaggggaagatctaaaatcttcccactgaagagcctgggctccccaacttgactccctttccggttaccagagttctttgtcaagatgttctcttctgttcttttcctcccaccaccgtttgagcaggtcacattagtatgggattcctgaactagatttaagataggccctctttacttcacactccttctttcttcttaaccaggtttcttactttgaaatttacctggacaaaattcgtgaccttctggatggtgagtgttttgtcccagtggrtgagggtgtgtgaggagggtggagaaaagaaagctcacattgcatttggarttaggtaccaattgacaagagatgcagagggcacacagcacccaagtcttttggccccgtttaccagaatttccaaaaactgagaaggtcaggagatgagcttagcagccaaggactacatataaacagttcgagaggatctggggccgaggagcaggagccctgaggaggagaaggaggaggaactgagccttcagctcgtgcagggagtttaggcttcacagggagagtcttcctttagcacagagaagaaaaccaccatctgagctgactgcaaggtgcagatgggggcggtggaagtactagtcttgcttacccygcattcttttgattcagtgaccaagacaaatctgtccgtgcacgaggacaagaaccgggtgccatttgtcaaggtgagagtgggtgtggggcacctatgtggggccagtgtattgmgaatgttggtgggggaggagcataggtcagtgaccctgaagttggagggtggatatcctggaggaatgagatgtgcctaggggccagggagagtctaggggatcagaaaagatactgtcttggctgggcatggtggctcatacctgtaatcccagcactttgggaggctgaggtgggtggatcacttgaggccgggagttcaagaccagcctggccaatatagtgaaaccccgtttctactaaaaatacaaaaaattaactgggcgtggtggcacatgcttgtaatcccagctatttgggacactgaagcaggagaatctcttgaacctgggaggcagaggttgcggtgagccgagattgcgccactgcactccagcctgggcgacagagtgagaacctgtctttaaaaaaaaagaagaaaagaaaagatactgtcttgaaaggtcattggtcagtgtgcatgcaatttaatttgcaaatcaaagtttactggaagaaatgcctgtaatcccaacactttagaaggctgaggtgggaggatcacttgaggagttcaagatcagcctggccaacatagcaagacccgtctctcttatttaatctaatttttttttttttttttttttggagacagagtctcactctgttgcccaggctggagtgcagtggctcgacctagggtcactgcaacctccctgtcctgggttcaaacgattctcctgcgtcaggctcccgagtagctgggactacaggcatgtgccaccacgcctggctgattttagtatttttagtagagacggggtttcaccatgttggccaggctggtctctaattcctgacctcaggtgatccacctgcctcagcctcccaaagtgctggaattacaggcatgagccactatgctgagtctcttgtttaaaaaaaaaaaaaaatttttgtcaggcatggtggcacacacctgtagtcccagctactcaggaggctgaggcgggagaattgcttgagctcaagagtttgaggttgcagtgagccatgatagtgccactgcactccagcctgtgtagtagagagacagtggttttttttgtttgtttgtttttgtttttggagacagattctcactctgtcacccaggctgtagtgcaatggcatgatcttggctcactgcaacctctgcctcctgggttcaagtgattctcctgcctcagcctcccaagcatatgggattataggtgcctgccaccaggcccacttatttttgtatttttagtagagatggggtttcaccatgttagccaggctagtctcgaactcctgacctcaggtgatccgcccacctcagcctcccagtgtgctggcattacaggcataagccactgcacctggctgcgacagtgtttttttttttttgagacagagtttctctcttgttgcccaggctggggtacagtggcgcccgatcttggcttactgcaacctcagcctcccgagttcaagtgattctcctgcctcagcctcctgagtagctggaattacaggcatgtgccaccacgtctggctaattttgtatttttagtggagatgggattttgccatgttggccaggctggtcacgaactcctgacctcaggtgatccacccacattggcctcccaaaccaaagtgctgggattacaggcgtgagccaccatgcccgccactgtttcaaaaaagtagtaaatacgtaagataaaaataaatacaaagcagggcatggtggctcaagcctgtaatcccagcactttgggaggccaaggcaggcggatcacgaggtcaggactttgagaccagcctgaccaacatggtgaaaccccgtctctactaaaaatacaaaaattagccgggcgtgttggctcatgcctgtaatcccagctactctggaggctgaggcaagagaatcgcttgaacctgggaggtggaggttgcagtgagctgagattcttgacactgcactccagcctgggcagagcgagactccatctcaaaagaaaataataataataaaaataaataaataaatacaaacttaaaaaacaaagcttatgggtcactgtccatttgtcccccacagggttgtactgaacgctttgtgtccagcccggaggagattctggatgtgattgatgaagggaaatcaaatcgtcatgtggctgtcaccagtgagtgaggatacaaggggatctctcgagtctgaggatccacttgtgttctgtgtcctctggggtggagggactcaaaagtgagcaaggaaactgtaccccccagaggaggaggaccccttgtctgtgggaccctgctgcctgggagatgtggcagcagggctagtcctggtgggcaccttctctctgggtgggcggggctggggtcagtggaagccgggggctgaggacctcagttctgcagggtggtgcaggtcctgtttctcccttgctcctgcagacatgaatgaacacagctctcggagccacagcatcttcctcatcaacatcaagcaggagaacatggaaacggagcagaagctcagtgggaagctgtatctggtggacctggcagggagtgagaaggtagggggtcctgtggatatggggtgggtggaagccttggctctttttttttttttttttgagacagagtctcactctgtcgcccgggctggyttgcagtggcacgatctctgttcactgcaacctccgcctcctgggtttaagtgattctcctgcctaarccttccaagtagctgggattacaggtgcccaccaccacgcctggctaattttttgtatttttagtagagaggggatttcactgtgttggccaggctggtccttggctctttttttttttttgagacggattcttgctctgtcacccaggttggagtgcagtggcacgctctcagctcactgcaacccctgcctcccaggttcaagtgattttcctgcctcagcctccctagtagctgggattacaggctcccgccaccaagcccagctaatttttgtatttttagtagagacggggtttcaccatgttggccaggctggtctcgaactcctgacctcgggatccacctgcctcggcctcccaaagtgctgggactacaggcatgagccactgtgcccggccgactcttttttaactaaaaaatgatttgcattgggatataattcacataccataaagttcaccattttaaagtgcaattcagttgtttgtagtatgttcccaaggttgtgcaaccattacgctatccaattctagagcactgtcatcttctattcacagtcactctccattgtcccctaaccccatcccctgtcaacttctaatctactttctgtctctatggatttgcctatcctgaacatttcatataaatggaatcatatggctgggcacggtggctcacacctgtaatcccagcactttgcgaggccgaggtgggtggatcacctgaggtcgggagttcgagaccagcctggccaacatagagaaaccccatctctacaaaaaatgcaaaattagctgggcgtggtggcacatgcctgtaatcccagctgctcaggaggctgaggcaggataaccgcttgaacctgggaggcggaggttgtggtgagctgagatcgcaccattgcactccagcctgcgcaacaagagtgaaactccatctcaaaaaaaaaaaaaggaatcatgtaatatgtggcaggggttaggggcaatgtggtgtttgacaagacagtttaggggaacagaggaagggccttccccaatcccagccaagcatctctgttactccatcttcttccctgttccttccttcctccgtggactgagccctggaacgaggtggtgacagccctctccatgtgcagctgctcatacacactcatctcttactgccctggtaggtcagcaagactggagcagagggagccgtgctggacgaggcaaagaatatcarcaagtcactgtcagctctgggcaatgtgatctccgcactggctgagggcactgtgagtgatccttaggtcccctcacccctcaagccacaccccatctcctcccccacctgctaatgccaccatatgatcatgccccaattcatgsgttgtctgatcccggggtggcaccactatcctttctgattccctgttgaattttatttgtttatttctgattcctggtctccttcctcccccagaaaagctatgttccatatcgtgacagcaaaatgacaaggattctccaggactctctcgggggaaactgccggacgactatgttcatctgttgctcaccatccagttataatgatgcagagaccaagtccaccctgatgtttgggcagcggtcagtggcagggtccccagagggatccctggtacccagcttcccatcccagcctctgcggctctctctcctcagggtcacccaagtctcatgttgctctcatttctttgttcctcttctcctcacccagggcaaagaccattaagaacactgcctcagtaaatttggagttgactgctgagcagtggaagaagaaatatgagaaggagaaggagaagacaaaggcccagaaggagacgattgcgaagctggaggctgagctgagccggtggcgcaatggttagagagggataggtgggagtgaggggcagtgggaagaggaggaggatgtttgggagccaactctgtttgggtggtgtttctggccaggccaatctcctagaagaggggctgtgtttctggacaggtgcagtagagcagtcatgggggaagggaggggcctgactacctacctcccatactcccaaaaggtagagggtccacctggcaagagagttcaaggggcatggtgartgagaaggaagaactcgtggatgcagcttcttcttcttccatctctcacctcgtcttgcccctttgcaggagagaatgtgcctgagacagagcgcctggctggggaggaggcagccctgggagccgagctctgtgaggagacccctgtgaatgacaactcatccatcgtggtgcgcatcgcgcccgaggagcggcagaaatacgaggaggagatccgccgtctctataagcagcttgacgacaaggtgagggcggccaggcagggcactgaggcacgccaggtgggatgagaggtagacgatcaaagaaaatcgcttatattgcctctttctggttttaaaagggataaatgcttatgcttgaaatgtggaaacatcaatataaatgtatgtaagaaaattaaaatcatccactattcagagataacactcaacattttgcttttctctgtgcatataccatgcaattgagttatactgtataagtaatttttttttttgagacagggtcttgctgtgtcgcccaggctagagtgcagaggcacgattgtggttcactgcaacctctgcctctcgggttcaagtgattctcctgcctcagcctccagagtagctgggattacaggcgcatgccaccacgcctggctaatttttgtatttttggtagaaacggggtttcaccatgttggctaggctgacctctggcgatccgcccgcctcggccccctgaagtgcttggattacasgcgtgagccaccgtgcccggcctgtatatgtaattatacatctgatttttttcattcagcattatattatgcacaatttcctacttcattaataattcttcataaaagtatttttattttcatttattattattattttgctttgagagaaagagtcttgctttgttactcrggctgaagtgcagtggtgcagtaatagctcactgcaacctcaaactcctgggctcgagggatcccccccaacctcagcctctgaaagagctgggactacaggtgcacaccaccacgcccagctaatttttttttttttttttttggtagagttggagtctcactttgttgcccaggctggtctcaaactcctggcctcaagcgatcctcccgccttggcctttcaatgcgctgggattaaaggcatgcaccaccaggctagctaatattttaaattttttgtagagacagggtctcactatgttgcccaggttggccttgaactcctggcttcaaccgatcttcctgtaggatatggggtttctaactcaaagcttatactatctggatttttatcaggatcctgcctctacccccaaacttcttacgtctaaactggaaggagtagcttcccttcacctgtctttccctgttgcctccaacaggatgatgaaatcaaccaacaaagccaactcatagagaagctcaagcagcaaatgctggaccaggaagaggtaataggagggagggcaggacatgagaggaaaggggttctgttcatcactggaaggcatggaatagacctttttaaaatcagatggaagaaggcgctttctgcttggggattaatcactcccctaaacagcagaagtctgggaacctcactggggcttttcttttcttttccttttttcttttcttttttttttttagagatggagtctcaatttgttacctaggctggaatgcagtggggcaatctcagctcactgcagcctcgatcttccagggtcaagcagtcctcctgcctcagccccctaagtagctgggactacaagtgcaccaccacacatggctaatttttgtagagatggagttttgccatgttacccaggctggtctcgaactcctgagctcaggcaatgtgcccacctaggcctcccaaagtgctgggattacaggcgtgagccactgcgcccggctggggcttttcttaaagcacaaattttaaagtctgggggcttcttcattcttcattctgttgccctatttctatgaaacctaaagcccacttcctcttaactctttattttgggtagggtgggggctcagcttcccagacccaaggccatagaaatggtcactggcagtgatctttcccacatgccactcctctcccttgaagctgctggtgtccacccgaggagacaacgagaaggtccagcgggagctgagccacctgcaatcagagaacgatgccgctaaggatgaggtgaaggaagtgctgcaggccctggaggagctggctgtgaactatgaccagaagtcccaggaggtggaggagaagagccagcagaaccagcttctggtggatgagctgtctcagaaggtggtaagtggtgtgccaatggtccaacagctccctgaccacagaacatctcccatgtcgaggggacctctgcatccttccagggctgtatggtggctgcacctctgcactgctgttcagtgcattgtgagtccctccccaaccctgtcactgcactttcccctcacagtccctctgtctttcagactcttctgcagggcctgtgttctcttcatagcagccctcagggtcttgcatgaagggagaggcctctgcctgggctgggcaagggagcaggaggatggcaacaggaatgacctgaggggctgtccccaggccaccatgctgtccctggagtctgagttgcagcggctacaggaggtcagtggacaccagcgaaaacgaattgctgaggtgctgaacgggctgatgaaggatctgagcgagttcagtgtcattgtgggcaacggggagattaagctggtgagtggtgagagacagcagccttgttcaggctgggcactagtggaagacgcaagatgagccatccaggccttcacagatactgagaaaggcagccagagagccaggaaacatgcctttgaactagacccaggaagacaggtagaggcttgtatagacccaattgaaaagatacattctaggttgggcgcagtggctcaccgctgtaatcccagcactttgggaggccgaggcaggcggatcacttgaggtcaggagttcgagacctgacctcgccaacatggcgaaaccctgtctctactaaaaatacaaaaattagccaggcgtggtgatgtgcacctgtaattccagctactcaggagactgaggcaggagaatcgcttcaacctgggaggtagaggttgcagtgaactgagatcacaccactgcactctagcctgggttatagagtgagactctgccttaaaaacaaaacaaaacaaaactaaattctaacgggtgctgaataaagaagcaatggaggccaggcatggtggttcatgcctgtaatcccaacattttgggaggctgagacaggcggatcgcttgagcccaggagttcacgaccagcctgggtgacatagtgaaaccctatctctacaaaaaatacaaacgattagctgggggtggtggcacacacctatagtaccagctacttgacaggctgaggtgggagaatcacctgagtatgggaggttgaggctgcagtgagacatgattgagctactgcaatccagcctgggtgacagagccagaccttgtcttaaaaaaaaaaaaaaagaggctgtacatggtggctcacgcctgtaatcccagcactttgggaggacgaggcgggtggatcacctgaggtcaggagttcgagaccagcctgttcaacatggagaaactccgtgtctactaaaaatataaaattagccgggtgtggtggctcatgcctgtaatcccagctactcacgtggctgaggcaggggaatcgcttgaacctggaggcggaggttgcagtgagccgagattgcaccattgcactccagcctgggcaacaagagtgaaactccgtctcaaaaaaaaaaaaaaaaaaatttgggaggccgaggcgaggtcaggagattgagaccatcctggctaacacagtgaaaccctgtctctactaaaaaaatacaaaaaattagccaggcatggtggcgggcgcctgtagtcccagctactcaggaggctgaggcaggagaatggcktgaacctgggaggcggagcttgcagtgagcagagatgcggcactgcactccagcctgggtgacagagggagactctgtctcaaaaaaaaaaaaaaaaagcagcagcaacagagcagtgcttgcagtaggagttagaggtggggcataggcacagagttcagaatgaaatatgcaaatctgtggatgtgagaataatctgggtgatcaaggagatcaaaagaaaatcatgttgctttataagatttatttgtaagtgggggactgtcagaattggattttttttttttttgagatggagtcttgctctgttgcccaggctggagtgcagtggtgtgatctcagctcactgcaacctccgcctcccaggttcaagcaattcttctgcttcagcctcccgagtagctgggactacaggcacacaccacctctcctggctaattttttatgtttttagtagagagagggtttcaccatattggccaggctggtctcgaactcctgacctcgtagtccacccacctcggcctcccaaagtgttgggattacaggcgtgagccaccgagcccggcccagaattggattttttttttttttttttgagatggagtctcactctgtcgcccaggctggagtccagtggtgtgatctcggttcactgcaacctccgcctcctgggttcaagcaatttcctgcctcagcctcttgagtagctgggattacaggcatgtgccatgatgcttggctaattttgtatttttagtagagacagggtttcaccaccatgttggtcaggctggtctcgaactcctgacctcaggtgatccacccaccttgacctcccaaagtgctgagattacaaggcatgagctactgcgcccagccagaattggatttttaaatgcaggcggaggaatttaatgtgaaatgccgstgatagagagctgctaaaggtcgtttggaaaatacccatcccatttgagtccctgcgtatgtgggtgtgtatgggtaggtagaaggtgggagggaacagataaagcttcccagcagccaagaagcatctcttcctcctttaatcaccttagccagtggagatcagtggggccatcgaggaggagttcactgtggcccgactctacatcagcaaaatcaaatcagaagtcaagtctgtggtcaagcggtgccggcagctggagaacctccaggtggagtgtcaccgcaagatggaagtgaccgggcgggagctctcatcctgccagctcctcatctctcaggtgagtgcctaagtttgagaaccttcagatgccatgggagaaagaaggctactctggggttatggctaaaactcctaacacccacctttatgtcaaagttctggggtcaagtgaaatcaaggacagaaaagctggggtggcaggggtgcagatcagggccaaaaaagtaaaggctcagggcgggtactgccccctgagccatgggagctaaaggaagagccccataggaatggcccccaaccctgcaccctcatgggaagtgtagcaggagggagggctgggaggagagctggagttggagatctgtgtggcctgggtttgtgtcctttgctccatcttcttcctctcaccaactttctcccaccagcatgaggccaagatccgctcgcttacggaatacatgcagagcgtggagctaaagaagcggcacctggaagagtcctatgactccttgagcgatgagctggccaagctccaggcccagggtgaggccttcttatacctccatcccactgtccagggcagaaaagtcagaaacatcaaaataaatcaccccaataatcactcactcaaagcattagcttgaaatcatggatgccaactcatatgttagccaaggttttgcatgtagctcattttacattaaccatacacccttgttctctgttcctgctatatcaaattggacagtcctaacacagaagaacayccctgtgggtccattcccagccctgcctggagttctggtcacaacgtgaagttctttccgaaagaggtaggtttgatgtcagctgtcttcccctctttcccttagaaactgtgcatgaagtggccctgaaggacaaggagcctgacactcaggatgcagatgaagtgaaggtgagtaaggaaggtgtcagggacaattggggcctggtgtggtgaaagctgtgctggccctcacagagcttgttgctgggagtctggcctttgagcttggggtggggttgtttgcagaaggctctggagctgcagatggagagtcaccgggaggcccatcaccggcagctggcccggctccgggacgagatcaacgagaagcagaagaccattgatgagctcaaagagtaagggttcccaagggcgactccagcccctcccgggtcctgtcaccttgctgtattgactcacatgtcccctctgggtctgattctttaacatccatgtgtcattccctcaacaatgccacaacttcgtagccccacctcaggagacacatggaataacgactagtccctatccttgagggtcccaggattagagaggtcagggttcctggctctgtcatggaaacagtggcctgagtctgcctctggtatctgaaggtggacacatcaattctaactggactcactcgttcaaaaaggaagaagtttgaagagctggccttcccttccccctcattaacatctttctcccccatctccattaccttctgatgctctgtagcctaaatcagaagctccagttagagctagagaagcttcaggctgactacgagaagctgaagagcgaagaacacgagaagagcaccaagctgcaggagctgacgtgagtggcatggatttacctgtaaaactacagccttgtaggctcagaactgtgaactcagacacgcttgcagaggcaggacacacatgcagacatgatagggtgactcatgggaaaaatatgatggggtagggacgggaccaaaaggacactctcagcaaagactgccgttgagtattcaccagtatggaaggaggtttacgtgttctattcagtgtaaaaacaggttacaaaaccatatgcatggtatgatcccataaaaatgtatacatggatatgtaggcatagaaaaaagtctagaaaggtggacaycagaaggttaatgttggtttgatctgtaaatagtagaatcataggctttttataaaaactcaccttatgtctctctttaaaattcttttctaatttttgcacagtaaacatgagtaacttgtgtaataaataataataggctgggtgcgatggcttacacctataatctcagcactttgggaggccaaagcaggtggactgcttgagctcagtagttcgagaccagcctgggcaacatggcaaaaccctgtctctactaaaaatacaaaaattagctgggcatggtggcatacgtctgtggtcccagatgcttgggaggctgaggtgggaaggatcccttgagcccaggaggttgaggctgcagtgagccctgattgtgccactgtactctatctagcctaggtaacagaatgagaccctgtttcacaaaataacaataatagtaatacttaaatggagataaaagtaatagaggaagaggcaggaggaaggagagtcctgagggatctttccatttcccttatttctcttgctacagatttctgtacgagcgacatgagcagtccaagcaggacctcaagggtctggaggagacagttgtgagtrgttcccttctgtgccaaattcacaggactggggagtggggaggcttcatttcttcctaaccctattcctcctgcccttttgcagccattctgtagcgtaatcaagacacattttttcctaaaggataagtgactcacttgattatagagactggaggtacctataattctggaggaataggacagacctggtatctggctattcccaatttttcatcattctttccaggcccgggaactccagaccctccacaaccttcgcaagctgttcgttcaagacgtcacgactcgagtcaagaaagtgagtgctgtccttggggttttgtcagcccccacatcctcctcctatccttaggtttctcctgcccctgttgcccctatggggctggcttggcctggtcttggtgggacctgtttggcctcaggacagccacgtctttccttctatctgttctcagagtgcagaaatggagcccgaagacagtggggggattcactcccaaaagcagaagatttcctttcttgagaacaacctggaacagcttacaaaggttcacaaacaggtaagagtctgctgaaggagtgaagagaatttttgaggccgggtagctagcataccaaatcctcagaggccccttggattcaggaaaatctagttgcatgttttccttactgttcgcttttactttccctactaatcccttctttataccatatttggtccacttgtaccttgttctttgtttcatgcctgtattcccttctcaaagtttctaacccacctctgctcaaagtggaattccccaggcctaccttggagggagaggttgaaactaacagaggcatgggctgtaactatacaggarggagactggtcagacgttacccagagatggaaggcagggagatgagaagaagcaagggagttgggcttctttcgtggagagaactccatctgtctaggtctgtggcaggcatgcagggacattaaatgatgtccctggctaggcacagtggtgcatgcctgtagtcccagcgcttcaggaagccgaggcgggcggatcacttgagcacaggagttcaagaccagcctaagcaacatggcgaaaccccatctctacaaaaaatacaaaaattagccggatgtggtggcacacacccatagtcccagctacttgggaggctgaggtagggcaattgcttgagcgcaggaagtagaggctgcagtgagctgtgatcatgccactgcactccagcctaggtgacagagtgagaccctgtttcaattaaaaaaaaatgatgtccctaagatggcccaaccagcccctggttggggccccagtcaaaactcctgtgtattaagttgctgcctctctgtccccctccttgctgttgcggttctttaggtggatgactgggtttcaaaggtatgggctggggatgcagaagggcagtccaaaggagtcaggacaggaaatgtttggtgcatgctgggtaggggcactctcactagcactaaatatctgagccttgaagacaggctcggcaggctgtcaactggtccttttaactaattcataaaataaaccctaacctatacttcattcctttcctttcaaatctaccttaagattccatttaaacttacattctcactagcctagcacttaaacttcttttcctcccagtataatgcccagcttatatagtaaatattcagtacttttttttttcttaatgaatcctaaacctgtgcccagtgataatgtacagagtttatttatcttatttaggcctgcagagggctttgctacgattttatttcctttattatgaaactgagtaacaaaattatagaaaagttgaaaggcagataggaaacatttgaaatcaattctgccattcgattttcattcccgcattcactttccctctctgtccaaatccatattatgttgcttagaacacacacacacatgtgtgtgctactctgggcctctctgcctatgggaaagccctgctctatggagcaagccccagaaaaatttccatgaaaaaacacaaccacacactgtttcctttatcgtcactgaagcctctgcctctgttcaaagtcccaaaaaaacaaaaatgactcacctataggataaatagaggactcactacaatttcctacctcagcagacacaagagtaaaaaggaaaaggagataaaaacttctcagttaagagaatcttaacagccaggactatagccctatatcaattaagctaaagtattgtcacagcaaaacattgcttatactccataaattgtccaaatggaaactgcatggaagggtttctagcttgtccccttgagcccccagtgttccccgctatgctgatttacccgctgtcttccaaggccctgctccttttgcaacctrtagtgcccccagtcattgtgtggaacctgtaaaaagatcaggaagtcttttcgggctgcagggtggttgctcccatgctctagcttaatttcactgggggagggataacccaggaagtccttgaatgtgaaggtaatgagtgcaaatgtttgtgagacctcaaacattttctttccttcctacggggcgggctctgcctgtctatatgtgtatgtcaggggctcctgaattccagcttctgctcctgctctgcactgcacctgccatgcacagattctcctcaatgccacagccaccaaactgctactgtgcccttgctgccccaccctttgcatgcccacaaagccctctctggggaagcgggtccctcatccccatggccgccctggggctattgatctggcacatgctgggagatgtgggggaaaccagatggagacaggacaaggcgctctcacaagagttctgggctgcagtggagatggcaggttttactgcctagaaaattatataacttttaaatgcctgaccacccacccttcgctctgggagaaggaatgagctggacagaacagtccattacataaaggcaatgaggccttttgaggaaatgacatggtctccatcttctctgactcctgatttttctttattctctctcctcacccctgtcccctacrctcctctgggtgaccgtcttgggtcacttgccttcctttccacttcttccctttggcttgccccatagctggtacgtgacaatgcagatctgcgttgtgagcttcctaaattggaaaaacgacttagggctacggctgagagagttaaggccctggagggtgcactgaaggaggccaaggagggcgccatgaaggacaagcgccggtaccagcaggaggtggaccgcatcaaggaggccgttcgctacaagagctcgggcaaacggggccattctgcccagattggtgagtaggtgttagcaggcaaggtgggagtatctcctgaagcaaatttagcaaattgctaattgccaagcaactagattattgcttcttacctacccctagcctcatcccacttccccccaaaaagtaaaaaagtgattatgttacaagcaactcagttcaaccccagctaaatgacctcagggaccagggcaaatgcmgggtcatagcctcctcatggttgttttctttctttattgcagccaaacccgtccgrcctggccactacccagcatcctcacccaccaacccctatggcacccggagccctgagtgcatcagttacaccaacagcctcttccagaactaccagaatctctacctgcaggccacacccagctccacctcagatatgtagtgagtgaccacacgtgtgggttggagtcccacccaaagctccctggaccctagaaggcatagggtgggggcagttattggttgtggcttaattattttcctaaaccctttctcaacttcatgcctatgattagaaggtaggtgtctgccctcccagcctgtggccatgtttgttttcctctgctctctggggatggggagggctgagcagctctatcrctgaggatgagtgtggattagtggtcctcagactagtggagggtgggtgtcagaggctgcctctttcctctgctccatccagctttgcaaactcctgtaccagcagtggagccacatcttctggcggccccttggcttcctaccagaaggccaacatggacaatggtgagtgaaaaagatgggtaatcccacctttggggtcctcagggcaagttgagaggcataaaagtaagtgaccttagtgtacaaaaaacactgactgaamctttctggtgtgccaaggcttcaaataaaaaaaaaaatacatatagccaggtgtggtggcatgcacctgtagtcstagctacttgggaggttgagataggaggattgcttgagctcasgagcttaaggctgaagtgcactgtgaatacacctgtgaatagccactgcactcagcctgggcagcatagtaaagccccatctctaaaataataataataacacatatgaagaaaaaagtgaccctgtacctacagcctgagcactgcccagccctttaggtctcrggctgcctgggagtggattcctcctattaccacgccaatcccagcccttrccttccagttcccttttcctctccttggtgaggggctgcagaaactttttctcgaacaaaataatgatgtagcttgggataactaaggagaaagtgtcacagcttatctttttctctaagggattaagatgggagagggtttgcrcaaactgtttctaacacccaatctccttttttcttcttctaatcctgtgttctcaatgatgatctcttcaggaaatgccacagatatcaatgacaataggtacaacagtccccactacccctgggttctctgggtgggaccagaagaaatgattaaatttcccttgtgccccacttggaggttcctggagcctttggggaagggggagggagtgagactcattcttttcatcactgtgttgtccaggagatccagtcattcccctgcctcagtgcagaatatctcccctcctccaatcccatctgtggcttctccctattccagtgataaggtstggacgaaaacaacgtgggcatctgacgactgggtttctctcctacctttggaagccttgtgacattggacaagtcatttacatccctctggccttgagtttccctgtattcctgtaaaacacaaatagtccctgccgtttgtgatctcacagggacactctcagagcagagtaaccatgatgacaggaatactttaatttctatggagctgatcatggtgggtctcttcctccaggagtgacctgccgtgtggctatgaggctgaggaccaggccaagcttttccctctccaccaagagacagcagccagctaatctcccacacccacggctgcatacctgcactttcaggtagygtcaggctgcttcctcggaccagcctcaggttgcttmccttcttgctgacagcctctttggttttcctgctgctgctkcttttttttttttatcacctcaaaactttaattatgtagttacccctcaactcctgctttcccctgttgggggctacacctgtgctgccccatgtaatctggacgttgacctcccgtgcccccttttgctttccgttaggctacagtggtaaccacagtactgtctttttgccactaggggtcactgtcacatgtccaaagaagtgagcttggccgctgtagattagaaccacaggggtggtagactgcagatctatcaggagaccctagggggccmtctcaaccccacctcttcctccaccctgaaataattttggatggataggtgtttttggaactaagacatctccagttaaggcgatgtttgcttcacgcctgcacctgtgtcccatcctcttcccatctgtatatgccaccagtaagctttaggaaacgccccacgaaatcagtcagcgctcccctcccatcttgctcagtggaggtggcaaagcccctctttttcctcctctgtccccaggtgctctcctctagcagcacaggaaccttctttgttcttgtgtgtcactgggtttctcaccaaggttgctttagggcccagaagtggcacagagaacatggccagtctcttactgggctgcatctaagctgagccctctccaggggtttcccagaatagtaaaccaggcacacacaggcagaaaagtctgagaagcagagaagtaggaatgcagaagaggagttggggagacctaggggtggaggtgcaagcctgggtcacggggggcggtggtaggggggtctgcttgttggtattaaaggaacaggacagtaaaccaaagtgtgtgcagatgccacctgttcctgttctgtgactgagctacaagctgggccctcacaccctctttctctttctttcccagtttctaagagggactgaggcctcttctcagcatgctgcaaacctgtggtctctgatactaactccctccccaacccctgttgttggactgtactatgtttgatgtcttctcttacttactctgtatctctttgtactctgtatctatatatcaaaagctgctgctatgtctctcttctgtcttattctcaagtatctactgatgtatttagcaatttcaaagcatagtctaccttccttatttggggcaatagggaggagggtgaatgtttcttctttctcatctactcgtctcacactgagtggtgttagtcactgagtagaggtcacagagatgacaaaaggaaaaatgggagctagagggttgtgacccttcatacacacacgcacgcacgcacacaaacatgcacacacgcatgcacacacacaaagccttaagcagaagaatgtcttagcatcatgagacagagaaatagactcttcctccctcctctttcacatatagcacaggggaaggtaaaatggaagggctgctaattgagacatataattttcttcatacacccctcaccttaatcaaaggattcaggtgttacttctgccctacaaagtctgccttttgcctccctcttcctgttttcccctggactgagaaatgggttgctcaagggaccatttccctttttcttcaagctccttttgatattccctgccccagagctcatgaccagaacccagagytgatttaaaatattttgaaaaatggaggaggcagactgctcccagcagcctgtcaatggctgctcatctgtccatggagatggttacaggcaggtgtagtcaaaatgattgattccttgggtttgggggtgaataggctgggaaatttctgagccttttttttttgtcacagtgccctcaagttgaagtgatgagctggatttctttcttgttccatactgggcggcatgctcctcccatctccaccccttggtttgggggcttccagctcattggcaaaatctctctagttgccttcctttcaagctggagcctgacttttccccaatgtacattttttttttctccacaaagagttccttctctaatgtccccatctggtattaagtgcactttaaagaaaggggcagggtggattttcaagaggtgggaagctctaaggcttgaccstgaggggtcttctcccagccattctcagcccatatgcagcaccctccatactgaagaggactgttgttttagtttcagacggtcctttccttccacatggtgctaaggtggttttctaggtaactgcagggatggaggtcactagccattccaaaccaggagagaaagtctggtgtcctgatatccagtcttttctaggaggaagaccaagattctccagcggcagggcagcctatcacccaacttctaagtcaggaaaggaagctgagtgggaatgccagctggtaagcgcaggctgcactggcccatgactccttcaaggaaaagaggccctgctccctttacctgctgagctccttttagcrgttagggagaactgcagggggaaaaataccagtggagtgtggaataaatccaaagcagtgatttttaaatgtttttcaaaaacaaatcttacatagaaccccaatataaaaaataaagtaatgcagacctgggcagtttgcatttttttttttttttttttttggtggaagaagtctcagcgtctcttaggactgactgttcaarggctcctcagcaaatgagcccttgaacagtcctaagagaccctgaggattctgtggagtagtttgaaaaccattgttctgaggaagggggtccaatctggctcctctgcactaaagctgcaactcatggaaaagagggcaacggtggggtagacaagccatgctgtctccagacccactagggtggaaggaaggttcctgtgggcctgtggacttaggctaatatttgctgtcagcagggcacttaagaatccagggggttttatgtaatgttgccaccacatggttcttttaaaaacacataaggaaatgtgagggtgtagcgcagatgaggagagagatgacacagagggagcagccttctctttagcaagatgtaagggaaatataattcacttacataaaaaagaaacaacacacacgcaaacccttcaccagaagcttcacactacatcctcctcctcctcctgctccccaccttcaccgcatccctttcagagccagggtcactgcaaggggcacctggcctgcccactcacatctgccaaaatgttgcatgccagcgtggaagacaaaccaaactgcgcaaccccctgtgtgtatttacttggtgtacatagataactttaaaataaaataaattcaatgataactctatgttgttgtaaatattctttatcccttcccaatctcactgccttctttggatgaaatggaacttgatagaatatatccttccagatgtttttctatagatttacataaggcttgatttttttcctacttgacaatatatcctggagatctttgtatgtcaatatatatcaattgacctcattaaaatataatttttcacatatttatcctacagttcattcaaccagtctacgactggtggatatctatactgtttgtaatttttaccaaaagcactatcttgttctttcatttttgacccagagcagtctcagtcctggcatcaattccttcccactccagtgtttcaccatctctccacagccaacagatcaatattcctgtcccaggatcatccactacaatcacccttccaacccccattttaaagcatactccacctctcttctctgctcatatctcaaagcttctcagatggagaaaactgcacacccaaaaaactggggcaagtaaaactgaagagcctacaaacctgcccggactttcggtgcttctcactttcctctcctatctcccagagcaagggtctacaccctttccaccctcctctgtcaggcaacaactttgtcatctaaggcacttgagcctgaaattcttttatcttgccccctgcccacatgcacctacacaattacctatctgtgtctgcacttatcctttccttctcccttctgaccagtgataaatctcctttctctgggctaaagtgaatcccttctagatatttcattcttgagatactgatatagaatctcaatatacaaatatataacatatctaaaactgataaactgatggagacttgaggagtttgcatcttttttttttttttaaaacagagtctcgctctgttgcccaggctggagtgcagtggcacaatctcggctcacagcaacctccgcctctcaggttcaagcaattctcctgcttcagcctcctgagtatctgggactacatgtgcacaccaccatgcccggctaatttttgcatttttaatggagatgggttttcaccatgttggccaggcttgtctcaaactcctggcctcaagtgatccgcccgcctcggtgcatcttctttattaatgcctgtctcagtggtctcatctccttgtaaggtccttcccataagagtccctccctttactgtgtgtttctctaactgtgtgtttctctatcttacttgttttcttaaagtcagatatccagaaaccatcccaagcttcccatccccacttcctcaccccctattcattccttagcccaccttgatctgcctcttgttctgctcaaaactgcttttccaaatggcattagttaccaaatacagtggacatttcttctggacaacagtccttgttttgcttcacctctccatgacatatacttcttcactccttccttcttgaaactcaactccccttggcttttgtgaccctgctgtcttggctccctgtacttccctggccacccttccgagtcttcctccccaggcctcttaaatgctgctctatcccagggctcagcccttggttccttccttgctctttctaagacatgtcatccatgcctgcagattccacaattcttcaatccgtatccccagtccagaacattctgctcagctgcgggagcatgtgtccagctgacctcagatgcctcaaacatgttccaaaccgaactcaccttcctctgaatctgctccttttcatgtcaccatcatctctctgatatcatcatcatcattagccagaagccttagactcactctcaatgcctcccttttccttcaatccccacattcatatgaattttccaagttgacatcaaactgcatctttagatgccaccctcttctttcaaacacaacagccactgctttagttcattatctctccctgaacttttgcaatactcaagtcatcctccaggaacatgcctgagtgatcctttttttttttttttgagatggagtcttgctctgttgcccacgctggagtgcagtggcaggatctcggctcactgcaaccttggcaccccccctcccccagttcaagcgattctcctgcctcagcctcctgagtagctgggattacaggtgtgcgccaccacgcccggctaaattttgtatttttagttgagatggggtttcaccatgttggtcaagctggtctcgaactccttgtagggtccagacctactgggcttagcgggtgttctccctgtgtgcggagacgagagattgtaagaaataaagacacaagacaaagagataaagagaaaacagctaggcctggggaccactgccaccaagacgcggagaccgatagtggcccctaatggctaggcgcactggtatttattgaatacaagacaaggggcagggtaaggaggggtgagttgtccaagtgattgataaggtcaagcaaatcacgtgatcatgggataggggtcccttcccttttaggtagccaaagcagagagggaaggcagcatacgtcagcattttcttctatgcacttataagaaagatcaaagactaagattttcactatttcttctaccgctatctactaagaacttcaaagaggaaccaggagtacaggaggaacatgaaagtggacaaggagcgtgaccactgaagcacagcaccaaagggaggggtttaggcctctggatgactgcaggcaggcctagataatatccagcctcccacaagaagctggtggagcagagtgttccctgactcctccacggaaagggagactccctttcgcggtccgctaagcaacaggtgccttcccaggcactggtgttaccgcttgaccagggagccctcaaatggcccttatgcgggcgtgacagagggctcacttcttgccttctaggtcacttctcacaatgtcccttcagcacctgaccctatacctgccggttattcctaggttatattagtaatgccacaaagagtaatattaaaagctaatgatttataatgtttatactgatgattgataattgtccatgatcatctctatatctaatttgtattgtaactactctttattctaactattttctttattatactgcaacagtttgtgccttcagtctcttgccttggcacctgggtaatcctttgcccacaactcctgacctcaggtgatcctcccgactcggccccgcaaagtgctgggattataggcgtgagctaccgcatctggctttttttttttttttttttttttgagacagagtcttgctctgtcgcccaggctggagtgcaatggcatgatctgggctcactgcaacctctgcctcctgggttcaagcgattctcctgcctcagcctctcaagtagctgggactacaggcacctgccaacatgcccggctttttttttttttttttttttttgagatggagtctcactctgtcacccaggctggagtgcagtggcgtgatctctgcttggcgtgatctctgcttggcgtgatctcggctcactgctacctccgcctcctgggttcaagtgattctcctgcctcagcctcctgagtagctgggattacaggctcacgccaccacgcccggctaatgcccggctaatttttgtatttttgtagagacgaggtttcaccatgttggccaggctggtcttgaactcccaacctcaggtgatcctcccgcctcggcctcccaaagtgctgggattacaggcgtgagtcaccgcgcccggcttcgttctttcttgtctccatgtctttgtatgctgttctctttgtctagacagccttttaacctctattcctgaactccacccacccttccaaactcagtaaagtctctatcctctttgaagccttccctgaccagctacacttcctttctttgtatcattgtctttgcttcatacacagttctaggatagctcatactttgcatactgcaaacttgatctccattggccagccagtgccattagactcccaactacttcggggcagtcactgtcctattccctgcttcaataaaaggaaaatcagcccctagaacaggacctagtacaactaagtgcacaataaatacttgttaaatgaatgaatgaatttcaagacgcttgagaccactggtaagaattttgggtttccaaaaccctccccttcccaacccccattcggtaagaatgctttcgcattagcatcaggtccgaggttactcattagaaactgggcaaagccggaaggcggccactttgcagcaaagaagccctagaccttgggagtcaatcaggccagcccaggccgcaccacggtctcctagttgacagttcgaggggcctcgcgggccgcttgcttcgtcagcttacagggatcccgcacgccaggtgagcccacacactgagcggacattggggcaggcaggcaggcgccggggggcggggccagcgtcgccccgccccgtcctgcctcgccctgttcgcgcgtccgctgtccggcctccggtcacgtgacagcagcgcaggtgagcgccgcttccggggtcgggcgcctggatagctgccggctccggcttccacttggtcggttgcgcgggagactatggcgtcctcctcggtcccaccagccacggtatcggcggcgacagcaggccccggcccaggtttcggcttcgcctccaagaccaagaagaagcatttcgtgcagcagaaggtgaaggtgttccgggcggccgacccgctggtgggtgtgttcctgtggggcgtagcccactcggtgagaaccagccctagacccccgcagccctgtccaaacccctcggctccgaggcgtccctgtttccaggctccagcctccggagccccacgcagtgccactcccctcccccgggttgtcttggtccctgcccaccaaccccaggtgttcccccagcaggttttctgactgtggacttttttctccccaacagttctttactgctccactctagttccaccttccccccgtgaaatccagctccctgtgctttgactccttcctgccatgtctagcttcagcctcaggctacgcggactggccaggaccgggcgcaagcggggaggacattagggggagtggctttttctcgggtggttgttggtgagagtgtaggtggagggtgaggggccgaggggagtagatggatgaaaaggttctttcactttgctttccaccttgcttcccagccccggtccttggcttttgaatcttggttttgtctcggggaagctccaggtttcctgggctttctaatcctgcttgtcccttcctttcccttccagaggtacagcattttagagaagctaccccaccctgagctagaagttgcacactctcaggacttatgtatatatgcctttggtcttaactgc

SEQ ID NO: 96537 - DNA, 36738 bp, Homo sapiens
taatacccatcacaaagagatattaaagaattaataataatggtgatcactgccgtttaatgagagatacccatgggtgtgttgctctacagtttccttctttctctcacttaattctgaaaacattcctgtgaggtggacagtgtccgagctctttctgcctcttggccagtttgggccctgttcttcccattacccgctattcggttgcccatattttctccctccttttttgccatgtcatgttttcttccccaacttgtattctcctctgcttttcctttgtaataagctcattcccctaacctgttgcatctctcacaccaaatttcagaccaaaagaaaaacctgtgatgggtttggggaaagtataggcccatgggtaggctttttattccctccctcttcatctcttctgtctcttaaatgaaggcatcagactttgtaaccagttagcagagggcatcttgaaggagtttgtcttgttcagcatcaaaacccctgacatttaaccctctgcctagtacatgggcattcagtaagtgagtgaataaatccaattcacatcgtacatttatttaaaagagtagttttgctgggtgcggtggcactctagaagccaacacaatgctttagaatggtattgtggccaaattatggtgtacccaagtgtatgtaacagtgatttatgataacagctaacagggttggaggaatgtctcaagtattagtatttagagaacccaattatagaatacacattgaaatgaaaattgaataacctgtaactggatacttaccattctcctcccacctaacatggacatactttttacattataaaccatctattagattcttttaaaggtgagattatggagatagaagagcaaggaagagccagttagtgggtcagaaaatgaaacttctgtgcttaaaatggtcataagtgatgtagctgtgagcaaaaactgctcgcatttgtcactaatttcgcttctaggtgctgagatgtgtttcccattttaagtattgtttacactttcctacgtgtccaggagagttttgagaattgaggaaagtttcctgcttattcgtagctaggtaggcttagaatggttttaacattcttttatcatccagtttgcttgaccaatggctatgggtttgttgcagttctgcatccgtttctgtacttgttttgtaaagagaatccacacagtaaacaaaagagaggagagaggtaatctttccatctcttttaatacactgtaaaaattgggatagtgccaccatctgcttatttgttgacgtattattcacagtgctggtcccaaaggcgataacatctatgaatggagatcaaccattctagggcctccaggatccgtgtatgagggtggtgtattctttctcgatatcacttttacaccagaatatcccttcaagcctccaaaggtaagaaatctccctgtatgctcaaatttactaattcccacaagagagcaactgttgaggtttttctaaatttaatttttaatcacagaaactagatttatcttatgtcctaatagatctgagtattttaacatatacaaaacacttctttaggttgattttgccttatctggcagagaccattctaggattaagtgctttgttttgatggtgcttaaaattgtgctatttatagtaatattgtcagcaacctagaattaatcccctgttttccagcccatagagaaatgtttttgaacctttctcgaggttaaaaatggtgtcaagccaggtgcagtggtgtgcacctgtagtccagctacttgggaggattgtttgagcccaagagtttgagtccagtctgggcaacaaagcaagaccccaaaaaaaggcagggcaggtcagggggccaaacaactagagaatcagaatctcttcccaaagctttggattctgttgtgctccctgtcatgttttggtcttgttcctttacctccaggcctcagttttctttctaggacaggtgaggattgcccaagtcacccatctcctgtactcaatctatgattctcattcagtcagaaagaaaaccccgtcttggggattaggtagactgccagataaaagtacaactgcagcaacaagaagtaatcgaaagtcacttttttaaaaaattggtaaaattacaggtaatttttactttgtgttttggtatatttcacaaataaaaattaagagacccaaataacaccagcttatgtgacttgtgttctgctgtggtccttgcccattactggctctgcatccatggacactcgattatataatagtaaattctgtgatgtaggtagacaggatgtctataggacctgatgtaacggtcagaaaaaagcagaaatagacttctcttcaaattttgttcagccttttgggtgtagtcattgtttgctaagtatgttgtttaattatctttatgtacccattatgttgcacttcagtttttaagaggtatttatgattctcagtattttaaagcttactttgaggcagtgtagtactaccagctaacacaagaggtcagcaaacaattagctattcaaacttggaaatgttaatatttaaaagatttaaaattgctaaagatgaaattaggaagtactgaacttaccgtcagtggacataacattttaaatgaaattgacacagtccctgagatggtatcaatgaacactttctaatcaaatttattgtctatcttcttgacagctttaattaaaactgcttttagtcaccttcttaagggtcattcagttgaatatttagtaacaagtttgtttgctgtttaaatattgtctgtcacttgttttttttaggttacatttcggacaagaatctatcattgtaatattaacagtcaaggtgttatttgcttggacatattgaaagataattggagtccagcactaaccatttctaaagtcctcctttctatctgctcacttcttacagactgtaatcctggtaaggttcataattctttaccttgttttattcttccttacctgaaaaatacttgtttccaaaagctttcaaaggacaaaactaatttttctgcacaagtttgtgaatacaaaaactaatcggcttttcaaaagaaagttttaatcaagttcagtctactagttgagacacacaacttcattaatcagtatattctagcaacaaggtattttaaactgaagactgacgtaagtttgccttgggcttttagtttcaattattcttcctcctttttttttcctgttgcttaatttcccatagagttcttataaaacaaatcagacacttctaaatgtcgagtcatctgcctggcaagcctcacctgtgcctctggggttcagtgagcatgtgtcccatagctggtcactgagatggcactcaattttgaaaatggtagttgttaaatacttagtgactattgaattgtgacttttttgggacttcatttcatttaaaaaatatttttctgtagtcacagctactagggtggctgaggtgtcaggattgtttgaacccagaaggtcaaagctgcagtgagccatgagcatgtcactgcactgcattccagcctgggtggcaaagcgagaccctgtctcaaaaaatatatatatatacacatatgtatatatatacacacccacagacaaatatattttctaggtaaaccaaatataaatttattaaagatcctaagattcagagaaatactatacttaattggaggtccaggttttgcctggcaacctggctctttaaccagcgtaaaggttaatagtgttgcactgcaacagccccgaagacttcacagtattcacaatgccgttaactggtgacattgagctaagggtcacatgaacacagctggatgttcattgcagtctgaagccttgaccgttccagtctctactgaactcagcctaacacataagagtaaagaaactccaattgagtgttgtttgttgggagaaaaatggaatgaactaagataaagacagaccagtacactaaagcctaagcattccctcttcccccaacgttatgtttttttgaaattttgatggaaaaatatccagcatggtggagtggtgtttcgaagatgggtttgatcacacatactttgtcgtacgtatctacccaagctgtcactattcgctaaagtttaaaatgttcttttcctttctccaaagtaatctacattcttttcttccagccgaccccttggtgggaagtattgccactcagtatatgaccaacagagcagaacatgacagaatggccagacagtggaccaagagatacgctacataaattggggtttcacaattcttacattatttgtctgtcacagaagagagctgcttatgattttgaaggggtcagggagggtgggagttggtaaagagtagggtatttctataacagatattattcagtcttatttcctaagattttgttgtaacttaaggtatcttgctacagtagacagaattggtaatagcaacttttaaaattgtcattagttctgcaatattagctgaaatgtagtacagaaaagaatgtacatttagacatttgggttcagttgcttgtagtctgtaaatttaaaacagcttaatttggtacaggttacacatatggccatttatgtaaagtccctctaagactacatactttttgtttaaaacaaaattggaatttgttttcccttcttggaagggaacattgatatttaacagagtttttagagattgtcatctcatatatataaaatggacacgtggctataaaacaccatataagagatgagtagtgcgttttattttatatgccaatctactttgtttaaaaaaggtctgaatcaggacttgtgaaaacctgtagtgaaataccttaagctgttaactaactgtaaggcgtggaataggagttgctcagtggattggttctatgttgtggactacttaagtctgcatttgttactgtgctaataaacaatattaaaaaccacctaataaacactgctgtgttcatttacttttcttttgccttttggttgccattcgcagattcttctgaaatcgataggtatctgcttctaaaacaagctaaaaataatgcatatttagtaggtattagttagttacctatattaggatctgtactttacacagctgtagatgaggtatcctagaaaaggttaaataatctaccccatttaggcttcaaagacgaaccctactgcatctttttaaaagcattttctgacttgcagatgctgtagtagcaagtacatgagaaatgggttccgtcatggataaattggtaccctgccttagggggcattttggcagtacatgtcctgacccagcagttctgtttctgtatgtctctttcagagaaacttatctggatacacatacattcattacagaatttaaaaagaattggtaactgtttgtactaatatagactaagttgcattagtaggaaacaaagcaaactggaaggtacttatttaaaaatcattatgaaagcatttgtccatctatgtaacatgcatgggtgggaagctagattaatattcaataaccgggggaaaagggtaagggggtgagttagtgtctggtaatttttttttaccaaaaaatgaatttatgatgagaaattttgaagaattatactgtagcagcaatagctgatttgtaagtatcgtcttttatatgtagtagttcttcactagagctcatgaaaaaagtattccatttaagatgttacaaattacttgatgttttaatatgttctttgttgaatagcttattttacatttcagtcaaaatagttatttcacaggtgaaaccactaagtagcttacttcctaccttttaaattaataaagttacagtcagccacattgcttgagtcttgccaaaatctttagagaaacaacacaaactcagacatctaagtcagatcaaattagagcccaatatttttgatacttttattgtatatgamtagttttctagaaaactattccagaagatacagtcttccttccagaaaatacagctttactgtccttaagtgcctaatcattttcaagaggaggagcaaacagtttgccctcaagtatctggtctatcaacaggggtctggctaaggaaaaaacggccttagagmgtgatgaacctacttaacactacctggtacctcaactcatgctaaacattctaatttgagcaaagctaaatcatgggtcttagtctgtttagcaaaatctccacaagatgaaatttagcttactaccccaaactgttcaatgttttgggtccaatttagacacaaaaaaatgttttataatcctagacattagattaatgaactttttaaaaacaaagtcatgtttgggcttagaagtttgcataatgttacacagaatgattatgatatcttccgaaacagcttggggttggggggaagttacacataggtgcatttgcataactatccaaactattttactgttttcacaagtacaacataaataacaaaggtgctaatttcaaagacaggtttcaaacaatgagaataagaatatattatttcatatcaggcaataataaccttagcccaaatacttttaacatctaaagtgcattaattgacttccttaggaattttcctaaggaccaaaggtagayacaaatggcctattttaaatagtaatattactccatgttcacagacacttaaaggcaatcactattcaacatacaattgtggaaattactgatttttagttctcagaattagagttccctttgtttttcctcccaggcaaaggaaagcttgatttgctctggggttgagaaagtttactggctaataaagtgaatggttcaatcagagttttccgatctgtaacagtcacctcccacagtcttactttctcactttttgcccactgctgtgccacttcagcrtccacttgtctctgctcagaaaggtcgattttgtttcctaataccacaattgctacctgaaagaaaacggattgaaaagatcatactagtactttgccaacatcagttcctgggcaaaatggagacataaggaaaattgttccacttaacaaacctgcttcattaaactgattctcaagtgtgactggatattaggatttcaccttactccttaatgcatttttgttaaaaatggagatgctcggccgggcgtgctggctcatgcctatattcccagcactttgggaggccgaggctcgtggatctcttgaggtcaggagttcaagaccaccctggccaacacggtgaaaccccatctctactgaaaataaaaaaattagccaggcstagtggtgtgcgcctgtacttgggaggctgcggcaggagaatcgctggaacccgggaggcagagagggtgcagtaagccgagatggcgccactgcactccagcctgggtgactgtgcaagactccatctcaaaaaaaaaaaaaaaaaaaaaaatgcagatgctctgtagtttgctaactgtaaaaaaaaaaaaattagctcaggtatgaatggaagatggacttgggaaattggcatctaggatacagactggtttcaatgagtctgcatttcagtttggctacacttgatgtatgagagatttgcaacatagtacttcaaaacaagacagctggagctgtgggagttctgtatccatgagaacaggaattgttgtgttcacattattcacaatactaaaaaggtgactgctaagtgtctgttaaatgtatgggccaaaaacaaaaaaagtatgtgccaataggaacattttacacgaatgcttactatacaccagacactgcgcgtgacagaatacagcagtcaaagctcggggaggagaagagaccccaaaccagattttcagatagtgcccgtaaagattacacaagacgatgtgacagtagacaatgggcagcaagaactgtcaaaggcctctctgaggagcagcagtgaactcatcagatcttggaaccactactgtcttccttcctgtctgtacattgagcttgagctccctgtgctccagtaaggccatgccttgctggcaggatgaaagtgggccagagctccagttttctaggggaatcacatactctatctcatctttcaagccctcctgtcattcttcatcacccagggtttcatcttcatgtatctccccctactgtgacctccatctccctctcctcccaactgcagaaactcgttcactttaccccttagaattcagcaagactaacccccactgcatcctccacctctgcgtcctccacctctgctttgaatgttccttcacctttcctagttgccttgcagtcctgcttcctctatcactcccctcctaccactaccacaaggttggggtaagatgtcctccttgtccctcagtgctacctccaatggtgtccttctctaaaacccctgcagaaagctgatgctatcagtctgttgtacctactaatcccaggccggccccccaactgctcctcatcacagagctgactcatggtcaacctgctctcgccgttactctggtcataattcttagtgatttcactggccacgtagatgctgcttccagtaacctggtctcttattctttgacttctccaatggtctcatcatccttacctcagccattcaccactcccgtggtcatatcctagaccttgttttgtttgttttttttaaagagacagggtctctctgtgtcacccaggatggagtgcaatggcttgatcatagctggttgcagccttgatcttctgggctcaagcgatcgtgatcctcctcctcagcctgcccagctatttttttaatttttagagatggggtcttactttattgctggagctggtctcaaactccttgcttcaagcaatcctcctgcctcagctccgcaaagtgctgggattacaggcgtgaactaccacatccagcctagaccttgacattgtaactgctctctatgatctcagttccaggcatcccactctgactcctgccttcccagtcatgcctaatgcccccattgcaagaattccaaacaccacaaggacgtacaacctactggctctactacctttatcattgtccttccacmccactcatgtccttaattcctccctacccagcttagattatttttattcactcccttgcccccattatcccaccatattcacccggcaaaacccctcccttgttaaatttaactattaaccagactctgtgcctacaccatttagctgaatatggctggagaaaaacatacaaccctgctggcccagatcataccactgatctcaaatgaactgatgttctccggcaaatgtattacattttctccatttactctgtaatgagatatcgcatacctttggtgcccttctacaagttccagtatctcctcttccttccccactttcctttcacctgatgaccatattgtttcagtaagatacgcaattagaagagaatttcagccaggcacrgtgactcacacctgtaatcccgtactttgggaggtggaggtgggtggatcatgaggtcaggagattgagaccatcctggctaacacggtgaaaccctatctctactaaaaatacaaaaaaattagccgggcatggtggcgggcgcctgtagtcccagctacttgggaggctgaggcaggagaatggcatgaacccgagaggcagagcttgcagtgagccgagatcatgccactgcactccagcctgggagatggagcaagactccatctcaaaaaaaaaaaaaaaaaaaaacttccacattcttccgccaccacatctaacaacctaccatcttccaagcccatttgctctgccttaaaacccatcctccttcacccggacaagggtgtcactccagcacttagtcccctcatcatcaattttctcccattarcatacaaacacaatcttatctaaataaaacaaacggccgggcatggtggctaatgcctgtaatcccagcactttgggaggcccaggtgggtggatcacctgaggtcagtagtttgagaccagcctgtccaacatggtgaaaccctgtctactaaaaatacaaaaattagccaggtgtggtggtgaacgcctgtaatcccagctactcgggaggctgaggcaggaaaatcgcttgaacctgggaggcggaggttgctgtgggctgagatcatgccactgcactctagcgtgggcaatagcaagactccatctcaaaaaaaacaaggatgatacatctatagccacaggatgaatattatacattagttaccaagaaaaaaaaacrggggtgggtggatgggtgtggtggctcacacctgtaatcccaacagtgtgggaggctgaggaaggaggactgtttgagaccaggagttcaagactagcctgaacaacataacaacacctgtctctacaattaaaaaaaaaaaaaatctgggtactgatatggaaacaactccaagatatgttacatgaaaaacagaaggtacaggatagtatgccacctggtgtgagaaagggaaaaaaggctaggcacacggtggctcacactcataatcccagcactttgggaggccgaggcaggaggatcacttgaagccaggagttgggagaccagcctgggcaacagagcaagaccttgtctttgcaaaaaaataaaaataaaaattaggcaagcatggtgatgtactcctgtagtcccagctactcaggagactgaggcaggaggtcactggagcctgggagttttaggctgcaatcatgccatagctctcaagtctgggcaacagagcaagaccctgtctgaaatagggaaaaaaaaaaaggaggaaaaatatttttaatgtatactcctatttgcttgcatttatataaagaaactctggatgactgccccaaaactaataaaggggtaaaatattttaaaaagcatgcttaatgtacaggatcttggtggttgaggacagctgtgggaaccagactgaacacagtcctttttacatatgattgtcatttttgaaccatgtgcaaacattacttattcaattttttaaaaccaaacatgaaaataaataaatgcaacttaagccatatcatgtcattcctttgccccaaaccagtgctttctgatctcactaaaagtgaaaggcaaagtgcccccatcacctacaacacacctcctagcccactctggcttcactgccgattcctgaacatggcaagcaaattccgacctcagatcctcggtactagctattccctccacctggagcactcttccttccagacatcagctttgttccctccctccttacctccttcaaatatctgctaaagtcaccctacagaaaatagcaccctcattccccattctgcttttccacatagcatcactcattgtaatgtattaaatatatttatttactgtctctctcactcccaaaatagaagctttattgggatatggactgttttgttctctaccacattccctgtacctagaacaatgcctggcacatagtagttgctaaataagcattcacggaattaatacgattatggggattgaagaagcatatgaggaagttactattattctccttttacagataaggaaactgaagcagaaaagctgagaagcaaagccaagatttaagtatctagtacgtgagtgttcattgacctttcaacttttgtggggcagagaggggtctctggaggatacccaagtaaataattacagcatttgcctgtttcggtgggaaagatgggaaatacgggggagaggagctttcatgacttcttacatcttttcaaaaccttgtgaatatgttatctattcataaagtaaattagtattctaaataaaatatcaataacccagatgtcctacaacagataaatggttaaaaagagtttggtacgtaccatggaatactactcaccaagaaaaagaaatgaactactgatccatgcagtgacttggatgaatctccagaggatatgtgagtaaaaaaagccaatcccaaaagattacatattgtatgattttttttttttttttccgagacagagtcttgctctgtcacccaggctggagtgcaatggcatgatctcagctcactgcaacctctgcctcccgggtttcaagcgattctcctgcctcggcctcctgagtagctgggattacaggcgtgtgctaccacgccaggctaatttttgtatttttttagtagagacggggttccaccatgttggtcaagctggactcgaactcctgacctcgtgatctgcccacctcggcctcccaaaatgctgggattacaggtgtgaatcactgcacctggcctgtatgatttcttttatatcaggggtccccaacccctaggtcatgcgctggtaccagtccagggcctgttaggaaccgggccacacaacaggaggtgagcagggagcaagcaagcattaccacctgagctccgcctcctgtcacatcagtggcatgaggttctcacaggagctggagaatcaaattgtgaactgcacatgtgagggatctaggttgcatgctctttttgagaatctaatgcctgatgatctgaggtggaacagcttcatccccaaaccaccccaactccatctgtggaaaaattgtcatccacaaaaccggtccctggtgccaaaaagactggggaccactgatttatataacaatcttgaaatgacacaattataaaaatggagatcagatgagtggttaccaagggttaaggtgggggtgaagatgggagggaagtggggcagctataaaagagtaacatgaaggatctttgtggtgatggaaacgttctgtgtcttgactgaatcaacacaaatacggtggttatgatgtactagagttttgaagatggtaccactggggcaaactgggtaagggatctctctctgttacttcttaaaactgcatgtgactctataattgtctcaaaataaaaagcttaacaaaaaatatgcaaaaatctaagttaagaacatctagccagtactttttgttgttgctgtttgttttgttttttgttttttttctaccatctagccagtactgttaatcagtatattatctggtttcctagacaatgaagagtccgccacgtgaagatctggagaaagatttgagataagagagttccagacagggaaacaagcaattgagaaagcttaataggaaaacaaaactatcatgttgaaaaaacagaaagtagactggtgtcactggagtatagtgagagacaggcagataataaagatgagatgaaaaggacaggcatgggccaggtaatctaaatctttacagaccactgtaaggcatatgaatcttatgtttaagtggtatatgggtagaatccaataattattaggtttctttttttggtaagcctgaagacaagaatcctatgtacccaaggagataataaaaagcccaaggagggcaggcatggtggctcatgcctgtaatctcagcactttgggaggccgaagcaggcggatcacaaagtcaggagatcgagaccatcctggctaacacggtgaaaccctgtttctactaaaaatacaaaaaattactgggcctggtagcacacgcctgtagtcccagctactcaggaggctgaggcagcagaatcccttgaacctgggagttggaggttgcagtgagccaagatcgtgccactgcactccagcctgggtgaaagagagagactcagtctcaaaaaaaacaaaaacaaaaacccaaggaaacagcaataccaaagaacataaaatgaattatgtagtacttgagataagaagtcattaaaattcaacttgtagatggtaacaagcaaaaggcagaaagtcaaattctggtcctaactaaattcagtcagacctgtatttcttgggttaagaaaaaaattctaggccaggcagagcggctcacacgtgtaatcccagcactttgggaggccaaggccggcaaagcacttgaggttaggagttcaagaccagcctggccaacgcggtaataccctgtctccactaaaaatataaaaattagccgggcatagtggcacactcctgtattcccagctacttgggaggctgaggcaggagaatcgcttgtacccgggaggcggaggttgcagtgagccaagatcgcatcattgcactttcaactcttgcctgggagacagagcgagactccgtctcaaaaaaaaaaaaaaaagaaaaagaaaaagaaaagaaaaaaattgtaaaggttttacagatactaagaatatactgtaatgatctgaaaataaactacccaaaagtctgtgctataatttaaatggtattataattcacatttggcatttttaacatatccacttgcctcttttttgtctttgaacttatcgatttctttcttcagaagctccactctttgaaaggattcaaggttattcacactgtacacaagaacgaagccatcagcaaatgaaaaataatgctttggcagctccacgccttcctgtagacctctggtgtcataaagatgtaactgttcttttactcctcggtctgtttctactgaagccatgtatacatcttccattgtttcgcaatcttccattcctgggattaagaaaacaaattactctttttggctaagtcagtgtcaactgctccgtattttcttgtcctttagaaattggctttctaggtttcttatttaccacatataataatcacatttctattttactttttttttttttttttgaaacagggtcctgttctgttgcccaggctgaagtgcagtggctcgatctcagctcactacaacctccgccacctgggctcaagggatcctcccacctcagcctcccaagtagtccctcccagctgggactacaggtgccatcatgcccagtgaattcttgtactttttgtagagacagggtttcaccacgtggcccaggctggtctcgaactcctgggctcaagcaatctacccactttggcctctaaagtgctgggattacgggtgtgaggcactgcacctggcgtaaacaaaattcttttaaaaaatatttcttctgcataaaaataaaaatccccttcttgtttatgatcttttaaaaatgcattttaccactttgtttcatttgtgcaagttttatctcttcaactagtctctaagtttattaagtgaaaggaaccattctgtgtacacagcaaatattcaataagcccttactgataaaggaattaaagggagaagattaacattcttaattttaataagtagtggagagacatgtgataagacaggtaaggtatagtcccagtaaccacctccatatttaaatatgaggccaggcacggtggctcacgcctataatcccagcactttgggaggcctaggtgggcagatcacctgaggtcaggagttcaagaacagcctggccaacatggccaaaccccatctcaactaaaawtacaaaaattcgctgggtgtggtggcgggcacctgttatcccagctactcaggaggttgaggcagggagaattgcttgaacctgggaggcagaggttgcagtgagccgagatcatgccactgcactccagcttggatgacagagcaagactccgtctcaaaaaataataataaaaaaataaaaataaatgaatgtgagatacatccagaggtaaaatcacatggataacatcctataccccccccaatcatactatgttatagttttttttaaactagttacagttttcctaaacaacctaaatactgtagaatgatttgttccagatgccttacatgaaatgtccgttaagtattagattacataaaatctccacaagtattagattaaaaggaataatcacatggtaatacatagattggatcattgagaaaccaaaaatttactttcatcaacataactcataaggaatgtattcagtgtttagaaaggtaaaattattcataaatctgattatgtatatacctgtctgtgtcatcctgtcataaattaagccctaaggaaattaaaggttatctattaagacacaaacgtattgggctttgattacaaattaatttaaaagcaaaaactaccaagcattttgtcatgtgatttttttatccaccaaaagccagtccggttagcccacctccacctgcctctccaaaagggggtctaaagtttagaccttttgatattttggtactctaaagatcaaatgaagtcaagagtcttccactagttctctagatttcctctcccactccacgctgctgggcaactacccatctcgcacaccaggggaaggcttaagggtgcaatctctggggagtataaaatagaggctgtctagactgtgggataaagggaatgagttccaccatgaaaacagggcaattaagtgacatgcctgcgcacacacacatactgaatgttgaagtcctccggctttccctttctgctcccaaaacactggcagccagctctttatccccatccaggggaatctggagaatctggccaacggaaaaggaaaaaatcctaaatatactgacatctaggtttccccaataaatgcccctgccagatcactttagtgaagctctaagtcatgaaccctatccatatgcttagagcttccaattggctttttaagttgtatttatttatttttgagacagggtctcactttgtcatctgggctgaagttcagtgggacaatctcagctcattgcagcctcaacctcctgggctcaagcgatcctcccacctcagcccttcaagtagctgggactacaggtacataccaccaagccccactaattcttgtatttttttgtatagatggggtttcaccatgttgcccaggctggtcttgaactcctgagctcaagcaatctgcctgcttctgcctcccaaagtgctaggattacaggcatgagccactgcactgggcctaggggtccatttttaattatgaacagataaccaaggtttagcagacacctgaagaaaatagagaccaacaagaagagaccgctacagagaaaccaactatacaaagaaaagaaaacaaaaacaaacaaacaaaaaactacctaatctatcaaaaaaataagatagtacatccatgaaataagaacaggatactaacaaaaactcaatagaagggctggaaaataaagataagaatatctaccaaaaagtggtacaaaaatattgagagatgataaacaggaaaggggcaataagaaaattcaaggactagtccagaaggtccagcatccaaaaagagagttccagaaaacaaggacagagaacacagaggaaagaaagcaataacaaaataattcaaaactgaagaacatgcatttccatatagaaggggccctctaagtgtccaatacagtaaatgaaaacagactggccaggctcgggggctcacacctgtaataccagcactttgggaggccaaggtgggcggatcacctgaggtcaggagttcaagaccagcctagccaacatggtgaaaccccatctctactaaaaatacaaaaattagctgggcacggtggtgcgcacctgtaattgcagctacttgggaggctgaagtgggagaattgcctgaactcaggatgcggaggctgcagtgagctgagatcgtgccactgcactccaacccgagtaaaaaaagaaaaagaaagaaaagaaaagatcaattctatgacgcatcactgaaatttcagaacactggtgtcttagtccatttgtgcttctataacaaaataccacagactgggtaatttataaatagaaaatttctttctcacagttctggaggctgggaagtccaagatcaaggtgccagtaggtctggtgtgttgttatggcacagtccctactgcaagatggagccttgttgctgcatccttgggaggggtcaaatgctgtgtcctcacatggtgggagagacagaagggcaagagagcactcccttcaacctcaagcccttttataaggatgctaatctttcatgagggattagtcctcatgaaggtgaagggtggagccctcatgatttaatcacctcttataggccacagtgcttaatactgttacattggagattaagtttcaacatgaattttggaggagacactatccttcaaaccacagcaactaagaacaaagaagagagcctaaaaaagtttccacagacaaagcatcaagaatcataatggttcccagattctcaaaagtagcactagaagcaagaagacaatagaagctgataaagttaaagagacacaccttctatgaatcagyaatttctagatatgtataccagaatttatcacataatagccaggatacatgtacaataatgttccagagtagcattatttccaatagctccaaactggaaaataacccaaatgttcatgaagacctaacagacagaggtagtttcatgcaatagaatgttacatcaatgaaaagtaaacaaccacagctacggcaaaatggatgaatcttttatttttttttctaaatagagatggggtctcctgatgttgcccaggctgatctcaaactctggggctcaagtgatcttcccacctcggcctcccaaagtgctgggattccagtggtgagccaccatgcctggcctgatgtgtcttacaaatataatgttgagtaaaagaagccagacatggattaatttaattcatagaaaatccatagggcaaaaaataaactagaccatttagtgacacacatatgtggcaattaaaaataaaaagaatgattaaccaaaagtcaagggaaggaatgagttgcaactggacagaggaacacagggagccactggcctgtcctcaatgttgtactttttgatccatgtggagattatgtgaaggtttgtcttataattattaaaccatatatgcaatgctttcaaaattccgaaagtatattatttttgacctagagttccatacccatcaaaattacaattcaaatgttagtgtaaaataaagacagtttcaaacatgcaaagcctcagaaaatgtatcacgtatattttctcagaaaactatttgaggagaccctccataaaaactaatatgtaatcatagaaacaggaagaaacagaacctaacacagatatgaagtaaaggaaatcacaagcacaattagtaaatatctcaattcggaagccccagggtcacgactacgtcccaggtagagggcatgttgaaggccatcatcactggatgttctgttctactgtacaaccttttcaaccccagaaaagtactggaaaatgtgctccaaaaaaaaaaaaaaaaggtataagccaaaagaagaaaagaagacaagagatctaggaaacaggaaatcaaaaccagggagaggccgggtgcagtggctcatgcctataatcccaacattttgggaggctgaggcaggcagattgcttgaggccaggagttcaagaccagctggagcaacatggtgaaaccctgtctctactaaaaacacaaaaattagccaggcmtgatggcgcatgaccgtaatcccagctacttgggaggctgaggcaggagaatcacttgaacctaggaggtggaggttgcagtgagccgagatcgtgccactgcactccaccctgggtgacagagcgagactccgtctcaaaaaaaaaaaaaaaaaaaaccaaagggagaaacaaaggggaagttccatgatgatggtggcacagtagataagaggacacagagctcctgaaaggacacagccaagaaaaaaaatagattatctgatggagctgacctcatgcagaactgagaaacatctggactatgtggaaagaactagcaaaaggtataaacaaaactaaagaaatgacaaatacatgttggcttccatgaaaacaaaacaaaaaaaagaatcacagtatactatactgctctgctgagaataccactgacccttaaacaacacagatttgaacttcacatgtcttacatgtagattttctttctcctctgccacctgacacagcaagaccaatccctcctccttctcctcagtctactccacataaaaacaatgaggatgaagacctttacgatgaaccacttccagttaataaatagtaaatatattttttcttccttatgattttttttttttttttgagatggagaatcacttgaacccaggaggtggaggmtgcagtgaggtgagatggcatcactatactccagtctgggagacacagattttattttataggcattatcatcaaagagagtgtcttatatcctttgcagtggctatttttcacttacattcttcttttcaaatttaaataatggtaacctcttatacattttaaaataacctttattttttaaagcaggtttttgttttgttttgttttgttttgatacagtctcgctctgttgcccaggctggagtgcagtggcgtgatcttggctcacgataaactctgcctcccgggttcaagagattctcatgactcagcctcctagatagctgagattacaggcacgtgccaccatgcccagctaatttttatatttttagtagagatggggtttcgccatgttggccatgctggtcttgaactcctgacttcaagtgatccgcctgcctcggcctcccaaagtgctgggattacaggcgtgagccaccacacccggcttcttccttatgattttaataacattttcttatctctagcttactttattgtaagagtacagtatataatacacacaacatataagacatggcaattaactgtttatgttatcaggtttaaggcttctggtcaacagtaagctatgagtagttaagtttctggggggacaaaaatttggttgtcaactgatgggggggcggtgttggcacccctaacccgtgcactgttgaagggtcaattgtactgtatttatatatgccagcagctctccaactgtggtctgcagatctcatgaggtctcctttcaggggacccacatgggcaaaactatattcatactactactaaagccatttgcattttccactgtgttgatatttgtactgatgttgcaaaagcagtggtgggtaaaactgccggtaccttagtgcaaatcgagtcagtggcactaaacgtatagttgccattagatcctctcttcaccatcctgtgcttgcagttaaaaaattaaaaagccagttttacttaagaatgtccttaatgaagcaataaaaatgactaattttattaaatctcaagccttgagtatatatcttttcaatattctatggaattaaatggaaactatacataaagcatttctgcatgcaattatggtaactgtcttgaggaaaatctcttgtgtgttttaaattgcaagctgaactagccatcatttttaaaaagaagaaatgacagaaaaactatgtatttacaatatttgacaaacattttctcaaaaagtaataaaggaagcctatcatttcaaggaaagtaactatggtaacagtatttgttgtcaataaaatttgagctttcaggcaaaaatcagaattgtatccatcatcatgaacttgacagattcccaatactgatgaaattggtatttcatcagatattaacaaaagtgatatggaagacttccttagcgaaccaaaatttccaaaatgaccaattcacgatgctaaaaaactctgcttgggtaaaaagatccatttaaaatgcaggatcaatcaatgagattttaatttagcagagtaaaaaagttcacgaatatgatttcagattctacactgcaataacctttaagtaaccatcacttgttaagttttagtgaaataccaaagaaaaatacccataattacctgaaaaggctattaaagtattcctcctaccttttccaactacatatctgtgtgcggctggattttcttcatatatttcaactgaaacacctcatcacagcagattacaaaggcaagtgttaatagatatgataattgccttctattaagctggacatcagaaaagattttctaaaaagtaaatcaatgccacctttctattttgaaaatataatttttttcataaagttattttaggatataatgagtttattagtgtcatttagaaaaaataagtagtttacaaatgtctccattttccttttctttttttcttttttcagacagggtctcctaagttggaacatactggtgtgatcatggctcactgcagcctcaacctcccatgtgattctcccaccccagcatctcaagtaactggaaccacaggcacatgccaccatgcccacctggataatttctttctttcttttttttttttttctttttttcattttgttttgtttttagtggagatgaggtctcaggctagtctcaaactcctgagcccagctgatcttcccaccttggcctcccaaagtgctgagattaccaagctgtgagccatcacgcctggccacggttttaatttctaatacagtaaatgttggaagatacagcccacataaacagaagttgtttggggtcctcagtaagttttcacagggcaaaaggattctgaaaccaaaaaatttgagaactactgacataggtattataataaacactaaatatgaatttaaccacaattgttaaacattattttagaaagctagaagagaagcagagcacatagaaatggttaatgaaaaacagaaatgtgggccaggcgcagtggctcacgcctgtaatcccagcactttgggaggccgaggcggggggatcacttgaggtcaggagttcgagaccagcctggccaacgtggtgaaaccccgtctctactaaaataaaaatacaaaaattagccagacgtggtagcacgcacccatagtcccagttactcaggaggctgagaaaggagaattggctgaacctgggaggcggaagttgcagtgagccgagattgcaccactgcactcaagcctgggagacagggtgagactccatctcagaaaaacagaaatgtgctttaagttacttgccagaaaaaaatgctttgatgatctctgtttacttatctaacacaaacgtcatttcattctaacctgtgatatctatcttccttactaagccatgacctccagagatgctatcttcacctctgtaacccaaggcctgattacacgtatcatataccaattaataaataattatttgactcagcgaatgaataaatgaatgaggtagcccaattcacaaaattaagtcatactcaccaaacaactgtttcttccatttttaaaaatctacatacagcagctctgcaaagttgtttttgtttttttttgtttttttttttttgagatggagtctcgctctgtcgccaggctggagtgcagtggtgcaatctcagctcgctgcaacctctgcctgtcacattcaagcgattctcctacctcaacctcctgagtagctgcgactacaggcgtgcaccgccacacccagctaatttttgtatttttagtagagacggggtttcaccatgttgtccaggatggtcttgatctcttgacctcatgatctgcctgcctcggcctcccaaagcgtttggattactggtgtgagccactgcgctcggcctttttttttttttttttttgagacagagtctcgctctgtagcccaggctggagtgtagtaacaccatcttggctcactgcaacctcagcctcccaggttcaagagattctcctgcctcaccccctcaagtagcaggattacagccacctgctactatgcctggctaatgttgtatttttagtagagacaggtttcaccatgttggccaggctggtcttgaactcctgacatcaggtgatccgcctgcctcggcctcccaaagtgctggaattacaggcctgagccaccatgcccactggaaagttatgttttcttaaatcagtgattctatgatttgtaatgtaatgaatttacaccattcattatgtaaatacacggaaaaccacatatatacaaaggaatatatatccatattgatctatctatattggccatttctttccttacctgtgataacttacagcaggcactcttgaatttcaataacactaagacttttttccctcctcttttcttacctcttaatctcttttggtccctctggattatacctcccctttatgtaccatcaaccacctttagtttagcatgaccaacaaaagacccctgatagctcccagaacctagagacaaactagagaaaaacaatcttaccaatagtatgatttccataaaggagctgctccaaaattgcagttttccccacagataacaatccacaaaccacaaccttgcagccctttcccatcttctctcaggatatcactgtggagagaataacaggtcttttaaattgtatactgttgaaattaaccatttctttttctttcagtatttcaatttaatatgtaacacatgcacaggggaaattttcaaatacagaaaaggagatatagaataaggtatagccttccaaaccccattccccagtctcccatttcctcccttagagcaataagcattatcagtttcttatatatctcacggagacaatgtagataaatataagaatacaggccaggcacagtggctcatgcctgcaatcctaccactttgggagtccaaggcgggtggatcacctgaggtcaagagttcggcaccagcctggccaacatggtgaaaccccatctctactaaaaatacaaaaattagccaggcgtggtggcactcacctgtaatcccagctactggggaggctgaggcaggagaatcacttgaacccagggggcggaggttgcactgagctgagattgcaccacttcactccagcctgggtgaaagagctagactctgtctgaaaacaaacaaacaaaaaaacacatggataggtatgaatacatctttgttttcaaaaagaataaatacattttatatgaagaatatttcaatactgattaagtctatagcaatccaacagactcttaaatccttgaaagagactgcctactcatcaatatttacctggaaaaataaacatttaagtaaaaatttaaggaggcatgaggataaaatttttagaaaatggacatgatttttcaaagaaacatgaaagtttatgtcagtcttttctcgagaagggaagaaactggattttggtagtcacgtgggctttttttttttttttgagacagggtctagctctgtcactcaggctggagtgcagtgatgagatttcggttcactgcaacctccgcttcccaagggcaagcgattctcctgcctcaatctcccaagtagctgggattacaggtgcctgccaccatgcccggtgaaatttttgtatttttagtagagacggggtttcactatgttggccaggatggtctcaaactcctgacctcaagtgatccgcctgccttggcctcccaaagtgctacgattacaggcgtgagctactgcgcctggctgtcacgtgggctttcttaatcatatttctttttgaggaagaatagacaactctagaaaaattgcccatgcacaggacttcatgactaaaacaccaaaagcaatggcaacaaaagccaaaatagacgaatgggatctaattaaactaaagagcttctgcacagcaaaagaaactaccatcagagtcaacaggcaacctacagaatgggagatttttgcaatctacccatctgacaaagggctaatatccagaatccacaaagaacttaaaaaaatttataagaaaaaaacaaacaaccccatcaaaaagtgggcgaaggatatgaacagacacttctcaaaagaagacatttatgcagccaacagacacatgaaaaaatgctcatcatcactggccatcagagaaatgcaaatcaaaaccacaatgagataccatctcacgccaattagaatggttatcattaaaaagtcaggaaacaacaggtgctggagaggatgtggagaaataggaacacttttacactgttggtgggactgcaaactagctcagccattgtggaagacagtgtggcgatttctcaaagatctagaactagaaataccatttgacccagtaatcccattactgggtatatacccaaaggattataaatcatgctgctataaggacacatgcacacgtatgtttaatggggcactattcacaatagcaaagacttggaaccaacccaaatgtccatcaatgatagactggattaagaaaatatgccacatacgtcgggcgcggtggctcatgcctgtaatcccagcactttgggaggccaaggtgggcggatcacgaggtcaggagattgagaccatcctggctaacatggtgaaaccgtctctactaaaaatacaaaaaattaggtggggcttgcagtgagccgagatcatgccactgcactccagcctgggtgacagagtgagactccgtctcaaawaaaaaaaaaaaaaaaaaaaagtaatacactacaaatgtactttgatcactcattgataatatgattatcaggataatataattatcaggataataggattaacagacaacgtttgctaaaaattatacattgttttgtattgtatgtatatattaataaattggggagttccttttgatattaccaaagaagtcttcatcatgggcaaacggtaaaagtaactgaataaaagtagctcaaaacactagctaagaattttaagcattttttggaaggaaagcaaagagatgacagaacagacctcattaaatattttacactatcaaaaagaaaacaaagatgaaaagataagtgtgattaatcaaagcaggctgaaatattctaggttcctggttgccttccaaataggaaacaataccactacataaagcagatgagtgccttgctaccatcaattacaaagttaagaattctttaaaaaataattaacattttgaataaataacacatacacaaaaatactttattttctataaatgatcgctatggcaggaactcacattacaaataagtggttctcatgcttagatattttcagatttacaaataaaaactactaaaagtttggttcttaaagcacttataattatttaataattcccaaacacaataaatgtacaccagttcctgcgaaatatacaaaggtggtcatctgcagtaccctgaatgggcactgaatcacatgaaccgatcctggggtaaccaagcctcttacttaaatctaggtttcaagaatttgaaaggctctgtagtacatgggtcacctttaggttcctttcaacactgtgatgccatgatattagaagttgcttatccagagaatacatcaacactgaggtgaacacaaaaagcagtagttacagctacttgtcacatccctaccctaagaaactgggcaataaaattcaatctgtgacctattaaacctcacctgatgtaaattactaagagaacgtgcttaataggcaagattcagggcagtcttaaatacttattgctttactttccaggctaatcaataacattgctagagaataaatacaacctcctctctccaacttgaggctaaaaaaaaaaaaaacagagagtaaatatatgacctggtccattcctgtgaaatgctttgtcaacattttctttgaagagccatcagaaacagctccccaaaaccgttattgcttctgttcttctatgtaagtgggccattctatttttataagtaaaacacaactttctgacgcaaccagaaaaacaataccaaaacactgttaacatcataggagagatgttataaatctctaaaaatactgtcatgtggggaaaccacctacactgtgtatttacttatgtcaacattatgtatagtgtggaatactttcacttatccatatatgaatatatttacatacataaaaatatattcaacaggttttgcacacagtattgcacaaaataaaatgtaataaagcagattctagcttaccattcttttattcatttaccaaacatttactgagggcctgccatcatgccagccatcagggacaaactagggggcaaaaacagaaatcatcccttgtcctcaggaatctcaaaatcaactggaaacacaaatccaaatcttgtaaaactgttaactgagaaactacaaattgagaaacaaaactgcaaatgtgattgataaattagcagtgattattcacactactagaattgtttttccaaatgattcatccaactttttaaattttatttttactgctcctttaggagcaggactacgcccataggcagcgtacctacagtagcacattcaactttttagtcatcctcacctttgaaatacatacagggctgcactacttaccattttcatcactactgaagtggtctgggtgaggcaccatgttctctcacctggtctctcaaagatatcgtaatcccccaaacctgtgaatatgtttactttacatactcawacaagaattttgcgggggtgattaaattaagaacttccataygaagatattatcctgaattatctaggtgggcccagtgtaatcacaagtgtctttataagagacacacaggagtgctggagaggacasaaggtgtaattggaagatgctcctttgctggctgtgaagatgaaggaagcagtcaggagccaaggaattcaggcaggcttcataaggtggaaaagccaaggaaataaatgtactctcccctagtacctccagaaggaacacagccctactgactttggttttagcttggtgatatttacagatttacagacctagtctgatgtacaaactaaaagacggtaaatttgtattattaaccaacaaagttgctgaaatttgttacaggagcaatggaagactaacacaatttcctaagcagtctctctgcttccattttttctctccttttagcctcaaaaggagcaatccgagttatctttttaaaatgtacgccatatgaagtcatccttctgttcaaaatctgccaatgaaatccaaagtccatgtgagaaccttcacctctccgacgtcatttcccactttcccctactgtgaatttcagccacactgcttccctgctgttcctctattaatcttgcatgctccagtcatggctcttctccctctgcctgaatcagacccctactcttactcccagactcctatccttgaagtcctttcttaaatgttaccttctctcaaagacttaacctggacactccattccaaattgcaaccctcagccgctaacactccctcatcacttccctccccttatcttttttccttagcatttaccaccaaacccaaaacacagcttacttctgcttactgcccatttccaagaaggccaaaaattctgcgttgtttcctgctgcatccccagcaactatgcctggcacatattagacacttaataaatatttgttgaatcaatcaatgaaccagatagagactcttaaaaacgtaaagctgtgatttaaaaagaaagaaagaaaaatatgatgtgggaaaaaagataatcaaaaccgctacgattaagagataatgattctcttaagcctttgccacatctgaacgcataatctggaaggaaattaaagccacatgacttaaattaaagccaagtgaaaatattctggagaaacaaagtaagccagtaacctatttcycaatttaaaaaaaaacccgcaacgcaaaatgccagcattttctcggcatttcttctctaaaacattcacacctgccaaacaggtcttggcaaataaacattctgctcttctgaaaaactgtggttctcatgttrgcaaatttgggacgaaatccgtatgcagaaaaagcgccgggccgcccgcaatccacccactccatgacccttttttaggacaaaatccctgggcgctggggcctgctggaggagcttcacgcagtctggagctgaagggacacagcgagcgccccgacccgcgacgccccgactccgcgaaggcctccctgggaggctggggaagcgtcgggggatctctcagcgcagctctggggcccagatttctgcgcccgtcgtgcggtggccagagagggacagcgtagcgcggagacgcggagacgcggagacgcagagactccgcagsgggagagcccgcggtgcgtgaaacaaacctgttctctcctcagacctcaaagacagcggctccaccgcggtacgcggccaccggctttggagcctggaccccaacttgcctcctctcgcggagagacagtcgccgacgctcgcttagccgccgagacctcgccgccaactctctcacctctcgagacgcccaggccgctcaggctcgaatcttgcggagcagggggcgggacaatagcggccgcggcgccccactcggcagaactccgccaccaggcgcgatgccggaactacatgtcccatgacgctctgggaggccgcagctttccaccggaaagagggtggctgaggtgggggaggagcccaaaaggcattgtgggagtacagctctttcctttccgtctggcggcagccatcaggtaggctgcgttgaggatctttgctcttccatccgcctttgatcgtcttcctcttcagccatccaggtccggggaccctgcgtcctcggagataggtctccctcctgtgcggccagagtttggtcaggatgcgggacagcaaaggggtggagaggcggcccccggggcgggttgagcgaagatgtgatggcggcgcgaattcgagctgggcccggatcctggaggaggcgtggggctgacgaatggggcgcccgggacaaggcagcctaaagtgaggctgctggttgggtggggtagatgcattttcctcgagagttaatcctcggtggccgcagcagtaccttgtcctgtgatgtcagcggcatctcctttcaggtcctccttggggacgccgcctgccgcagccacccgcccccttggtgctcagttctggttctgttaattcgccccaccaaaacgtgccgagcaccgctctgtgctggggttgcggaagtgactgaacgcggctccgtgggcgcagtggtgggggttgggctagctgtccccggcagttggtgcagagccattttcattcccggcggtttccttgtttttgttggggaactaagatggacggatacagtcgtcttattgtacttaaagcggatgatatttaatacacagtttgatttcacaggtaagccaagatgggtgcatacaagtacatccaggagctatggagaaagaagcagtctgatgtcatgcgctttcttctgagggtccgctgctggcagtaccgccagctctctgctctccacagggctccccgccccacccggcctgataaagcgcgccgactgggctacaaggccaagcaaggtacgtgatcgactgcgtggatgcttggataaaattatattcgagaaaagttggaaaccagctgttaggaagacactgctgcctcagtgtctttcttcgcatagggctttggcagaaaaaagctagcaacactggtcagttactgtatgcactgttgtctaaagtggcaagtgtgtcaaaggttacaaatctgaatgagttcagactaaagcaaaataaacagtgtgcctccctgtgtgagtagcctaaggtgcattgaaaaagactgggatgtgttttatttttttctattagatagcattaacttactgttgaagtatttttggtggagtattagtgacaagccattgagtcttaagccttacggcttcctataaaatcactaatttcgtgtgtgtttgtgtgtaggttacgttatatataggattcgtgttcgccgtggtggccgaaaacgcccagttcctaagggtgcaacttacggcaagcctgtccatcatggtgttaaccagctaaagtttgctcgaagccttcagtccgttgcagaggtaaatggttttgagtagcagttatattgaatactgcctggggatggtgggagagagagattaagcaacttttctgattgtacttaggtgagctgtctcgtatataaaacagggtttgtgatttttactaatcttggtgaagagtaattgcttgaaagacttgtctttgttacaaatgcgtgtgtatatactggaagtacttgtggaacctaagctttaaagcggcaagaatatgcagaagagaccaaatgtggcctgcacagcctaaaatatatactaaatatttttaaagctaaacgttgctgagctctcagttgtatggaaaaagataaggtccccaaaccctaaattttgttacccagatattaacatattcctgccctagtcaggaatggagtattaagagggaatgatgtgtttcagtctatgtgtgttgttttagcaagtctacattatctcattacacttgtgatagtctagggagaaatgcttagtaaataacttgagtagtaaaagactcttgtctggtggtgaactagagttgagaattaaaattctttctgacttgctgctataggcaatgtgggagattgaccttgggccttttttcctattctaggagcgagctggacgccactgtggggctctgagagtcctgaattcttactgggttggtgaagattccacatacaaattttttgaggttatcctcattgatccattccataaagctatcagaagaaatcctgacacccagtggatcaccaaaccagtccacaagcacagggagatgcgtgggctgacatctgcaggccgaaagagccgtggccttggaaagggccacaagttccaccacactattggtggctctcgccgggcagcttggagaaggcgcaatactctccagctccaccgttaccgctaatataagtaaagtttgtaaaattcatacttaataaacaatttaggacagtcatgtctgcttacaggtgttatttgtctgttaaaactagtctgcagatgtttcttgaatgctttgtcaaattaagaaagttaaagtgcaataatgtttgaagacaataagtggtggtgtatcttgtttctaataagataaacttttttgtctttgctttatcttattagggagttgtatgtcagtgtataaaacatactgtgtggtataacaggcttaataaattctttaaaaggagagaactgaaactagccctgtagatttgtctggtgcatgtgatgaaacctgcagctttatcggagtgatggcaatgctctgctggtttattttcaagtggctgcgttttttttagtttggcaggtgtagactttttaagttgggctttagaaaatctgggttagcctgaagaaaattgcctcagcctccacagtaccattttaaattcacataaaaggtgaaagctcctggttcagtgccatggcttcatggcattcagtgattagtggtaatggtaaacactggtgtgttttgaagttgaatgtgcgataaaattattagccttaagattggtaagctagcaatgaatgctagggtgggaagctggtgagccagtggccattagataaatacctttcaagtgtgagcttagacgtcaaccctaaaatacttaaccgtaatgctaattgtgatcattatgaatcccttcagtcacattagggggaaagtagttggctataagtacgtcattcttagtccagtcagtcttaaaaacatcttgggttacccactctgtccactcccataggctacagaaaaagtcacaagcgcatggtttccaaccatatgtgttttctgcagttatttctcttgttctggccaaacaaccctaaaaatccttaccattccacaaagttggaccatcacttgtgcacccactttgactatgagtataccaccacattgcatttctgtttgcaccatgtcttccaggagactagactactgttgtccagggtcaatttgagtgtaaagaaaatgtagacaaggaattgcccaattttaaattctgactttgctgacttaatttaaatgctcgttctgaaccaattttctcctatcttctctaggggtttcaaaagactcagttaattgatttccaggaagtactcatagcaagttcataaaagttcttgagacctaaatttcttcacaaaaaaagaaaagatcttaagtcatacattttaattgtgtagaggttgttcaactgaaggaataaatgtctattaaactaaaacaaatggaccttctgttattttttgtcatcttacagtgctaatgtactttaaagcaaaccaaatgccctaaccagcaaaaaggcatcaaaatgtgattatagaaataatataatttgagatagcataaaatgtacttattctctcagttctttgatcattgcatgaattaggtttttatctaaaactgttcagctgggtgtggtggctcaggcctgtaatcctggcactttgggagacaagctggaggatttgttgaggccagcctgggcagcatagtgagacctaaaaacaaaaaaaatccttaaacatggctaatttgggaaggagagaaagggttcgggccaaaggtcagcattgtctctacaagaaaaccttgttcctgtccttgctacccaacagttttatctccacacagtagtccaagggatcctattaaattgatcatggcactcccgtgcaaaaaaatcaaaagtcctcatgatagctttcatgatcttcccactttatgtgtgacctcatgtcctactgcagtccacaccccaggctccttgctgtttgttcttcaaatacaccaaacacttcctaatgcctttatgatgggaaagctttactccaatattaagggtcactttattagctataccctgaccgccccacaagctgttcccatttgctttactatttctatattggcatgtaattcacacagcaacattgattattgagttgttttttttttttttttttttccagatggagtctcactctcactcaggtgggagtgcagtggggcaatcacggctcactgcaacctctgtctcccgggtttgagcaattcttctgcctcggcctcccaaatagccaggactacaggcgcacactgccatgcccagctaagttttgtatttttagtagagactgggtttcactatgttggccaggctggtctcgaactcctgacctcaagtgatccacctgccttggcctcccaaagtgctgggattacaggcgtgagccaccacccccagcccaatttttattttttgtacagacaggatctcactatgttgcccaggttggtctcaaactactggcctcaagcaatcctgccttggcctcccaaagtgctggaattataggaatgagccaccacaccgggcccaaatttactttagtaataacaacaattggctgggtgcggtggctcacgcctgcaatcccaacactttcggtaaccaaggtgggcttgagctcatgagttagagagcagcctgagcaacgtggtgagagcccatctcacaaaaaataacaaatcagctgggcatggtgttgcacgcctgtagtctccgaaatcacaccactgcactcccatcttgggtgatagagccagaacttgtctcaaaaataacaattggtttcttacaatcccaaaaggtgcagttactagtattaatccttttttgccaatgaggaaacacaaagatgaagcaacttgctcaaagtcatacagtgacagtctgaattcaaatcctatacacttaaagtttatttgttttgttttggttttttttgagatggagtctcactgtgtcgcaaggctggagtgcagtggcacgatctcagctcactgcaacccgggttcaagcgattctcctgcctcagcctcccgagtagctgggactacaggcacgcaccaccacacccagctaatttttgtatttttagtagagacggtttcaccatgttggccaggatggtctcgagctcctgacctcaggtgatcctcccgccttggcctcccaaagtgccgggattacaggtgtcagccactgcacgtggccaacttaaagtttttgatagataatacattaacgttaaaaattcaaaagataagtataggctctacagtacaaacccttctgcctcctagttcctctccctggaggcaaggtgatcagtttaacaatatttttttattttgagacagggtctcactgttgcccaggctggagtgtagtggcgcgttcacaacttactgtagcctcaacctcctggctcaagcaatcctcccacctcagcctgtcgagtagctggaaccacaggtgcacaccaccatgccaggctaatttt

SEQ ID NO: 96538 - DNA, 164152 bp, Homo sapiens
  misc_feature (1)...(164152): n = A,T,C or G
ctggaaaacgggaaaaaagcaggaaagctccaacgcgcagcatcatctctggggacagaggtgtccacgggtctggggtccggggactgtctgaggcaggctgtgccccccaggctctgcgggaactccctggagacccgcagctctgagccttgctgggaacctgcaccagcatctcaagtcccccatcctcgtgttagcagccagtgacacacgtggcttcctagggtgcacgtagtatttatcacccagtgcagaacggggtgagctagggggaggtttctctgttttcctctccagcatcccctccccactgctgagagggtgcgactcctctcccgggactcccaccctagtgcattcttggtgaggctgctgatcacctccgggccctcccctggacacgggcagggtcccaggcggaatcctccagaagcagggcacagtgagcaaggcccatgggggcactttctgctgcagactcccaccccggtccgctgcaggtcccggcctgactcttgggtgtctccctggtcccagggagggctccttgcctttcggtgaccagtccctgagcacctggacacgctccgatccgccgtctccaggcccaggctgagcttgcacttgccctggaggctcgacgggcagagcagggcctgggttgcccaactgcgtgccccaggtgggagccagtcggggcaggagagaggtgtgtgggacccgccccggcacatgggaaggaaggcacaaggtaggttagggtcacccccgactgcagcagctccagaagtgtgcttgggagggaacggccccacccctccccggggctgctgcaccctgtcctccatgtcctggacactaggctaggccagcttgggacagggcctgcctccttgttgcaagcccctccaggccacagaggccggcatgtaccacgtctgacgtctctggccagttcatgccagcctaggggggcagacatcagagccagcagcccctgtcctctcaagtgcttctgacgcccaggtgaaggtaccctcgtgccccagccctggcccagcctccctgcgtcttagcggctgtcacttactgtctgcttcctgcttctgggtctgcgtgactcacaggtgctggggtctaactatccagactccacccagcccagccttggtgaaaggggaacctggctgagaccccgctgggaaagggccctgtctgggccacgtcgaggactgcccaacatgccccttcccaagaaagaagcccatgtctcctggtcccagccctcaacctgaggtccacctggtagtcgggctgagctaacagagggcacccagggcagccatctgtgggggatgttctcagaagggggtagagtcggccctcaggatctatgggttccgcatccgtggattcaaccaagcaaggatgttaaatatttgaaaaaacaaacatgggtggttgtgcttttttttttcttgttatttcctaaacaacacaatatagcaactcttcccacagcagttacattgtattaggtattataagtaatctagaaatgagttaaagtacacagaaggacacgtgtaggttatatgcaaacactacaccatttttttttttttgagatggagtcttgctctgtcgcccaggctagagtgcaatggcatgatctctgctcactgcaacctccgcctcctgggtttaagcgattctcctgcctcagcctcctaagtagctgggattacaggcacgccaccatgcccggctaattttttgtatttttagtagagacggggtttcaggctggtttcgaactcctgacctcgtgatccccccgcctcagcctcccaaactgttgggattacaggtgtgagccactgcgcacagccccccgcccttttttttttgagaccaagtcttgctctgtcgcccaggctggagtgcagtggcgcaatcttggataactgcaacctccgcttcctgggttcaagtaattcacctccctcagcctactaagtagctgggattacaggttcccaccaccacgcccagctaatttttgtatttttagtagagatggggtttcaccatgttggccaggctggtctcaaactcctgacctcaggtgatccacccgccttggcctcccaaagtgctgggattacaggcgtgagccaccatgcctggccaaacactacactattttatagcagggacttgagcatctgcaggggtcctggaatcaattccgcatggatactgaaggacatctgtacatctgagtctgtgagtctctgaggcggtgcttctggtgcccatggacttcgagggatggttaggagtttgataagcggagggaagagtagcaagtgcaaaggctgcaagggaaaggctcagcatgccccgaattcaccaaccaaggcagcaggggtgatgggaggtcctgtggcatgggccagccccgaagggcagacatctccaggaacggcccctctcccacccatccttggattccagcacgtgcaagttctgaaggcaggaaacggaacaaaaccttttcactgctgatgacatgtcctgtgaccctcccacactgtgagtctctcggtctccaaacaaaggcaagaccccaggttccagggaattgccacttgctctggcagagctgctgatgctcagcacccaaccctgctctgctggggcactcactgtgagacgcgtccgaactccacggtcaaggggcaggcggtgagccccacgccaggacttgacacgaagctggacaatggctgaggaaggaggctcagtagcgtgggatggtgaggcgggcggtccaataggcacaaccctggacaccccacagtggggccagggacccacatcagtgacgccgttacccccaagtctgggccccttcccaggaggcatcacccggactgggctgctgactgcagacctcaggtgctctgcccatggctccccaatagctgcccaatcatgcccaggtgtcctgtcacctggcccaatgtcagccctaaacagggcctgaggagcaccctttcccaccagccaggggtagagaggcggggagcagaggctggcctcttggagcgggggagatagcagtaccctggaagcaccctttcccacctgctggggatagagaggcgcggagcagaggctggcctcttgcaggggaggagatggcggcaccctgggtgggcacacagggttgggggctgctgcggagtagcggagcagcaacagaccacctgggggcacccacactccagggctcagcagtgagggtacaagggtgatcttgcccacaggagactcgggacgcctaggaacttcgggtgcggttcctgcctcctggctggctgctgcccttgggctgatgctatggcttgctggtggggccctggctggccaccctgactccgaatgccatgagggacatgcactttcccaggattggctgtgccgggaaccagcgatgcccacacacagacatgacaccttggactacggtggggacccaagggtacactagggggcacaccacctgtggacacaggtgcacacacacgcattagacttgccgccagcgtgagggccaagcctggcttccagcttcctcctccatactgctgttctaacttgggggaggggaagaggaatggggagggggctgctgcagactcagccctgcacctgtggctggtccagctcagctccatcagggacaccttggggccagtgcaggtggggctgggcaagcaggtagacctgctccaacctgcccctcctgctcccgggtttgaggcccacagtgtgtgtctgtgggggacaagatcctgtgcagatccagaaagctctccaagcggctaggcccagcctgtggtgtgaccgcaggcctgcgaggcttcagacacctccatccactaacacccccacccacctaacactggacactcactcagctccgtcctctgctccctaacccaactctcggccttgcctgtaccaggagctcccagctcccacttcccctgtggtgggagggctctgtgtcaggtgaggcagggtgcactgcttgtctgacgggggtcagggacccttctccaggctgggccagggggagccagaggccagtggcttttttttttttttgagaaggagtctcaatctgtcgcccaggctggagtgcagtggcgcaatcttggttcattgcaacctctgcccccgctgggttcacgtgattctcccgcctcagcctcccaagtagcttggatgacaggtgctgccactgctaatttttgtatttttcttagtagagacggggtttcaccatcttggccaggctggtcttgaactcctgacctcgtgatccacccgcctgggcctcccaaagtgttgggataacaagcgtgagccaccgcgcccggcggaggccagtggttttcagggggtgtgacccacagaattcctcaccttggctgttcccaaccatgacggttcccctggttgnnnnnnnnnnnnnnnnnnnnnnnnnnnnnnnnnnnnnnnnnnnnnnnnnnnnnnnnnnnnnnnnnnnnnnnnnnnnnnnnnnnnnnnnnnnnnnnnnnnnnnnnnnnnnnnnnnnnnnnnnnnnnnnnnnnnnnnnnnnnnnnnnnnnnnnnnnnnnnnnnnnnnnnnnnnnnnnnnnnnnnnnnnnnnnnnnnnnnnnnnnnnnnnnnnnnnnnnnnnnnnnnnnnnnnnnnnnnnnnnnnnnnnnnnnnnnnnnnnnnnnnnnnnnnnnnnnnnnnnnnnnnnnnnnnnnnnnnnnnnnnnnnnnnnnnnnnnnnnnnnnnnnnnnnnnnnnnnnnnnnnnnnnnnnnnnnnnnnnnnnnnnnnnnnnnnnnnnnnnnnnnnnnnnnnnnnnnnnnnnnnnnnnnnnnnnnnnnnnnnnnnnnnnnnnnnnnnnnnnnnnnnnnnnnnnnnnnnnnnnnnnnnnnnnnnnnnnnnnnnnnnnnnnnnnnnnnnnnnnnnnnnnnnnnnnnnnnnnnnnnnnnnnnnnnnnnnnnnnnnnnnnnnnnnnnnnnnnnnnnnnnnnnnnnnnnnnnnnnnnnnnnnnnnnnnnnnnnnnnnnnnnnnnnnnnnnnnnnnnnnnnnnnnnnnnnnnnnnnnnnnnnnnnnnnnnnnnnnnnnnnnnnnnnnnnnnnnnnnnnnnnnnnnnnnnnnnnnnnnnnnnnnnnnnnnnnnnnnnnnnnnnnnnnnnnnnnnnnnnnnnnnnnnnnnnnnnnnnnnnnnnnnnnnnnnnnnnnnnnnnnnnnnnnnnnnnnnnnnnnnnnnnnnnnnnnnnnnnnnnnnnnnnnnnnnnnnnnnnnnnnnnnnnnnnnnnnnnnnnnnnnnnnnnnnnnnnnnnnnnnnnnnnnnnnnnnnnnnnnnnnnnnnnnnnnnnnnnnnnnnnnnnnnnnnnnnnnnnnnnnnnnnnnnnnnnnnnnnnnnnnnnnnnnnnnnnnnnnnnnnnnnnnnnnnnnnnnnnattggcccctgccaggctcgggatgccgaacccgccggggccaaatcaggcgcgacctgcgaccgcccgggcgcgcggagcggcgggcagcccatccgacccggtaccgggtacgaacgcgcaggcgcccagtcccacccggctccgcccccggccgccagggcacgtgacccgcgaactcccgggcgcgcccagacgccgcgcacgcgcagtacccagcgccgagcccgagccatggcgtccgagcggctccctaacaggcccgcctgtctgctcgtggccagcggcgccgccgaagtgaggcccggcggccggggccagtgtccgaagagcgtccgcgagggggctgcccggggcgggaggttcgggacacggtgggcgcgcgtcacgtggcgccggaggccgaggccgctgggggcgccgggcaggggccgggggagggcggagcggggtcggtgtcgggatggagctcggggcggggacgggggcgggggtggggtcgcgggttggtgggatggagctcggggcggggtcggggggtcgtgatggatcccggcgccgcgtcgctcctccgagtctcgtctgcccggcgaggcggcccgggcccgacgtttctagcggagggagccgcgtgcctgggcctggtctctgaggccgctgcgctgcgagaggggagcccgggtgtggggaggggccattccgggagttgacccagctctgaggtcgggcggccgcggggaccctgaccttctgagccaccggcttctgaggagacccggagccccctcctggagaaggcgccccgcggcccccgtcctggggcaagggtaccagggcagtactggcctggggctcacgcgggtcggagcgcagcggggtgcgtcccctggcgctgagcctgcagggtctcagggcagcaggggagggatgagcagcggagcacgagggtgcctggccttgttctgagccttttggagagggaagtgagcagcccaaggtcaccgcaccacggagaggtgggggccggggttgcgacccaggggtctgcctcttgaagtctgtagctcctcaagtgtggacggggagatggggctgtggggttgtggcgtcacgatgtgctgagctccaggggtcctgagtgatgcccccagactgcgggtgggaggagcctcgagtggggttcagtcctgggggrgtggattggggcttgtttccagagcaggtaggcgtgaggaggtccggcatgttgaggacgtggggtcttagcgccagcaggctgggggcagcacttcaggaggccggaagggcgggcagctgggggaacagagcctgcggcagtctactgggcactttgtttttcytcgataagtggacattttmcagtgaatatgtattaacttatataagaatgaagaggctgggcgcagtggctcacgcctgtaatcccagcactttgggaggctgaggcgggcggatcacgaggtcaagagatcgagaccattctggctaaaacagtgaaactccgtctctactaaaagaacaaaaattagctgggcgtggtggcaccctcctgtagtcccagctactcgggaggctgaggcaggagaattgcttgagcctggaaggtggaggttgcagtgagccgagatcgcaccactgcactccagcctggcgacagaccgagactctgtctcaaaaaaaaaaaaaaaaaaaaaaaaaaaaagaatgaagataaaaatgaagctgagggattgggccccagagttaaaataaatgtagagagatacagctcacgctactttggaataaacttgtaagtgctctccggcaggcagggtgggcggggctgtgtccttcccctggtaggacagaggcccccagagccttctggattgggtgtggtgtgttgagtttcttttttaaaagttttttgaggggccgaaggatgctaggaagagctggcgggggaggggtataatcccagaacccttgtgaggaaagggtccctctgagcggcttccctggaaggggtgagggggggccaggactcttctgcgttctccatggtgcctgagggcctgagtccctggtggttcagtgagaggatgagctgaactctgtgaccctcacacccgggtttgcctttcagaaaggtctctcgtggctctgttagcactaggatgaggctggggtgtgggagtggcatggacagttgaggtgggctgcatcctctcccagcttctggctgaggctggaggtgacagtgccaggctgggraaagagcccgccatgggggatgcaggcccggggatggcctaccgttctggcagacctggctgtgcccctctgactcatgccttcccagcttccttctcctggacgtgaatgggtggctggccctgccccagggcttcaagtagtcgtycttgggtgtaggggagagggctgctcctcagcgtgttctggggtcagtcgaggccatgggggtgtctgggtagccccctgaggcggggcacgctagtcctgtcgagcccacactcactgggaccttctgcaggtgtgtcggcccagtccttcctccactgtttcacratggccagcaccgccttcaacctgcaggtggccacccctggggtaagtccagcctctccttccccactggacacttggggtctgtctccacctctccgggggcaaggtcaggagactgccgccgckgcctgggaggagtggggagcccctgcagttggtggaggggtgaagagtctgtaaccaaaccctggtggcgtccccctgtcccagtccccatttcctgggctctgatcccccatctgtgatgagggagaccttttcttttccttttttttttgagatggagtttcgctcttgttgcccaggctggagtgcggtggtgcgatctcggctcaccacaacctccgcctcccgggttcaagcagtcctcctgcctcagcctcccgagtagctgggattacaggcatgcgccaccacgcccagctcattttgtatttttagtagagatgggttttcaccgtgttggccaggatggtctcgaactcccaacctcaggtgatccacccgcctcggcctcccaaagtgctgggattataggcatgagcctctgcacccagcccaagggagacctttttgctgtgggtctgtgcttctgcacgtgtgtgaggaggagaccaaggcgcagccctggtgtgaggggcacatgtttccactgggaggaattctccaccctctgatcgtgggggacccagggatatcagatgtacataagtcatagtaaggatgcattatgtatttgtcactgcgggtttttgtttatttattatgtataaaaatttttggttggtgggttggctaggaaataaaccactgaggctgctgctgggacaggctccccgaccctgggagatcccgtgaaggaggctgggtggtcgggggcctttgtgcctcagggggatgctgttgggtcccttgtcagctttttcaggctccctctgagccgacagggatatccctggtgctgaccctcggyccctgggctctgcttctccaggggaaagccatggaatttgtggatgtgactgagagcaatgcacgctgggtgcaagacttccgcctcaaggcttacgccagccccgccaagctcgagtccatcgatggtaggcccgggacccactccttgggggtggggtgcctgggaccttggagggtcaagggttccagataggtttggggtcttagtgagctccctagctcagcccctgaagccctgtgaccatttggggcagyctccagccccacatcctgggccccagagtttctgagcccctctggggaggagagttggtgagtgtgtggagacaggaaagtcaggggggcccttgggagctgtagcccatggaggaaaagggacagatgacatcaccaggctggctggtccctgtggagggtctgtcctggccacgcactygggcctggtcctgcaggtagtctcactttgacatgtggctgctacctggtttgtggtctccccccaggtgcccggtaccatgccctcctgatccccagctgtcctggggccctgaccgacctggccagcagtggctccctggcccgtatcctgcagcacttccactctgagagcagtaggtgacccctgggacccaggggaggggttggatgtgcagtgtcacaagaaatgggtctcccaccagcagaagagaggtgggaagactccaggtaggcgtttctggatctctggtcagtggccactgcagtggttgtgggcaggaggcagggactgccccttcccccgacacacacagactttgtcgtctcctggtgaccatcttgcaggcctctgggtgggctcccgagggtgggtggccatgccctcctgagcaaggcaggacaccggcctgattccttctgggaaagcctggcatccagggctgggcttggggctcaaggccagcaggggtgcagggaggaaggctgtttgaggagacctggcagctgccccggctccgggttgggctgtgatgagtgtgtccactggccggggtggacaagccagcgctctacacagcaccctttgtgtgttggagtggggccgccgtccccagcatggcctggacaggcagcaattgtttgtggccacctcagccgtgggaacacactcagcytttcggatggagccaggatgtccccactgcaaggcacaggcattgcctcaggctacctcccacctgcccaggggcgtcctgtctagccggggaggggcctttcccacagtgcctgccaggctatgcagtggggctgccgggcagcgtcctagggtttggtaaacagacctggaacctcaggacctcctctctgcgtgtgtctcggctgccaaaacctgagatttgggctctaaaccagagcctagtcctgaagcaccagctcccccgagcagattcctgacgccagctgtgcgggctgagccaggacacccgggtgctgagtccagtttccagggaaacctgggaggasgggccaggcaggcggcacaagcctgggggagccacaagcaggggcatctgggaggggcttcagggtgcgggtggcggggtccagggcctcaacgccatgtacggctttcagaacccatctgcgccgtcggccacggtgtcgctgccctgtgctgtgccaccaacgaggacagatcctgggtgttcgacagctacagcctgacaggggtgagtgtctggaggccgaggcacgctgtgctccctgctctgtcctccccccatcacagccagaggtgaggtcggaggctccagggtgagtgcctggaggccgaggcacgctgtgctccctgctctgtcctcccccatcacagccagaggtgaggtcggaggctccagaacctctggcccctagtctcccggaagcccaggcccactcaccaggggacgtggggagggaggggcatcagacttgcgtgtgcagtcaggaggggctgagagcccagccagggtgtcctcggagacacagcctttgtcaatctgaggcccaaaggctgtgaagtgggctctgtggacactgggggcggccgtgggagtggctgatccacaggccctgaggcagggagaggtggctgctgtgcggaggctggtttcactggaagttaaacaggcctggcccccagctcagatgtcacttcccctgctgaggggacccttcctcagtgggtactcagtggtgccctccgaggggtgacaccaacccagtctcaggttacaagtgggcgtgaccccttgagtgagtggttagattcactcctgcccagagggtgccccgccccagcactctgcccaaggggckcaccccaccaagcccttctcattctagtcacctgtgtgctccggtgctgggggagctggcccgtcctcctgtagtggccgtgtcgctctcagggacaccccatgggaagatggctagactttgtcatctctccgccctccagccttagcagctgtccctgttatgagcagtgacaccccyggtcccacttggttgggtgaggctccctgccctgacttgaccttcctgacccctggggtgggccgcagggcctgggcctgtctcaggagcccccaccccgctcccgcagccctctgtgtgtgagctcgtcagggcccccggcttcgcccgcctgccgctcgtggtggaggacttcgtgaaggattcgggcgcctgcttcagtggtgagcctcgagggtgccccctgcacttacagaagatggggtggggggcttccctgctgcagcctgggggagaagcctcctgggccctgggttctatagacccccatggcactgactcagacccagacaggctgacctactgctgaccctgggagcccgcctggagttcgaggctctcagtgggtgaggtggacattgcctgaggttggtgccctcggtcctccccarcaagcgagcctgacgctgtccacgtcgtgctggaccgccacctggtcacaggccagaatgccagctccacygtcccggccgtgcagaacctgctcttcctctgtggcagccggtgagggcaccagggtgggcacattcctgccacatcagagctgcacccggtgcttttgcccaagctttgaccacacgtctgtcctgcaggaaatgaacctgctgggtagatgcaccccctgagacagcccaggtgtctccagaggcagccccgtctcaggcttcagggaccccgcctcttccctcctgacaagggccctggatggcagcctggtctggccctgatgggattgttggaggcctcctggaatcagctctgagggggtgtcggctctcctggagggtccaaacccccatcctcctgcatgttctctggtaggaggcagagaaaagaccccacgtgcctggagagctgtgctagctgctaggtggtcctcgggaattccaggctgggttttctagggaggactggttgtcacgtgtggtcactgttgactagacagagtcggctcgggggtcctctgtgtgggtttgccctgctgtggcctgtctgccacccaccacctctttcactgttggtgggggccttgaggggagggcccagccggcgggagctggctcagaactttggccaaaggtgaacggaattttttaggagcagcagcctcctgccccaaggccgaccggcactggcagcactttcctgttgaagaaatcttcctggcgtgtggtttcaaagtgtaagcacctcagtgatgcaccctgtcctaagcattgagaggcacgtttacttgtgaatatgagaccatgagattctcaatgataggaaagtgctgtcccccacrgccttgcacagtggcctcgggtagagcggctatcaagagcagacagtggtccagcctgctgggcacctggcctgggctgtggccctccagcgggctgccccctggccccaggttagggcgtccaggagaggcttaggccctctacttcctcacagttccccagtttgagccatcgaaggccttcttcctgcccacctccccatctcagccacagccgttcccaagcaccagcgtggctcctggtgccagtgacctgccaggaggccccttgtgattataaaaccgttcagttgggccgggcgcagtggctcacacctgtaaccccagcactttgggaggccgaggcgggcggatcacgaggtcaggagatcgagaccatcctggctaacatggtgaaaccccatctctactaaaaaacaaaaatacaaaaagttagcctggcatggtggtgggtgtgtgtagtcccagctacttgggaggctgaggcaggagaatggcgtgaacctgggaggcagagcttgcagtgagctgagatcgtgccactgcactccagcctgggcaatagagtgagactccatctcaaaaaaaaaacgttcagttggctgggcgcggtggctcacgcctgtaatcccagcactttgggaggccaaggtgggtggatcatctgaagtcaggagtttgggaaaagcctggccaacatggtgaaactaaaatacaaaaatgagccgggtgtggtgtcaggcgcctgtattcccagctacttgggaggctgagacgtgagaattgcttgaacctgggaggcggaagttgcagtgagccaagattgcgccattgcactccaacctgggcaatgagtgaaactccgtctcaaaaataaaaaataataaaataaagccgttcaataaggagaatttggaaaaaagtggaagaaggaagcgctgcagccacatccccgccctgaaggctgcgtccctccagtgcctcgcagattagtcaggatgcccacttagcactggccacggggccttgctctgtcccgggtccactctcatccccgtgtggtgatggacctctgtggacaaatgctttttattttatttatttattttttgagatggagtttgtctctcgtcacccaggctggagtgcagtggcacaatcttggctcactgcaacctctgtctcccgggttcaagcgattctcctgcctcagcctccggagtagctgggattacaggtgtgcgccaccacgcctggctaatttttgtatttttcgtagagaccgagtttcaccatgttggccaggctggtctcgaactcctgacctcaagtgatcctcccgcctcggcctcccaaagtgttaggattacaggcgtgagccactgcgcccggcgtaatttttgtttttagtagagatggggtttcatcatgttggccaggctggtcttgaactcctgacctcaggtgatccatcttcctcagcctcccaaagtgctgggattacaggcgtgagccgccacgtccggctaacaagtacttttttatttttattttattttttggatggagtctcactctgtcgcccaggctggaacacagtggcacgatctcggctcactgcagcctccgcctcccgggttcaagtgattctcctgcctcagcctcccaagtagctaggactacaggtgcacaccaccacacccagctaatttttgtatttttccttttttttttttttgagatggagtcttgctctgttggcaggctggagtgcagtggcgcgatctcagctcactgcaacctctgcctctgcctcccagattcaagcagttctcctgcctcagcctcccgagtaactgggactacaggtgcatgccactacgcccagctagtttttgtattttcagtagagacggggtttcaccatgttggccaggatggtctcgatctcttgacctcatgatctgcccgcctcggcttcccaaagtgctgggactacaggcaagctcatgtcttaatgtcctagtccatttgggctcctataagaannnnnnnnnnnnnnnnnnnnnnnnnnnnnnnnnnnnnnnnnnnnnnnnnnnnnnnnnnnnnnnnnnnnnnnnnnnnnnnnnnnnnnnnnnnnnnnnnnnnnnnnnnnnnnnnnnnnnnnnnnnnnnnnnnnnnnnnnnnnnnnnnnnnnnnnnnnnnnnnnnnnnnnnnnnnnnnnnnnnnnnnnnnnnnnnnnnnnnnnnnnnnnnnnnnnnnnnnnnnnnnnnnnnnnnnnnnnnnnnnnnnnnnnnnnnnnnnnnnnnnnnnnnnnnnnnnnnnnnnnnnnnnnnnnnnnnnnnnnnnnnnnnnnnnnnnnnnnnnnnnnnnnnnnnnnnnnnnnnnnnnnnnnnnnnnnnnnnnnnnnnnnnnnnnnnnnnnnnnnnnnnnnnnnnnnnnnnnnnnnnnnnnnnnnnnnnnnnnnnnnnnnnnnnnnnnnnnnnnnnnnnnnnnnnnnnnnnnnnnnnnnnnnnnnnnnnnnnnnnnnnnnnnnnnnnnnnnnnnnnnnnnnnnnnnnnnnnnnnnnnnnnnnnnnnnnnnnnnnnnnnnnnnnnnnnnnnnnnnnnnnnnnnnnnnnnnnnnnnnnnnnnnnnnnnnnnnnnnnnnnnnnnnnnnnnnnnnnnnnnnnnnnnnnnnnnnnnnnnnnnnnnnnnnnnnnnnnnnnnnnnnnnnnnnnnnnnnnnnnnnnnnnnnnnnnnnnnnnnnnnnnnnnnnnnnnnnnnnnnnnnnnnnnnnnnnnnnnnnnnnnnnnnnnnnnnnnnnnnnnnnnnnnnnnnnnnnnnnnnnnnnnnnnnnnnnnnnnnnnnnnnnnnnnnnnnnnnnnnnnnnnnnnnnnnnnnnnnnnnnnnnnnnnnnnnnnnnnnnnnnnnnnnnnnnnnnnnnnnnnnnnnnnnnnnnnnnnnnnnnnnnnnnnnnnnnnnnnnnnnnnnnnnnnnnnnnnnnnnnnnnnnnnnnnnnnnnnnnnnnnnnnnnnnnnnnnnnnnnnnnnnnnnnnnnnnnnnnnnnnnnnnnnnnnnnnnnnnnnnnnnnnnnnnnnnnnnnnnnnnnnnnnnnnnnnnnnnnnnnnnnnnnnnnnnnnnnnnnnnnnnnnnnnnnnnnnnnnnnnnnnnnnnnnnnnnnnnnnnnnnnnnnnnnnnnnnnnnnnnnnnnnnnnnnnnnnnnnnnnnnnnnnnnnnnnnnnnnnnnnnnnnnnnnnnnnnnnnnnnnnnnnnnnnnnnnnnnnnnnnnnnnnnnnnnnnnnnnnnnnnnnnnnnnnnnnnnnnnnnnnnnnnnnnnnnnnnnnnnnnnnnnnnnnnnnnnnnnnnnnnnnnnnnnnnnnnnnnnnnnnnnnnnnnnnnnnnnnnnnnnnnnnnnnnnnnnnnnnnnnnnnnnnnnnnnnnnnnnnnnnnnnnnnnnnnnnnnnnnnnnnnnnnnnnnnnnnnnnnnnnnnnnnnnnnnnnnnnnnnnnnnnnnnnnnnnnnnnnnnnnnnnnnnnnnnnnnnnnnnnnnnnnnnnnnnnnnnnnnnnnnnnnnnnnnnnnnnnnnnnnnnnnnnnnnnnnnnnnnnnnnnnnnnnnnnnnnnnnnnnnnnnnnnnnnnnnnnnnnnnnnnnnnnnnnnnnnnnnnnnnnnnnnnnnnnnnnnnnnnnnnnnnnnnnnnnnnnnnnnnnnnnnnnnnnnnnnnnnnnnnnnnnnnnnnnnnnnnnnnnnnnnnnnnnnnnnnnnnnnnnnnnnnnnnnnnnnnnnnnnnnnnnnnnnnnnnnnnnnnnnnnnnnnnnnnnnnnnnnnnnnnnnnnnnnnnnnnnnnnnnnnnnnnnnnnnnnnnnnnnnnnnnnnnnnnnnnnnnnnnnnnnnnnnnnnnnnnnnnnnnnnnnnnnnnnnnnnnnnnnnnnnnnnnnnnnnnnnnnnnnnnnnnnnnnnnnnnnnnnnnnnnnnnnnnnnnnnnnnnnnnnnnnnnnnnnnnnnnnnnnnnnnnnnnnnnnnnnnnnnnnnnnnnnnnnnnnnnnnnnnnnnnnnnnnnnnnnnnnnnnnnnnnnnnnnnnnnnnnnnnnnnnnnnnnnnnnnnnnnnnnnnnnnnnnnnnnnnnnnnnnnnnnnnnnnnnnnnnnnnnnnnnnnnnnnnnnnnnnnnnnnnnnnnnnnnnnnnnnnnnnnnnnnnnnnnnnnnnnnnnnnnnnnnnnnnnnnnnnnnnnnnnnnnnnnnnnnnnnnnnnnnnnnnnnnnnnnnnnnnnnnnnnnnnnnnnnnnnnnnnnnnnnnnnnnnnnnnnnnnnnnnnnnnnnnnnnnnnnnnnnnnnnnnnnnnnnnnnnnnnnnnnnnnnnnnnnnnnnnnnnnnnnnnnnnnnnnnnnnnnnnnnnnnnnnnnnnnnnnnnnnnnnnnnnnnnnnnnnnnnnnnnnnnnnnnnnnnnnnnnnnnnnnnnnnnnnnnnnnnnnnnnnnnnnnnnnnnnnnnnnnnnnnnnnnnnnnnnnnnnnnnnnnnnnnnnnnnnnnnnnnnnnnnnnnnnnnnnnnnnnnnnnnnnnnnnnnnnnnnnnnnnnnnnnnnnnnnnnnnnnnnnnnnnnnnnnnnnnnnnnnnnnnnnnnnnnnnnnnnnnnnnnnnnnnnnnnnnnnnnnnnnnnnnnnnnnnnnnnnnnnnnnnnnnnnnnnnnnnnnnnnnnnnnnnnnnnnnnnnnnnnnnnnnnnnnnnnnnnnnnnnnnnnnnnnnnnnnnnnnnnnnnnnnnnnnnnnnnnnnnnnnnnnnnnnnnnnnnnnnnnnnnnnnnnnnnnnnnnnnnnnnnnnnnnnnnnnnnnnnnnnnnnnnnnnnnnnnnnnnnnnnnnnnnnnnnnnnnnnnnnnnnnnnnnnnnnnnnnnnnnnnnnnnnnnnnnnnnnnnnnnnnnnnnnnnnnnnnnnnnnnnnnnnnnnnnnnnnnnnnnnnnnnnnnnnnnnnnnnnnnnnnnnnnnnnnnnnnnnnnnnnnnnnnnnnnnnnnnnnnnnnnnnnnnnnnnnnnnnnnnnnnnnnnnnnnnnnnnnnnnnnnnnnnnnnnnnnnnnnnnnnnnnnnnnnnnnnnnnnnnnnnnnnnnnnnnnnnnnnnnnnnnnnnnnnnnnnnnnnnnnnnnnnnnnnnnnnnnnnnnnnnnnnnnnnnnnnnnnnnnnnnnnnnnnnnnnnnnnnnnnnnnnnnnnnnnnnnnnnnnnnnnnnnnnnnnnnnnnnnnnnnnnnnnnnnnnnnnnnnnnnnnnnnnnnnnnnnnnnnnnnnnnnnnnnnnnnnnnnnnnnnnnnnnnnnnnnnnnnnnnnnnnnnnnnnnnnnnnnnnnnnnnnnnnnnnnnnnnnnnnnnnnnnnnnnnnnnnnnnnnnnnnnnnnnnnnnnnnnnnnnnnnnnnnnnnnnnnnnnnnnnnnnnnnnnnnnnnnnnnnnnnnnnnnnnnnnnnnnnnnnnnnnnnnnnnnnnnnnnnnnnnnnnnnnnnnnnnnnnnnnnnnnnnnnnnnnnnnnnnnnnnnnnnnnnnnnnnnnnnnnnnnnnnnnnnnnnnnnnnnnnnnnnnnnnnnnnnnnnnnnnnnnnnnnnnnnnnnnnnnnnnnnnnnnnnnnnnnnnnnnnnnnnnnnnnnnnnnnnnnnnnnnnnnnnnnnnnnnnnnnnnnnnnnnnnnnnnnnnnnnnnnnnnnnnnnnnnnnnnnnnnnnnnnnnnnnnnnnnnnnnnnnnnnnnnnnnnnnnnnnnnnnnnnnnnnnnnnnnnnnnnnnnnnnnnnnnnnnnnnnnnnnnnnnnnnnnnnnnnnnnnnnnnnnnnnnnnnnnnnnnnnnnnnnnnnnnnnnnnnnnnnnnnnnnnnnnnnnnnnnnnnnnnnnnnnnnnnnnnnnnnnnnnnnnnnnnnnnnnnnnnnnnnnnnnnnnnnnnnnnnnnnnnnnnnnnnnnnnnnnnnnnnnnnnnnnnnnnnnnnnnnnnnnnnnnnnnnnnnnnnnnnnnnnnnnnnnnnnnnnnnnnnnnnnnnnnnnnnnnnnnnnnnnnnnnnnnnnnnnnnnnnnnnnnnnnnnnnnnnnnnnnnnnnnnnnnnnnnnnnnnnnnnnnnnnnnnnnnnnnnnnnnnnnnnnnnnnnnnnnnnnnnnnnnnnnnnnnnnnnnnnnnnnnnnnnnnnnnnnnnnnnnnnnnnnnnnnnnnnnnnnnnnnnnnnnnnnnnnnnnnnnnnnnnnnnnnnnnnnnnnnnnnnnnnnnnnnnnnnnnntgcagttcctccagcagtccacccagagactccactcctaggcatatgcccagcgagaacccagaaaaacatgtccaggacaaaacttgcacatctgtgttcagagcagcagatgtgttcatagcagcagatgtgttcagagcagcagcatacatcacagcccgagaaatggaaaccgaccacagcaatatacatcacagctcaagagatggaaactgaccaggtgtccaccaacagatgaataactgtggcctatccataaaatggagtattttccaacatataaaaacaaatggtccggccaggtgcagtggctcaaacctgtgatcccaacactttgggaggccgaggcgggcggatcacctgaggctgggagtttgagatcagcctgactaacatgagaaaccccatctctactaaaaatataaaattaggcgggagtggtggcgcctgcctgtaatcccagctactccggaggctgaggcaggagaatctcttgaaccccagaggtggaggttgcagtgagctgagatagcaccattgcactccagcatggacgagaatgaaactccgtctcaaaaacaaaaaaaaacaaaaaaacacacaaatgaggccaggcacaatggctcatgcctataatcccagcactttgggaggccaagatgggtagagatctcttgagcccaggggttcgagaccagcctggggaacgtggtgaaattacccaggagtggtatgtgtgcttgtcatcccagccacttgggggactgaggtggaaagatagcttgagcctggagtcaaggctgcagtgagccaagttcgtgccactgcactccagccgtggtgaaaaagtgagatgctatctcagagcaggtcagtgatggcaggtggtagaacatgcagacacacagatgtggaaacaaaacacctcttcctgatgcgaattatttgagtatagcattggctgcttctgggtgagaacatcatagaggagttttactttgttttatacattttctgtctcttccactctgaacatacatatgtttggtttggtttttctgagacagggtctcactctgtcacccaggctggagtgcagtggtacgatcatagctactggaacctcaacttcccaggctcaagcgatcctcccgcctcagcctcctaagtagctggaatcacaggggtgggctagtttttcttttcttttttttttttttttttgagatggagtctcattctgtcacccaggctggagtacaatggtgcaatctcggctcactgcaacgtccacctcccaggttgaagtgattctcctgcttcagcctcccatgtagctaggattacaggcacctgccaccacgcccagctaaattttttgtagttttggtagagacggggttccactatcttggccagcctggtctcgaactcctgacctcaggtgatctacccacctcaggcttccagagtgctaggattacaggtatgagccaccgtgcccggcctaaaagttttcttttctttttgagacagagtcttgctctgtcacccagactggagtgcagtggtgtgatctcagctaactgcaaccttcgcctcctgggttcaagcaattctcctgcctcagcctcctaaatgggactacaggtgtgtgccaccatgcccggctaattttttatattttttagtggagtcggggtttcaccgtgttagccaggatggtctcgatctcctgacctcgtgatccccacgcctcggcctcccaaagtgctgggagccaccgtgcccagcctaaaatttctttatatttttgtagagacaaggtttcactttgttgcccaggctggtctggaactcctgggctcaagtgatcctcccatctcagcctcccaaattgctgggattacaggcatgagccatcttgcccagccagcatatattttatataacaatagtttactttttaaaaatcatgtaaacataggcttgtgttgatcaggacagaggaaggacagaatctgaatctgcaggtgctaactagtggcttttcttctctgctgagtgggtggatggtacttcctgggaaatccctcatttctgatcaccagcaagtgagggagctggctctggagcagagggcagatctaggctgacatgagctggtcaagtccaagctgtgggctgtgctccccagtctggcattccccagggctgagagagtcaaacttgcctgatgccatgtagaccctgctccaacagaggaaaaatctctgagagctccttccttgtgggggaccacttactttccagcctgaattccttcccaggttgatgacagctttataagaattcggtccttgctgatcccagcttccttgtagagctcgatgagccgcctggctctggccaccatcgcatctttatcaaaggagagcctgtaggagcaagaagaacccatcccctcagatcacgcaggttgcccaccacgcagagcaagctggaggccgrgtgtctgcctgtcagttttgagcagcaccaccgtgagcaccaaccactgccctcaaccttcccctcactggaggtttgcagaatggctctgacagcaactcacacccagtctcacaaacagaggtcctcagtgggatccataggctataatttgtattaaaaaacactgggccaggtgccgtggctcacgcctgtaatcccaacactttgggaggctgaggcgggaagatcacaaggtcaagggatcgagaccatcctggccaacatggtgaaaccctgtcgctactaaaaatacaaaaaaattagctgggtatggtggcgggtgtctgtagtcccagctacttgggaggctgaggcaggagaatcgcttgaacccgggaggtgaaggttgcagtgagctgagatcacaccactgcactctacactggcaacagagcgagactctgtctcaaaaaacaaacaaaacaaatcaaaacaaaaaacactagcagccgggcacagtggctcatgcctgtgatcccagcactttgggaggccgaggcaggtggatcatgacgtcaggagttcaagaccagcctggccaaaatggtcaaaccccatctctattaaaaatacaacaaattagctgggcatggtggcaggtgcctgtaatctcagctacttgggaggctgaggcagagaaacgcttcaagccgggagacagaggttgcagtgagctgagattgcgccactgtactccagcctgggtgacagtgcgagactccatctcaaaaataaataaaaataaaaataaaaaacactagagatcagttgctaaacaaggagctcttggtcatcactaccaactgtgggagagctcaaaataaacctcctcttgggcccttgggatgaagaccatgggtggagcagccccttgacctcatgttggcatccacgtgtgcaactgtggacacctgaccagcccatccagtgcaggagcaagcatccttaccttgcgtctacttctgtggatactcggcccggaatcttctttagtatttctgctccaaacaacacaaaaagtttatcaatagcatttttaatctggtcctcttgtgacctgaaattcaaagggaaaaaaagcaggttagaagcttctgaggttcgccaggtgcggtggctcacgcctgtaatcccagcactttgggaggccgaggtgggcggatcatgaggtcaggagatcaagaccatcctggctaacacggtgaaaccccgtctccactaaaaatattaaaaaattagctgggcatggtggcgggtgcctgtagtcctagttactagggaggctgaggcaggagaatgacgtgaacctgggaggtggagcttgcagtgagcagagatcgtgccactgcactccagcctgagcgacagagcgagactccatctcaagaaaaaaaaaaagaagcttctgaggttcaagtgcacaagactctacaaaataaattctgttatttctttgccaaatttccttccctccatctttttttttctcttaaaacatttttttattgtggccaaataatacatataacataaaatttcccatcttatccttttttttttyccccaagacagggtctccagctaaggctggaagcacagtagtgtgattatggctcattacagccttgacctcccgggctcaagtgatcctcctgcctcagcctcccaagtagctgggactacagctgcacacctctatacctggctaatttttttgttttgttgagatggagtgtcactctgtcgcccaggctggagtgcagtggcacaatctcggctctgccagctctgccccccgcggttcacgccattctcctgcctcaacctcctgagtagctgggactacaggcgcccgccactgtgcccggctaatttttttgtatttttggtggagacggggtttcaccgtgttagccaggatggtctcgatctcctgacctcgtgatccgcctgtcttggcctctcaaagtgctgggattacaggcgtgagccaccacgcctggcccatgcccagctaatttttatatttttttgtagagacagagttttgccctattgcctagactgttctcgaactcttaggctgaagggatcctcccatcttggcctaccaaagcactggggttacaggcgtgcaccactgcccccagcccaccattttaaaatgtattcagcacattcacagttctgtacaaccatcaccatccatctccagagctcttttcatcatcccaaactgcatccctctatcttttggcacttgcaaaatattatattttctatctcttcaaagttattggacagacacccagtgaagtccatgattctgttccaaaatctgagcagccttgttagcccactacacacaggaagatcttcagctagacgctcagaggttagaattcttgggccagactgggtgcagtggctcacgcctgtaatcacagcaccctggcaggccaaggtgggcagactgctcaagctcaggagttcgaaaccagctagggcaacatggtgaaaccctgcctctaaaaacaaatacaaatattagccaggtgtggtggcgtgcacctgtagtcccagctacttgggaggctgaggtgggaggctggcttgagcctaggatgtagaggctgcagtgagctgagattgtgacactgcactccagcctaggtgacagagccaaactctatctcaaaaaaaaaaaaaaaaaaaattttggggccatctggacatgggtgcagggctcatctgttgatcacccagccaagcaaaggcaccaatgtcacccaataacaggagcaccaaggcctcactgatgccacaggggtgcaacaccacgagatgaggaaaagggagctaagaagagagaggagagggtcagactcagtgtccagagtggctgtcacaacatggtcaggggagccactcaccagccacctggacctaagcaaagccagtaccagagagggacctgctcctgtgtggtgcccacgttgcctgctcggcaccatcttcaagctttgaattattaccctgaagagaatctaaaatgacatctaaaatatgcaaagccacaggcatgaagagggctctacagttgcttggttgggtaagggagtggggagctactgcaaacaggtaccagagaacattctgggagttataaaagctattaaaaaattaaaaagccaggcacggtggctcacgtctgtaatccgagcactgtgggaggccaaggcaggtggatcacttgaggtaagaagttcgagaccggcctggccaacatggtgaaaccctgtctccaccaaaaatacaaaaattatagccaggtgtgatggcgcatgcctgtaatcccagctgctcggcaggctgaggcaggagaatcgcttgaatctgggaggcagaggttgcggtgagccgagattgtgccagtgcactccagcctggacaacaaaagcaaaactctgtctcaaaaaaaaaaaaaaaaaaaaatacaaaaatgagccaggagtggtggcacacacctgtaagcccagctaattgggaagctgaggcaggagaattgcttgcaccagggaggcggaagttgtagtgagccaagattgctccactatactccagcctgggtgacacagcgagactccgtctgaaaagtaaaaaataaaatgacagccagaaggtaagtgttaccagagctggggagactgactacaggaggggaggaggggcctgtgggggtctgcaagtgctctgcatcttgactggggtggtatttacagggtacacacattggcaaaactctctgaactgctcatttaccacaggtgcaggttacttcatgcagattacacttcaataaacaaaaataggcaaaaagatagggkttttttccccccttgagttcatggtgtttgagaactaaaattcagttagggagggaagcaaggccaactagactagcacgagggcctagctgggaccctcccgagtccaggcactcacccgcccagcttccggccataggcaatcgcctcctccaccagctcctggtaagcrggcatctgtgctgcggccaggatcagggacgggttggtggtagcatcctggggcttgtactcgtcgatggctagggaaatagttttcaaaagccaaagtaagtggagtacttgcttccaactggaaacatgtgaaggaaccctgtaattccccaggacgttaggggagtccagagcatttccgaaagcggggtccagccacacttctcacaccttcttctgggtcactgaaggttcatcaagaggcggctgtttgcataatgatggaacaacaaacactaagtgcccagygatcaaatatgcccctgcaagaggtgacctgtaacagcatgggagtgagcggtgcgacagctgggagaacgctggtcaaaggaaaatgtgcatcccactgccgtaccaccacaaggaggcgcgcggtctagtcatgagccacatgtgaacgctgatcttatggactgggtcattatcaccatacccagctgcaacagagtcaagaagccaaggggagctgggcgcggcggcccacgcctgtaatcccagcactttgggaggctgaagcgggtggatcacgaggtcaggagatcaagaccatcctggctaacacggtgaaaccccgtctctactaaaaatacaaaaaactagctgggtgtggtggtcggcacctgtagtcccagctactcgggaggctgaggcaggagaatggcttgaatccagtaggcggagcttgcagtgagccgagatcgcgccactgcactccagcatgggtgacagagtgagactccatctcaaaaaaaaaaaaaaaaaaaaaaaaaggccaaggggaaaagcactcaggacacacagcattgctccaaaaattattacctgcaagcctagttgctgaagcggcctctaacctgaaaccagtttatctaatagttgctgaaccgcactgctgcaactttaagactaattttatccactgctatcactcaccaatcattctttttaggtttcatagaaagactaaattagccaggtgtggtagtgcatgcctgtagcgtcagctactcaagaggctgaggcaggaggatcgcttgagcccaggaggttgagactgcagtgagccatgatcatgccactacactcccacctgggccagagagcaagaccctatctcttaaaaaaataaattcaggccgggtgcagtggctcatgcctgtaatcccagcattttgggaggctgaggctggtggatcgcctgaggtcaggagtttgaaaccagcctggccaaaatggtgaaacccagtctctactaaaaatacaaaaatgagctgggtgtggtgacacatgcccgtaatcccagctactcaggaggctgaggcaagagaatcgcttgaacccaggaggtggaggttgcaatgagctgagattgcaccactgcactccagcctgggtgacagagtgagactctgtttcataaataaataagcaaacaaataaataaatatcgcattcagtagcttctgcaggtaacttgacaaaacctgacctaagaatccttttagtcggagtggacaactttgacaatgtcccaagtttttgttcaaattgtactggtggtcccttttataaagctgacattctctgctttaatcaacccagtcataaaatgctactcagtggctgggcacagtggctcacacctgtaatcccagcactttgggaggccaacgggggtggatcacttgaggtcaggagttcgagaccagcctggctaacacggcgaaaccctgtccctactaaaaatacaaaaattagccaggcgtggtggtgcatgcctataatcccagctactcgggaggctgtggcaggaaaatcacttggacccgggaggtggaggttgcagtgagccgagattgtgccactgcactacagcctgggcaatggagcaagactctgttgcaaaaaaaaataaaaaagtttttttcttcagagtaaccaactaaacagttcaaaacgtccaaacttgtagccactgagtagctttttttttttttctgacacagagtctcactctgtcatccaggctggagtgcagtaaaatgatctcgcctcactgcaacctcctcctccagggttcaagtgattctcctacctcagcgtcctcagtagctgggactacaggctcacaccatgatgcctggctaatttttgtacttgtatttattttttatttttttccgagacggagtcttgcactgttgcccaggctggagtgcagtggcgcaagctcagctcactgcaacctccaactcccaggttcaagtaattctcctgcctcagccccatgagtagctgggattacaggcacgagccaccacgccaggctatggttttttgtgtttttttttttgtatttgtatttttatttttttgagacggagtctcgctctttcacccacgccggactgcagtggcgccatctcggctcactgcaagctctgcctcccgggttcacgccattctcctgcctcagcctcccgagtagctgggactacaggcgcccgccactgcggccggctagttttttgtatttttagtagagatggggtttcrccgtgttagccaggatggtctcgatctcctgacctcatgatccgcccgcctcagcctcccaaagtgctggggttacaggtgtgagccaccacacccggccttttttttttgtatttttagtagagacggggttttgccatgttggccgggctggtctcgaactcctgacctcaggtgatccacccaccttggcctcccaaattgctgggattacagacgtgagccactgcgcccggcctctgaagaaacaacctgaactgcattcctctgctctcataccagaataatcaacagagaggacttctgtgaccgatgtgtgggggtttctccccacgcaccaaacaagcaattaattcttcagtggataccagctgggcatcctccaattcaattccaaccctgtctacctggagacagcctcagatcccacaggttgaaggcttagtcccaaccaaccattctccattcccacccgtcacaagtctgggctccagaacttctgatccactggcttcaacttggggttgtcaacttgaattaacctttgtgttccattaatttgctggagcagatcacagaagtaagggaaacactcacttacatgtactggcttattatacaaaggacacagaggaagagatgcatagggcaaggcatgtgagaaggggcacggtgcctccatgcccaccctgggtgcaccacccttcaggaggctccatgtgttcaggtatttggaagctccctgaaccctgtcctcttgggccttttatggagactctactggagagacatgactgaagtatggacagccctgttgaaatattatcatctaatgagtgaggaaacccagcaacgcctctgtgttcaccttcttaccgtcctccgtgcaacattccttcctccagggtatgtgatgggaccccttttgaaatgagggtcttaggacccacaattagaaaagcaagtagacggccgggcgcggtggctggtgcctgtaatcccagcactttaggaggccgaggcgggcagatcacgaggtcaggagatccagaccatcctggctaacacggtgaaaccccatctctactaaaaaaaaaaaaaaaatacaaaaaattaggtgggcgtggtggcgggcgcctgtagtcccagctactctggaggctgaggcagaagaatggcgtgaacccggaaggtggagcttgcagtgagctgagatcacgccactgactccagcctgggcgacagagcgagactccgcctccaaaaaaaaagaaaagaaaagcaagtagakaatttatttatggacagctccaaaacaggcaggaaagattcctcccttgaagagagaaaggaacaggtgaaaggagaggagaaggtcagtgatggaaattctgttttccaaggcctgctcctgaggcctagagtgccccaacattataacagggctgtgggagttatgagacaggaactgtgtacacacacatgcatgcatgcacacacatcaattaccatcaaaatgaggttgatggtttattattattattattgttattttgagatggagtctcgctctgtcgcccaggctagagtgcagtggcgtgatcccggctcactgcaacctccrtcttccaggttcaagcaattatctcgcctcagcctctcgagtagctgggattacaggcacctgccaccatacccggctaattttttgtatttttagtagagatggggtttcaccatgttggccaggctggtctcgatctcttgacctcaggtgatccaccctcctcggcctcccaaagtgctgtgattacaggcgtaagccaccagccaaaaattttttgtagagatgtggtctcactgtgttgcccaggctggtcccgaactgctaggcccaaacaatccttctgcctcagcctcccaaagtgctggggattatacgcatgagccaccgaggctggccccaactttctcttgttctttggacagatcgaagaccacccagtctgcttgaactgcaattttttcttcccaaataaaacgttgaatttagagattcgtctctacattttattttgacttcaacacagataccacatggttatcttcagcaaggattgttagctgggagtggtggcgcacatctgtagtcccagctacttgggaggctgaggtggggggatcacctcagcccaggaggtcaaggctgcagttagccgtgttgcaccacgtgattgcaccactatacagcctgggtgacagagcaagaccctgtctcaaaaaaaaccccaaaaacaaaaacccaagggattctttattcttaaaactattgtttcttttaacacattagttatttctcacataaccaagctaggaattcaaagaagccaacgaggcttaacctggggtcttgttcatctggctgtccaaatggaaagtggaggtgaagagttatggccattgacacccatagaatggcccattgctccagattagccagttcagtaactttttttttttcttttgagacagagtctcgctctgtcgcccaggctggagtgcagtggcgcgatctcggctcattgcaagctccgcctcccaggttcgcaccattctcctgcctcagcctcccgagtagctgggactacaggcgcccgccaccacgcccagataatttttttgtatttttagtagagatggggtttcaccgtgttagccaggatggtctggatctcctgacctcatgatcgrcctgcctcggcctcccaaagtgctcggattacaggcttgagccaccacacccggccgaagttcacaagttcagtaactttatttggcaaataaatatctttttttttttttgagacagggtctcactttgtctcctaagctggagtgcagtggcgcagtcacagctcactgctgcctcaacctcctgggcttaagtgatcctcccaactcagcctcctgagtagctaggactacggtgtgcaccaatacgcctggctatttttttttcttcctttttgtagagatggggttttaccatgttgcgcaggctggaataagtactttcaaagggtcctttaatgacaaaactatagaggtagagaacaggttagaggttgccaaggaacagggaatgaggggtctctgagggacacggggatctcagtgacaatgggacagctatgtcctgtcacagtggtccaggaatttacacactttatgaaactgtcacatagcctccttgccccagtgcagggggaaactggggagccctgagccaggcctgcagtctataacagcatcagcaccacagcagtgcccacttcccggtgtggatgccatgccatggtcacatgagatgtcaccatgggggacagtggttgaagggttcacaggactgtatgggctgattttgcaacttctgtgcatctatacccatttcaacatgacaagttaagaaaaagcctgttgtgcatctatactcatttcaacatgacatctggcacagtgctaacacaggtctgccagaatgcactgaatgaggcactgaaaacagcccatttcrtcctgtaaaatcacccctggataaagtcagcttttagcaaatggcttttacaaaattaaaacaaaaccaaggcccattggggcaaaaatgggtttcagggtccagggatccttaaactgaatgcaaaatggggaggatcacattgtgggaagagcattcacagctttgattctatttccagaggcctgtgcctccctcccacaaggagttaagaaccttcacttcacaaactacagatcacaaacccaacagactattttacaactatataacatttatgaacatatactatcaatgaatgtatttttttgttaatattcattwaaaaaaaatgtcacaacttgggtttagaagatttttttttttttttttttttgagacggagttttgctctgtcgcccaggctggagtgcagtggtgtgatcttggctcactgcaacctccgccttctgggttcagcaattctcctgcctcagcctcccaagtagctgggattacaagcatgcaacaccgcacccagctaatttttgtatttttagtagagacggggtttcaccatgttggtcaggctggtctcgaactcctgacctcgtgatccacctgcctcaacctcccaaagtgctgggattacaggcgtgagccacctcgctgggccagaagttttcttaaaaaacaatacaaaacaaaaccagaaacccaggactccccagccctcctgtgggtgtgggtttaggaaaatccatctttattggccctgcactgccaagtgtaatggacctgacactccgcaccagctctgccctaactggtgagggccagcaaggaacaatacagatgagcgctctgtccaccaggcaaactgcaaattattctcagtgctaagaagggaaaaaactgagcagcagaaaaatgtgtagccccttttctggagctttctttcttatgaagagaggtctggactacaacgggggggctgtgtgtgtgagggattcacagctctagctttggatctcccaaagaggggtccggagcagactgtggcaccccaagccagtcactgaatccccatattttatggttaagcagccaaacatgccaattcactctctaggctctgctagataaacaatgcccttactcagttaccaaagaggrattaaagcctgtttctcaagtcaccatgagaaagcagaaaagagaggaagtcacttccgtattaggtgctcgcagcattcatccatgaagcgtttcatgattttcttaaaaaatattacttgttctcaacaaaacatagacacaaggctcgtctactctgcactgcagaggacagaagagctaagtattaataaaataatccttctttgtattttccaagttctctccaatgtaaacaactcaagcccaggaaaatccagtatttaacagtgtaccaaccctgtgctttcatgggcaccggcttttacccacccggtgcgtctggcggtggctgtccagcaggccgggcacctgccgcccacggagttgtcccactgggcaccgcagggctcaagggcgatggcagcactggcagcttctggtcagagctagctgatgtccccgctctgcagacatcagcccaacaaaattgcatctcgctgaccacaaactggccacgtggaagtcagctcgaagctctaccctgaatctctcctgaactcaaaggctctgaaagctgcctcgacccatgaaggtgcacagaggggctcccgcgggctgcccacagcccgtcccgggtgcggggtctgagggcgcagccgaccccaccctgggcggagggcgaggctggggctccggcttcgtgccccacggctcgcaaggacccgtcagtaccgcccgcaccgctgaccccagcaccgagcccctcacggctgaccccagctcctcacggctgcccccggccctgctccctcacggccgacccgggccccgttcccctcacggtcgccgctggccctgcgcctctcacggccgacccgggccccgctcccctcacggctgtccctggccccaacatccggcacctgcgctcattcctcccggaacgagccgcccggggcaccgccacccggtccgcgtcccggaacgggagacccggggaaatcggggcgccggggcctctggagggcgcttgcgccgcgcccgggctccgcgccgtcctcaccgtggaagtcgcccgtgtcggccaccacggtggtgaactgcttgagctggtccagcgcggactccatcctctgacgcttcacgggtgagctcgacatagcaagaccgaggggtctgcggcggcggcggcggcgacgggacgggcgcgcggacggcccacaatgccccgcgggcggctgccaatcggaaagcggcgcgggagggcgaggcccgctggtccctgcgcgcctggacgaagccccgcccccggggacgaagcccgagcgccactgccggccgcgcaccgcagctgcggatcctacaggctgggtctccccaggtcctcagcagccgccgcggacgggcccgggaaaacacctgcacgacacggggcggctgggcctcgcctccttcctgccccgcgggacgcaccgggagggctggaggagatggacctggcccgggtgccgactctgcggggctgaacccgccagggccgaacccggcgatgcaggatccatggtggggccaggactggggtcgggggccgctgcaggaagcaggggagggagcggcgggggacgccctgcgggtgcaggaggcagagcggggggcggctgcagagcccgggcgccggacgcggcggggaacctgcttctgggaatctgttcccctgagtcctaagcccagaggtgtcccgggggaccgaacggcgaggcaggcgtaggaggcccagctgccctgcttcttaccatcgctgacttgcannnnnnnnnnnnnnnnnnnnnnnnnnnnnnnnnnnnnnnnnnnnnnnnnnnnnnnnnnnnnnnnnnnnnnnnnnnnnnnnnnnnnnnnnnnnnnnnnnnnnnnnnnnnnnnnnnnnnnnnnnnnnnnnnnnnnnnnnnnnnnnnnnnnnnnnnnnnnnnnnnnnnnnnnnnnnnnnnnnnnnnnnnnnnnnnnnnnnnnnnnnnnnnnnnnnnnnnnnnnnnnnnnnnnnnnnnnnnnnnnnnnnnnnnnnnnnnnnnnnnnnnnnnnnnnnnnnnnnnnnnnnnnnnnnnnnnnnnnnnnnnnnnnnnnnnnnnnnnnnnnnnnnnnnnnnnnnnnnnnnnnnnnnnnnnnnnnnnnnnnnnnnnnnnnnnnnnnnnnnnnnnnnnnnnnnnnnnnnnnnnnnnnnnnnnnnnnnnnnnnnnnnnnnnnnnnnnnnnnnnnnnnnnnnnnnnnnnnnnnnnnnnnnnnnnnnnnnnnnnnnnnnnnnnnnnnnnnnnnnnnnnnnnnnnnnnnnnnnnnnnnnnnnnnnnnnnnnnnnnnnnnnnnnnnnnnnnnnnnnnnnnnnnnnnnnnnnnnnnnnnnnnnnnnnnnnnnnnnnnnnnnnnnnnnnnnnnnnnnnnnnnnnnnnnnnnnnnnnnnnnnnnnnnnnnnnnnnnnnnnnnnnnnnnnnnnnnnnnnnnnnnnnnnnnnnnnnnnnnnnnnnnnnnnnnnnnnnnnnnnnnnnnnnnnnnnnnnnnnnnnnnnnnnnnnnnnnnnnnnnnnnnnnnnnnnnnnnnnnnnnnncaaatcctaggctgacgcggtggctcaggcctggtaatcccagcacattgaaaggccaaagcaggcgatcacttgaggtcaggagttggagaccagcgtggccaacatgcaaaaccccgtctctactaaaaatacaaaattagccaggcgtggtggcacatggctgtaatcccagctacttgggaggctgaggcaggagaatggcttgaacctgggaggtggaggttgcaatgagccgagattgtccctctgtacactaacctgggctacagaacgagactccatttaaaaaaaaaaaaaaggccaaccctaggttcacagtagtgttgatatcttggggaagttgcaaatcttatcttatgacctccagaataatggctgataatatttagacttccagcccctctcattctaacttggtggctggtggcctttcattcattttacaagaacagtctagttttggggaagggctattatttaaactataaattaaattccttcccaagacttgtttggcctatggccagtaatggacaaggaccgtttgaaggttagaaacaagatggaattggttaagtctgttatctttcactgtcataatttccttagttataattttgcaaaggtggtttcaatacttcctctcagcatgtgttcccttttcattttaatagtgtctttaatgaacgttagctttttattttgattaagttcaatttatcaagttttaattttatatttactcctcttttttggtatcttctctaaggagtctttgcttgctccaaagtgacaaattttttttttttctggtgagatggagatttactcttgttgcccaggctggagtgcaatggcgcgatctcagctcaccgcatcctccgcctcccaggttcaagcgattctcctgcctcagcctcccgagtagctgggattacaggcatgggccaccatgcccggctacttttgtatttttagtagagacggggtttcaccgtgttgcccaggctgatctcaaactcctgacctcgtgttccacctgcctcggcctcccaaagtgctgggattacaggtgttaagcaactgcgcccggccaacgcccagctaacttttgtatttttagtagagacagagtttcaccgtgttagccaggatggtctcaatctcctgacctcgtgatccgcccaccctagtctcccaaagtgctgggattataggcgtgagtcaccacgcccagccaacaaaaatatttttttttttttttttttttttgagacggagtctcgctgtcgcccaggctggagtgcagtggcgcaatctcggctcactgcaggctccgccccctggggttcacgccattctcctgcctcagcctcccgagtagctgggattacaggcacccgccacctcgcccggttaaattttttgtatttttagtagagacggggtttcatcgtgttagccaggatggtctcgatctcctgacctcgtgatccgcccgcctcggcctcccaaagtgctgggattacaggcgtgagccaccgcgcccggcctcaaaaatattttcttatgatgtcttggttttcagctgttatgttaagagtctttgaggccactccagtttgtttgttttttttttgtttgtttttttttttttgagacggagtctccctctgtcgcccaggctggagtgcagtggcacgatctcggctcactgcaagctccgcctcccaggttcatgacattgtcttgcctcagcctcccgagtagctgggactacaggcgcccactaccacgcccggctaattttttgtatttttagtagagacggggtttcacatgagccaccgcacagggcccccttgatttttgtctctgtgacctagaagtggaaggtagtttttctctaccgcgcctggccccctttatttttgtctccgtgacctggatatggaaagtagtttttctccacctgttccagcatctgttgagaggactttcttctctccattgaaatgcaaaaataggaaatatacatcacagaagaaggtatagagcaggtagccatcttttgtcttcccttgccacactggaagaactgtcttgggccacatgtaaaatatactaacaataactgatgagcttaaaaaaaattgcaaataaaaaatctcatgttctaagaaaggttgcgaattcgtgttgggccacatgcggcctgcaggccaagggctggacaagcttggtggtatacagtatttattagggaaatgcaaatgaaaaccaccatgagatctgtccacgtggatcatagtgagaacaaaagactggcaacaccaagtgccagtgaggacatggagctccaggaacacccatgcgctgctggtgggaatgaaagtggaacaaaggctgggtacggtggctcgcgcctgtaatcccagcactttgggaggtcgagacaggtgatcacctgtggtcaggagttcgagaccagcctggccaacatggtgaaaccccgtctttactaaaaatacaaaaattaggctgggtgcagtggctcacgcctgtaatcgcagctctttgggaggccggggcaggcagatcacgaggtcaggagatcgagactatcctggctaacacagtgaaaccctgtctctactaaatatacaaaaaattagccgggcatggtggcaggtgcctgtagtcccagctactcgggaggctgaggcaggagaatggcatgaacctgagaggcagagcttgcagtgagccgagatcgcgccactgcactccagcctgggcgacagagcgagactccatctcaaagaaaaaaaaagaaaccaaaaaaaaattagccaggcatnnnnnnnnnnnnnnnnnnnnnnnnnnnnnnnnnnnnnnnnnnnnnnnnnnnnnnnnnnnnnnnnnnnnnnnnnnnnnnnnnnnnnnnnnnnnnnnnnnnnnnnnnnnnnnnnnnnnnnnnnnnnnnnnnnnnnnnnnnnnnnnnnnnnnnnnnnnnnnnnnnnnnnnnnnnnnnnnnnnnnnnnnnnnnnnnnnnnnnnnnnnnnnnnnnnnnnnnnnnnnnnnnnnnnnnnnnnnnnnnnnnnnnnnnnnnnnnnnnnnnnnnnnnnnnnnnnnnnnnnnnnnnnnnnnnnnnnnnnnnnnnnnnnnnnnnnnnnnnnnnnnnnnnnnnnnnnnnnnnnnnnnnnnnnnnnnnnnnnnnnnnnnnnnnnnnnnnnnnnnnnnnnnnnnnnnnnnnnnnnnnnnnnnnnnnnnnnnnnnnnnnnnnnnnnnnnnnnnnnnnnnnnnnnnnnnnnnnnnnnnnnnnnnnnnnnnnnnnnnnnnnnnnnnnnnnnnnnnnnnnnnnnnnnnnnnnnnnnnnnnnnnnnnnnnnnnnnnnnnnnnnnnnnnnnnnnnnnnnnnnnnnnnnnnnnnnnnnnnnnnnnnnnnnnnnnnnnnnnnnnnnnnnnnnnnnnnnnnnnnnnnnnnnnnnnnnnnnnnnnnnnnnnnnnnnnnnnnnnnnnnnnnnnnnnnnnnnnnnnnnnnnnnnnnnnnnncccccaagggatgtggtgagtgaaagaaggcccacatacacacagaatgtggcagctcacacctgcattcccagtgctttggagcccaaggtgtcagagatgtttgaaccagagcaaatccatcttgaatagaggtggggtaaaatgartctgagacatgctgggctgcattcccaggaggtcaggcattcttagtcattggatgagataggaagtcagcacaagatacaggtcacaaagaccttgctgataaaacaagtcatgataaagaagtctaaccctaccaaaaccaagatggtgatgaaagtgacctctggtcggctgggcgtggtggctcacgcctgtaatcccagctctttgggaggccaaggcaggcggatcaccaggtcaggagatcgagaccatcctggctaatacagtgaaaccctgtctctactaaaaatacaaaaaattagccaggcgaggtggcaggcacccgtagtcccagctactggggaggctgaggcaggagaatggcgtgaacccgggaggcggagcttgcagtgagcccagatcacgccactgcattccagcctgggcaacagagcaagactccgtctcggaaaaaaaagaaaaaaaaaaagtgacctctggtcgtcctcactgctcattatgagctaatgataatgcattagcatgctaagagacactcccactagggccatgagagtttacaaatgccatggcaatgtcagaaagttactctatataatctaaaagaggaggaaccctcagttctgggaactacccacccctttcctggaaaactcatgaataatccaccccttgtttagcatataataaagaaagaaccgtaagtatgctcagtagaacagcctatgccccaggcccctgctctgcctatggagtagacatccttcagtttctttacttctctgataaacttttctatttattcttttttcttttttttttttttttttgagatggagtcttgttcttgttgttcaggctggagtgcaatggcacgatctcggctcccctcaacctcttcctcctgggttcaggcgattctcctgcctcagcctcccaagtacctgggactgcaggcacacaccacaacacccggttgatttttgtatttttagtagagacgaggtttcaccatgttagccaaactggtctcgagctcctgaccttaggtgatccacccgcctcagcctcccaaagtgctgggattacaggcgtgagccaccgcgcctggcctgataaacttgttttcacattatggacttgccttgaactctttttttttttttttggtttgagatggagttttgctcctgttgcccaggctggagtgcaatggcgtgatctcagctcaccgcaacttctgcctcccaggttcaggtgattctcctgcctcagcctctcaagtagctggggttacaggcatgcaccaccaaactcagctaattttgtatttttagtagagacggggttttcccatgttggtcaggctggtctcgaaccctcgacctcagatgatttgcccgcctcggcctcccaaagtgctgggattataggcgtgagccaccatggccagctttttttttgagacagagtttcgctctgtctcgcaggctggagtgcagtggcatgatcttggctcactgcagccttcgcctcccgggttcaagtgggtctcctctctcagtctcccaagtagctgggattacaggtgcccactaccacactgggctaattttttttttttggaggggggacagtttcattctgttgcccaggctggagtacagtggcacgatcttggctcactgcaacctctacctcccaggttcaagctgttctcctttctcagcctctcaagtagctgggattacaggtgtctgccaccatgcccggctaatttttgttttgtttttttttgtttgtttgttttttgagatggagtctcgctctgtcgcccaggctggaatgcagtggcgtgaactcagctcactgcaagctccgcctcctgggttcacgccattctcctgcctcagcctcctgagtagctgggactacaggcgcccaccaccacgcctggctaattttttttgtattttttttagtagagacagggtttcaccatgttagccaggagggtctcgatctcctgacctcatgatccgcccgcctcggcctcccaaagtgctgggattacaggcatgagccaccgcgcccggcctaatttttgtatttttagtagagatgggtttttaccatgttggccaggctggtttcgaactcctgaccttgtgatctgcctgccttggcctcccaaagtgctgggcttacagatgggagccaccacgcccagccatggccagccaaatttttgtatttttagtaaaggcagggtttcaccatgttggccatnnnnnnnnnnnnnnnnnnnnnnnnnnnnnnnnnnnnnnnnnnnnnnnnnnnnnnnnnnnnnnnnnnnnnnnnnnnnnnnnnnnnnnnnnnnnnnnnnnnnnnnnnnnnnnnnnnnnnnnnnnnnnnnnnnnnnnnnnnnnnnnnnnnnnnnnnnnnnnnnnnnnnnnnnnnnnnnnnnnnnnnnnnnnnnnnnnnnnnnnnnnnnnnnnnnnnnnnnnnnnnnnnnnnnnnnnnnnnnnnnnnnnnnnnnnnnnnnnnnnnnnnnnnnnnnnnnnnnnnnnnnnnnnnnnnnnnnnnnnnnnnnnnnnnnnnnnnnnnnnnnnnnnnnnnnnnnnnnnnnnnnnnnnnnnnnnnnnnnnnnnnnnnnnnnnnnnnnnnnnnnnnnnnnnnnnnnnnnnnnnnnnnnnnnnnnnnnnnnnnnnnnnnnnnnnnnnnnnnnnnnnnnnnnnnnnnnnnnnnnnnnnnnnnnnnnnnnnnnnnnnnnnnnnnnnnnnnnnnnnnnnnnnnnnnnnnnnnnnnnnnnnnnnnnnnnnnnnnnnnnnnnnnnnnnnnnnnnnnnnnnnnnnnnnnnnnnnnnnnnnnnnnnnnnnnnnnnnnnnnaaaaaaaaaaaaaagaagtaaaaaaggaagggaattctgacataggctacaacacggatggaccttgaggatattacactgagtgaaacaagccagtccagaaaggacaagcaccgtgcgattcagtcatctgaggtccggagagtggtcccatagaggcagaaagcagaatggtgggtgccagggactggaggagggaaatggggagtcggtgttttatgaggacagagtttcagttttgcaagatgagaaagttctggagacagtagtgatgatggctgtacaacattatgagtatacttaatcctgtgatattctgataaattagataatggatatagacagagtgacagatatagattasaatgacatagatacataggcaggtagattgatacacagagataagtagatatagatagatacagattagatagatcgatcaatccacgtatcgatagaggtgtatatatagcttttagagacgaggtctcactatgttgccctggctggtcttgaaatcctgagctcagccgggcggggcagctcatgtctataatcccagcactttgggaagctgaggagggcggatcacctgaggtcaggagttcgagaccagcctggccaaaatgatgaaatcacgtctctaccaaaatacaaaattagccaggcgtggtggcaggcgcctgtaatcccagctactcaggaggctgaggcaggagaatcgcttgaacccgggagtcagaggttgcagtgagccaagatcgcaccactgtactccagcctgggcaacagagcaagactccgtctcaaaaaaaaaaaaaaaaaatcctgagcttaagtgatcctcccgcctcagcctcctaaagtgctgggattaaggtgtgagccagtgcacccagccccacagaggttttcatgcagggttcctgcctcctacctcccacagctcgttacagtctcttgttataatgttgaggcgctttaagcctttagaagcaaaatttctctctgccctcctgtctctggctcctctttctcccatagaaaccagaaccacttttccccaaagccagccaaaaaacctaaaaataggcaggttgcagtggctcacgcctgtaatcccaacactttgggaggccaaggcaggcggatcacctgaggtcaggagttcaagaccagcctggccaacatggtgaaacccagtctctactaaaaatacaaaaaaattatctgggcacagtggctcacgcctgtaatcccagctacttgagaggctgaggcaggagaatcgcttgaacccggcaggcgcaggttgcagtgagctgagatcacaccactgcactccaatctgggcaacagagcaagactctgtctcaaaaagaaaaaacaaacaaacaaacaaaaaactaaaaataggactctaacctccccttgcctgtcttggagatggccataaataaattctctgaccttccttgtctgactgtgggtcacaagacccacatttctgaaggggccctgccccacaccccaggggaaggaatgccgcacagagaagccgggaagaatctgcacagacaggccctgctgggtttagatcacacccttttggtccagtcccatttgtacacagctgtcaatcatgcctatccaatgaagtctccacaaaagacccaggaggacagggtttggggaacgtccagataactgaacacatggggccgacaggaaggtgaacaggaactcctctatgtgcagggagggtggagcaccccaactccacggcgacggaagctcctgctctcggggcccttccagaccccaccttgtgcgtttcttcatcgggctgtctttctatgcttttaaatattctttgtgataaatcggtaaaagtgtttccctgagttctgtgagcctctctagcaaattaatcaagcccaaagagggcggtggtgggaaccccaatttaatgccatttggtgacaccttccagaggcctggactcacgactggtgggaagtgtggggcagtcttgtgggactgagcccccagcctgtggatctggggctaactgcaggtagacagcctcagaagcgaactgaaagggagaacacccagccggtgtctgtggcaaagctgagggcttgctcggtgtgcgggagacacagctgactgcctgctccgtgtgcaggaaaaacggagctggccgcttgctgggtgtgcggggagaaacagaactcctctgtgtctgttgcaaagctggctgcttgcttggtgtgcgggagaaacagaagttctctgtgctgattattactgtgcagtgagaccagagggaacacggtttgagtttttccactttctcaatgccactgaactgttcaattgaaaatggttaagatggtaaattttccttgtgttttttttttttttaattttccttgttcttgacagccagttttggggggaaaaaaagatggagccgggtgcagtgactcgcgcctgtaatcccagcactttgggaggtggagactgggaagatcccttgaacccaggaggtcgaggctgcagtgaaccccaattgccccactgcactccagcctgggcaacagagcgagacgctgtctcaaaaacaaaacacaacaggctgggcgcggtggctcccgcctgtaatcccagcactttgggaggccgaggcgggcagatcacaaggtcaggagatcgagaccatcctggctaacacagtaaaaccccgtctctactaaaaatacaaaaaaaaaaaatcagccgggcgtggtggcgggcgcctgcagtcccagctactcgggaggctgaggcaggagaatggcgtgaacccgggaggcggagcttgcagtgagccgagatcgcgccactgcactccagcctgggcgacagagcgagactccgcctcaaaaacaaaacaaaacaaaacaaaacaaaaccaaaaacaatgatggaccattgagctgtggaacatatcaggaaacttacccaggacgatgaggttgtgagtgacttattttgggaacttcctgacagtcgttgcctaggacctgtgagcggacagcacagctgggctcagtctccagactcactccaaacccttcttatgtccatcagtcccgaaccacttccgtcccaaacatgcccaatcctaacgaagcctcctgaagactcacctgaagccacaccccaaaaccttccacacgcccaccccggccctgctttcccctcagaccccgtgaagaccctcaggcgggattcccgctccggcaatggcgcccactcagaccccgtgaagaccctcaggcgggattcccgctccggcaatggcgcccactcagaccccgcgaagaccctcaggcgggttccggctccggcaatggcgcccactaagatgctgtgaagaccctcaggcggggttccggatccggcaatggcgcccactcagaccccgtgaagaccctcaggcgggttccggatccggcaatggcgcccactcagaccccgcgaagaccctcaggcggggttccggatccggcaatggcgcccactcagaccccgtgaagaccctcaggcgggttccggatccggcaatggcgcccactcagaccccgtgaagaccctcaggcgggttcccgctccggcaatggcgcccactcagaccccgcgaagaccctcaggcggggttccggatccggcaatggcgcccactcagaccccgtgaagaccctcaggcggggttccggatccggcaatggcgcccactcagaccccgcgaagaccctcaggcgggttccggatccggcaatggcgcccactcagaccccgtgaagaccctcaggcgggttccggctccggcaatggcgcccactcagaccccgtgaagaccctcaggcgggttccggctccggcaatggcgcccactcagaccccgtgaagaccctcaggcgggttcccgctccggcaatggcgcccactcagaccccgtgaagaccctcaggcgggttcccgctccggcaatggcgcccactcggctgtgtcaacgacccgtggcttcgtggctgtcctgggagccagcgctttcacgcttgcacacttctataaatagttatacatttttttgagacagggtctggctgggttgcctaggctgtagtgcagtggtgtgatcacagcaacctccatctcctgcactcaagtgatcctcctgcctcagtctcccaagtagctgagactacaggcacgtgctaccgtgcccagctaatttttgtgtgtgtctgttttttttttttctagacagagtctcgctctgtcaccaaggctggaatgcagtgccgcagtcttggctcactgcaacctccacacctcgggttcaagagattctcctgcctcagcttcccaggtagctggtattgcaggtgcctgccaccactcctggataatttttgtattttagtagagacgggttttcaccatgttgcccaggctggtttcaaactcctgagctcaaataatgcatctgcctcagcctcccaaagtgctaggattgcaggtgtgagccactgcacctggcccagtacatctttgttaaacaaaaaatctagtgagcagagtggcactggtatccacgtttgcaaaatctccatcatgccggtttcctaggcccaggggtcctcctcccggggcctgcctaggcctctgggaatcattgttctaggagaagtatgtgaggaaaatctggcttcatccagatttgtagtcggaacagggaagggcaccctgatagcctttctggatcattgtggaccttctgtgactggctcttaggcccatgagtgatgctggaatgtcccgccttggtcgtggggtttcccagacccccaagtgctgacccctccaatttcaataaggaacatgcacgctccctaactgagcctatcagaaggagcttcagggccaggcacggtggttcacgcctgtaatcccagcactttgggaggccgaggcaggcagatcatgaggtcccagctacaaggtcgggccactgcactccagcctgggtgacagagtgagactcggtctcaaaaaaaaaaaaaaaaagagcttcaggtggtggagcagccttgcctatgatggcagtttccaaaactcaaatgtccactggaaaatgcagatttatcacggcagcgaagagggtccgttgttttcactttgttcattttggagacaatgactacccacgtctcgacacaagaggttctttcaagtaacctggggaagctggccaggtcagtcacggctgggacatggctcccagctcttccccgggcagccccaacacctaggcagcaggcgcccgggacgccggatgcttacgcttccaggtgagactgcatcaaatcartgacgtttgctgatttgactgtgtgtgtcggggaagaatgggggctgctcatattcgagcaaaggtgagtgcggttgagaaggcaggcttctgtgtttcacggggctgccatggcaaacgccgcacactgggtggtgtgaacaacagacgcgtctcctctcttggttctagaggctggagtctgagatgcaggcgtggccagggctggttccttcgaggctgtgtggaaatctctgctctgggcctctccaggcttctgtgggagctgccgctccgtgttgctccttagcatgtagaaacctccccctcctccggtgatcaccccgatcgtgtctgtgtccacgtttcccctttttatctgttgttttaatttttttttgcccaggctggagtgcagtggtgggatcttggctcactgcaacctccacctcccaggttcaagcgattctcctgtctcaagcctcctgagtagctgggattacaggtgcccgccaccacgcccggctaatttttgtatttttagtagagatggggtttcaccatgttggccaggatggtctcgaactcttgacctcaagtgatctgcccgccttggcctcccaaagtgctgggattacaggtgtgagccacctcacccggcctccccttttgatatattagggctaccgtactccagcatggcctcatcttaattacatctgcagtgacccaaatagggcaacagtctgagttgctgggacaaggactgaaatatgaatttctgaaggacataattcaacccagagcacctttttttttgagacagcgtcttgctctgtcacccaggctggagttgcagtggcaccatcacagctcattgcagccttgaactcctgagctgaaacaattctctcgaatcagcctcctaagtagctgggactacagatgcacatcaccacacctggctaatttttacatttctttttgagacggagtnnnnnnnnnnnnnnnnnnnnnnnnnnnnnnnnnnnnnnnnnnnnnnnnnnnnnnnnnnnnnnnnnnnnnnnnnnnnnnnnnnnnnnnnnnnnnnnnnnnnnnnnnnnnnnnnnnnnnnnnnnnnnnnnnnnnnnnnnnnnnnnnnnnnnnnnnnnnnnnnnnnnnnnnnnnnnnnnnnnnnnnnnnnnnnnnnnnnnnnnnnnnnnnnnnnnnnnnnnnnnnnnnnnnnnnnnnnnnnnnnnnnnnnnnnnnnnnnnnnnnnnnnnnnnnnnnnnnnnnnnnnnnnnnnnnnnnnnnnnnnnnnnnnnnnnnnnnnnnnnnnnnnnnnnnnnnnnnnnnnnnnnnnnnnnnnnnnnnnnnnnnnnnnnnnnnnnnnnnnnnnnnnnnnnnnnnnnnnnnnnnnnnnnnnnnnnnnnnnnnnnnnnnnnnnnnnnnnnnnnnnnnnnnnnnnnnnnnnnnnnnnnnnnnnnnnnnnnnnnnnnnnnnnnnnnnnnnnnnnnnnnnnnnnnnnnnnnnnnnnnnnnnnnnnnnnnnnnnnnnnnnnnnnnnnnnnnnnnnnnnnnnnnnnnnnnnnnnnnnnnnnnnnnnnnnnnnnnnnnnnnnnnnnnnnnnnnnnnnnnnnnnnnnnnnnnnnnnnnnnnnnnnnnnnnnnnnnnnnnnnnnnnnnnnnnnnnnnnnnnnnnnnnnnnnnnnnnnnnnnnnnnnnnnnnnnnnnnnnnnnnnnnnnnnnnnnnnnnnnnnnnnnnnnnnnnnnnnnnnnnnnnnnnnnnnnnnnnnnnnnnnnnnnnnnnnnnnnnnnnnnnnnnnnnnnnnnnnnnnnnnnnnnnnnnnnnnnnnnnnnnnnnnnnnnnnnnnnnnnnnnnnnnnnnnnnnnnnnnnnnnnnnnnnnnnnnnnnnnnnnnnnnnnnnnnnnnnnnnnnnnnnnnnnnnnnnnnnnnnnnnnnnnnnnnnnnnnnnnnnnnnnnnnnnnnnnnnnnnnnnnnnnnnnnnnnnnnnnnnnnnnnnnnnnnnnnnnnnnnnnnnnnnnnnnnnnnnnnnnnnnnnnnnnnnnnnnnnnnnnnnnnnnnnnnnnnnnnnnnnnnnnnnnnnnnnnnnnnnnnnnnnnnnnnnnnnnnnnnnnnnnnnnnnnnnnnnnnnnnnnnnnnnnnnnnnnnnnnnnnnnnnnnnnnnnnnnnnnnnnnnnccagcctgggtgacagagcaaaactctatctaaaaaaaaaaaaaatttttttttgagacaggatctcactgtgtcgcccaggctggaatgcagtggtgccatctcagctcactgcaacctctgcctcccaggctcgagggatcctccccactcagcctcccgagtagcacaggcagtgagaccacaggcactcaccagcacgcctggctaatttaataactttttttcttttcttttcttttttttgagacagagtctctctctgttgcccaggctggagtgcagtggcatgatctctgctcacgcagtggcgtgatctctgctgactgcaacctctgcctcccaggttcaagcaattctcgtgcctcagcctcctcagtagctgggactacaggtgcccgccaccatgcccagctaattttttgtacttttagtagagacgaggtttcgccgtgttagccaggatagtctcaatctcctgacctcgtgatctgcccaccttggcctcccaaagtgctgggataacaggcatgagccaccgtgcccggcctaataatttttttttgtagagacagggtctagccatttgcccaggctggtctcgaacccctgggctcaagctatccttttgccttggcctcccaaagtgctgggattacaggtgtgagctactgcgcccggctgcaagtctttaattttgccaaaatcaaactcattgactccctttttaaaattttcattattttatttttgaaacagagttttgctcttttgctggagtgaagtggcatgattttggttcactgcaacctctgccccctgggttcaagtgagtctcctccctcaacctcccaagtagctgggattacaggcacgcgccaccatgcccggctaatttttgtatttttagtagagatggggtttcaccatgttggccaggctagtctcgaactcctgacctcaggtgatccacctgcctcggccttccaaagtgctgggattacaggcgtgagctgccgcgcctggtatccactgcttttgaagttttgtacagaaaattcttcttcccctttgtcacatggatatcctggcatcttctgtgaacttggtcgttttgcctctcatgacgtctagtactgctggggctggttcagctttgtggggttagtgggggtccctgttgtgtttctccacacattttcccagcaccactctcaccaccttcctgggtaacgggtgccccgggctgggaccatggcatccccgcaggtgtgaggaacatcttactgtacgtgctgctgtgtcaacctcttgggaaatcaaccgttttgtaattttttttttttttaaagagacagcccttcctaaatggcatgggaagcccctcttgggttctgcggggcctgactgggcacgggcggacagggccagctgtgggggaggacagaaggggagcaagcgccacaaagacatgcttgtcccgagacagacgggccttgttggtggagatatttgcttgtggctactggtggccccactggcagctcaggccacccaccctgaggtctgatgttcaaagccccgccctccctcctcgcccagtgtggactctcccacactcacggccagaccctcggcaaccctggccccaccagggccagcaccagcagaycctccttctttctgtggacctgcctgatggggaagtgggtagggaggccggggagggagtgagtggttaaggacacgttggaactaagagagattgcatgttaaccccagcccctgccccaaactcgggcctcgagcaggtgacctggcccctctacgggtcattcttatccacgcctgcctcacggggctgccactggggcctccggaggccgcgggcagcactcaaaacaccacaggcccccaagagtgatgccctcagggcaggaaggggggcaatcctcacccctggggcgggtggccagagaggacacagagagccagcccacccgatgccaggtgaccctgtgcccatcaccaggccggtgaggtcggtggtcccatctgctcttgaggggggtctcaggaggtggcaggaagccccttggaagaaacgggaggtaatttctggaagcccagaggtccgagcaggcagctggggccagggtgcctcggactcagggctcctggggtgggagcctgcttggggcctagggctgggatctgggggctggagtctgggggtctggcttcctgggcctcctcagctgtgcaggtggcagagtggggcacagcaggtagggggctctaaatggggctgggggaggtggacagggagaaggctgaagaagcaggtgtagatctggggccctcagaagctgagcagcccagcctggaggctgcatatgaagcccagaccatcctggtggaggaagggtcctgttgctgggagtggttggggagtgggcagcctccctcacttccaaggactggcatcctggggcccacagaggccccttttggagcagatatagccccggtgcctatccccgtcctgaggtggtggctcagcaggcagcgggagctgcaggttgcagggaggagggccggtgcccccatccctccccttttcctcttggacctgtctctctcactgcagggtccatctgacagggtgggggggcctcttccgggggcctggaggagtggtggtggccatcaagcccgggtcgtggctcagagggcaccagacaatccctgctgccccgaccagacactgtggttaagacttggcctagtgtggcctgagctgtgagtcagggcttctgtggcctggtgtccaggcctggctgggtggtggaccaggcaagggacacgccccccccagcccagccccacagtcgcccctgcccaggccaagaccccaggactgtgtccccggatgctccgcaccagggttgggttcacggctgctatggggacacatggttgtgggttgccccctgccaccaatccagggcgagggcacccctggcggccactcacggcagcacatggagcggccggcagagggcaccaaaggcccctccaagggtgcggctcaggtggaccgcccatctggcggtcaggtgcccctcccacgcagggtgctgagtgtggcctgctcccccttcttgggagcctccgtcagcctgggctaagatctccaaatccagtttcagccttgccctctgactcatggccctcctggggcctgccgaccgtctggccgagctggctctgtccccaccgctcccactagggttgtgcccagcgaaagccgggcttggatgacacgctttgggccttctggtcgctgggcctgggagggccacaggaagagaagtgggcagggtcccctctgggctcaggggcagagcagcctggcggacggccagccctctgcccggcactgcttagaaaaggtgcagtttccgggggctccaggacccactccgactcccagagaactgagacacacggctcctgggagacttaactggtttaattgcttagccctggtgcctcagccacctctcatctgtagggtgagactcaagtccaggcaccaagacacaccagcacccmcaacaccatgcggggatcattggcctgaaacttggccagagaaagctccagtcctgggcctgtaagagtgggcgctgggagtgtctgaagccggcacggtgtcccctgcgttgtcggcccttgcaggtgaagtgtgtgtcgttcccccactttcccccgaatggcacccacggcctcctgctggagcccctcccgggcccccctcagggagcagaactctgcgtgtgtgcgaggttcagcctggccagcctggagctccagctcaccctggggtgtggatggatgtagaagtgggtggggatgggggagcatcacaggggccaggaccccccaggtgcacaggggaggccagagaaagaggccccagccccagggagttctgtggcctcaagagaaggtggacaaggggctggcaccaccaagcagcaggtttggctgagattagtcttggtgtgggctgaggccttgggtactgtttggcctaaggatgggcgttgtgcctccagacaggggcagggacctctagccagcaccacaccccctccgtgtccttgatacaaaatacatacacatataaaaataatactccatgcattgtgggtgggcttcccctccgcaggccccagcccaaggcagctgggcctagctgtcctcccccctcctctgattcatggaatgaaacttgttcatgagttcttccagctccgacccactttgctgcttctagggaggagaaatgggggcatcctcagccgggggtcccacgtgtctgggtgccggcctcccccttgctctgcgaycccaggaacsggcgggggagaggagggcgcaggggcaggaggggcgtggcgccggagcgyaggcgggctcacctccaggaaggccttctgcatggtgagctggctgtacacgcggacgccctcctcgccgcacactttcttcagctcctccttgttgagggagaagagctgcggcccggtcaggatgcccaggttctccacgatcctgggggcgggcagttgggcgtcagggccgcgctgtgagcgaggctgcctggcgcccgccccgacagctgcgcaccttcggccgcacctcccacccctcgcccgggccccagctcatcccccgcccccgctcaccgcgggctgaaggccttggcttccagccaggcgcggacctcgtccggacccgactcgtaggtgagcggctggctcacgggctggctgcgctccacgcggaagtgcctctgtggctgcgccctgatgttgctgattttccggatgagctcgtcgttgacctcgtccatgtgctgcatgagctctgagggggcgcgcgactcaggcccgccgctgccttgcccctgcccccgcccccggcccagggaccccccccacacttcctcccccaggtggccctgggcccgggacccccgcctcgaagcagcagctctcaccgtctttgttccccgggaagcttgggggtagcttgtgggtcgggctggcggggccccagtacttctgaccggcctgcgggggcggggggcgatnnnnnnnnnnnnnnnnnnnncagcacctgcccgggacctcccccaccccgccaatccccctacagccccggcctgcggaccagccctttccttctgcccagggagccctgcacctgccccagtctctccagccgcggggctggccttggggcggggctaggcgcaggcggggctgctccaggaagctggggggctgcgaccccagggacccccgcgggctcacctgctcgaacggggcgccggcgtcctccggtcgcgcctcgcctaggatgttgcagggcacgtaccccgcctggccgctgcggctgcgcagcttccaccactgccggccgtcctccagcacctgcggggcgcgccgtcagcccctccccacacccaggctctgcggggctgggaccacccgctggcgccgctttacagaggtcgggagcgccctagggtctcccggagccccgcttcgctccattctctccgcacccctgtttccacccctccatccctcgctgggctgctcctcccccaccctgcctcaaggagtctgggggaccctttttttctcggagacagggtctcactctgccgcccaggctggaatgcagtggtgcaatcactgcccactgcagcctcgacctcctgggttcaggcgatccccccacctcagcctccagagtagctgggaccacaggcacacaccaccacatccagataatttttatgttttttgtagagatggggttttgaggtgttgcccaggcttgtctcgaactcgtgggctaaagggatcctcccgccttggcctcccagtgctgcggttacaggcgtgagccgccgagccaggctgtggatgtggcccactcccccctagcctgctccactttctgtcccccagtgggtggcctggattccggctggcagatgcggccagtgcagatgtgggggctcctgggtgggtgtgaatgacaggcccccgctgagtccacgtggtgcagatgctccccccagcctggcacaggggtctctgcatgcctttggggagccccaagatgggaaggcccctccaacaggctggggatcctgatcagagtccaagggcggggaccctggagaaaggggccagcagctgtgccccgtcctggcatcacccagcctggccctagaccgctccccacctcccctggtagcccctcccttgaagccctgccctgtttccccctcttggaccccgtcctccagcccctcacctctaggacctcatccttgagcaccgatagctcgttggcatttcgggctgtgaagtcatacaggatcttgacgtacttggccatggctggtgttggctggtagcccctgtgaggaacaggaggggctgaggcccagtctggtgggggtctcctctgagacctgggcagtggctggggggcagcagcttcccaggtgcacgactggctgcctcttttctgttctggaggtcaccgtggagagaggctgcaggcagcgtcagcccggaatggaaactgtgacagccccagagctttggggccctgcgtggaggcggggcaggcaggaggtgggcgtggcgcaggggcctgtggtacagcaaggctggcccatcccaggccacctcaggggtctccagtccggcaccccaggggaaccagagccaggggcgttcctgggaaacgccagggtcacagctccccgcagctggccagtgagggccagcatgtcttcagagccgtggcccctctgaggactgaacacagcccaaatggtccagtggaggacgggtctcaagctcctctctgtggggtgggacctgcacctcaaaagcgcgggggggctggccctggctgaggggtcctggctttggcatgtagcaggcctgtggctgtcacctggccaggccgtccatcctggtcagtgtggccctggtcatcagggcagctcccgtgtccaggtgctcagggaaatgaagtggccatggactgtcaggacatggccagggtggacagaccaggagctgaagtcaaagggtggaaatgtttttaagtgtggtcctaggccagggaccacgggagccaggctgacactgtgggtgaggggaggccatgcttgcttagaagatggattgctggcccctctttaccccaaaattgaatcctggggtgtgggagggtcaggggcttcccatgcagattggaccaggaatgagcacagaagggaagaggagaggcaaggaaagacgggactcccctagtgccataggcttgttctttgtcctctttggaaacaggtggggctgggggtgggaggaggggagaggcttcactagcccagaaccccagtctcctcttttggctctaccagaggttgggcctgaatcagtcccaacagccccaacagggtgccagtgtttggtgaaaccactcaagttcagtggtttagtagtttctaaccttggttctaaaacatacatgtggatgcacagaaaaagctgatatattagggtagagaatttgtgcatgacttttgaaatgtttcctttaattatatatcatgcagttgaaatgaaaaccgcttcaaatctggaaaagtattttaaaccacttgaacaatgcacttgccaccacctggtggcagcrtacccatatgtttttagagactgtaggttctgaagggtttcactttcatgctccctcactttgaggggggcttacctgtgagtatgtggggagctgactggtggtagggcatcccccgggggggtgggctctgaagtggggctgtgcttctgggagtttcttatggactgtcggctcactggactcacctgtggggaaggtgggcgacctgagttagacatggggcggggctgggtcccaggacgagggggcatatgacaggggctgggctaatgtcctgtgactgatgcatcactgagggtgatggagcctgatgcccggtgatgccagcatgggttgcctctcctggcaggggctaggggcagctgagctgtggctgaaggggcggtgggtggaggtgggctggggaggggagctctggggaggggtgggtgtcggggccggggaggggagctctggggaggggtgggtgtcggggctggggaggggagcactggggaggggtgggtgtcagggctgggnnnnnnnnnnnnnnnnnnnnnnnnnnnnnnnnnnnnnnnnnnnnnnnnnnnnnnnnnnnnnnnnnnnnnnnnnnnnnnnnnnnnnnnnnnnnnnnnnnnnnnnnnnnnnnnnnnnnnnnnnntggtgaggagtgggtgttggggctggggtagggatgggggctgctggtgctctcacctcctcgatgggggcagacgccagcccctccacctcccagggggcctcctgcagcacatccacaggaggctcccagccgctgtggaacttgggcacgtagaggggcacctgtggctcccgcggccactcggaactggggtgagaggtcctgaagtcagccctgcctctccagaactggcccaccaggacccccttgctggcccccatgcagcgctggccccccatgaagccccggcactgctctgccctgccctaccggggccgcatccagctctctcccagtgactcccacagcgacatctccttagggaccaggtggccgcgcaggaagtccacggcatctcgggagagcagtgggcaggagacggagcgtgcgatgtctgggccactgcaggtgttgacgatctggggcacagtgaggttcagaggggactgaggcccacagaccctggcccagcacccccgtagctccacaggctggccctcgggaagggactttggaccccagggagagtggccacacagcgtgaaccgggctgcccaaggcgggcacctgctgccccaaccccgaccccggggagatgctgcagaggcctctgggccsccaccctgcgcgcccctgccgcccggccccaggcaccaggtccagaggcccgaagaggaagtgcacgagctccgcggcgctggggttctggatgtgcttctgcagctttgcctgggggtgggaacaagtgagcaggtgccggggcggggcggggcctccaccctcccctcagcacagacagtggggcagggctggggccaccggacccaccagcaagttaatcgccagcttgattttctggaagcagtcgatgaactcgccctcagaggggggccgtgcccgcagtgtgaggacgccctctggcatgggaggcaccgcgtgagccaggctggccctgatctccccggcccctgcgccttctgtcccacgcagcccatctgtgtgggctggaccttcctccacctccatgagtagcccccatggatgtccctggccccgtccccgtccctgtcccctgcacctgctggccccgtcccctgcacctgccggccccgtccctgtcccctgcacctgctggcgccttcttgcccttcttcttcccctttttccgctggttcagctgcttgaaagcctcggctgccttctgcagccgggccacaaaccactcgatgtcgtccagggcgcagttgaggatttgctggggtcagagggggtcaggggtcagcccctgacactccccaccgccccgccttgctgcagggacagccccacagatgatgggaggagctgggccccacaccttcggaggggcagccacaggctggggactggccggagggacagcaaggaccagtgtccactgctgggggcggggaagagaggggccacctgccgggcccgggcacccaccgtctccttctctatcttctgagccagcacggcccgcggctcctcctgcgactcccgacggcggaaacctgatgggggacacggcggctgctcaccgagccccccacaacgagccctgtggagccccctccagcccctcggcccacctggctcgctgagtggcacctgcgggcccacgcgattcttggcctccggggaatccccgccgcggtgctggaaggggatgggcgccgggccctggggaggaggcaggatggactgccgctgccgaatcttctcctggtgtcccctggagggcgagggggtcctgctcagccccgccgggaacgcacctgaccctccctccctgccgggctcctcccctcccctgccgggctcctcccctcccctgccgggctcctcccctccccgccccctgcgaccccgctccgcccgctgccctacttcagggtctgcggccgcatcttcttgcccagccggcagtcggccaacgcgctctcgatgtcctcgtgcaccagctctgcctgggaaagcgggcgtcaggcggccaggagggcggggcgcggcgcggcggggccccaccctgccccgcccggcaccgcctcacctccacctcatcgcagtggaagaagtggacatccggcttgctctgctccgagtcctggcacacgagcagcagcacagacgggtagcgcagctggttgaggaccgtctggctgcgctgcaccgtgggcagcgggaagtcttccagctcctcctgcgggtacatcgcgcggacacgactcgcacccggggtctgggcactctggcagggagtggccggagctgtggacaagcctggagcacaggcccctctggcgccgctggggaatgggctcccaaagatgaggactaggcccgggacacaccccgcagctgtaccgcaaggctgaccccgkcttccaaacttccctggactctcagctctatgcggccctctgcccacccttgtcccatcctcttccagggaccagaatgatagggcatggccggccctgcagagaggaccggccgcacatccgggctgcagccggtggctgccaccgcctctacccactgtgctccctgtcccccgtggcgctgggccccacctgtgactcgatgtccagcagccgcarcgactggtcgttcacctgcagcagcatctcctgggtccagatcttctccttggagctcagctgcaccagcttccggatggcgtcgtccacagacgtgatggcttcgctcttgtccatgatgaatgtggccaggtgctgggggtgggcaggtggtcactgctgggcagagccctccttgtgtcgaaagcccagcccccaggggccacagcctgaggsgctgaggggccacagccaaccctgggtagggggctagaacggggaccggccccgcctttggtggggggagtctctattctgccttggcaggcatctgtaggggccatgcttgtgtcctgaaactatcctcaaaggaattccaactgctgcccggccccrcgccaccatcctcacccgcccacctcctggtgcaggctcagtacccgcccactgcaccagctttgccagcctccccagctctcttccttctcagacgtcccctctgtggccacctggctacaatgccagccgtcaccccatcccgacctgccctaattccctgaatcagacccaacgtcgcgctgcacgtggtgtgctgtgcgtccagcgtgctcgctactccaaggcactgttccggttgccacttgctaagctgtgtccccaggtccagggcaaagcctggtgcacagaggaccctcgacaagtgtgtgcgggatgcgtccatccctgaggatctgcggccagcctggcccctgccctgtgcccttcacctctcctctttccaggcctggctcaggccccctcctccagccaagctgccgtgttcactaagtaaaaccctcccacgaagggttggccgttcggtgcacaatgctggcacagctggataaacactaacttgaactacaggacagtcaaagacaaccacaaaacgcaaaacataaaagtttgtgtggccgggcgcggtggctcacatctatcatcccagcactgcgggaggccgaggcgggtggatcacctgaggtcaggagttcgagaccagcctagccaacatggtgaaaccctgtctctactaaaaatacaaaaaattagccaggcattgtggcgggcgcctgtaatcccagctactcgggaggctgaggtgggagaatcacttgaacccaggaggcagaggttacagtgagccaagattgcaccactacactccaggctgggcaacagaggaagactctgtctcaaaaaaaaaaaaaaaagatcgggcgcagtggctcatgcctgtaatcctagcactttgggaggccgaggcgggtggatcacaaggtcaggagattgagatcatcctggctaatatggtgaaaccccgtctctactaaaaatacaaaaaattagccaggcgtggtggcaggcgcctatagtcccagctactcgggaggctgaggcaggagaatggcgtgaacccgggaggcggagcttgcagtgaatcaagatcgtgccactgcactccagcctgggcgacagagtgagactccatctcaaaaaaaaaaaaaagaaattaaaaaaattaaaaaattagccaggtgtggtggtacacacctgtcatcccagctacttgggaggctgaagtgggaggaatgcttgagcccaggaggtcaaagttgcagtgaaccatgttcgtgccactgcactgagcctgggcaacagagagagaccctgtctcaaactaaaaaaaaaaaaaaaaattaaaaaagcatgcaaaaactcaaagaaaaaattgtatgcaacaccattgaatgaaagaattacaatttgaaactctgagcctcttttattttagtgttttgtcggtttggcgggtttttttgtttgtttgttagtttttgttttgtttttgagacagtctcgctctgtcccccaggctggaatgcagtggtgtgatcttggctcactgcaagctccgcctcccgggttcaagtgatactcctgcttcagcttcccgagtacgtgggattataggcacccaccaccacacccgactaatttttgtatttttagtagagacaaggtttctccatgttggccagaatggtctcaaactactgacttcaggttatctgcccgcctcagcctcccaaagtgctgggattacaggcgtgagccaccatgcccagcctctgtttggtttttggttaacaattttttttttcttttttttgaaacggagtctcactctgctgcccaggctggagtgcagtggcgcgatctcggctcactgcaatctccgcctcccaggttcacgccattctcctgcctcagcctcccgagtagctgggactacaggcgcctgccaccacgcccggctaattttttgtatttttagtagagatggggtttcaccatattagccaggatggtctccatctcctgaccttgtgatctgcccgcctcggcctcccaaagtgctgggattacagacgtgagccactgtgccctgcctatttattttttctagagacaagggcttgctatgttgcccaggctggtcttgaactcctgggctgaagcgatcctcctgcctgtgcctcccaaagtgctgggattataggcatgagccacctcgcccagccaggaattgtgtttttttacctattctattgcccaatactaatagtcattgtgggttttacttatgggttaggatgtggagaaaggatgccctcatccagcacctgcccagcctctctggggagaggccagtggcacctctaaagctgcacacaccatcccctcccaattctactacaggtaatctgcacacgtgcaaaatgtggcatcggtaccaggctgctcaatgcagaactatttgtaataataaagactggacccagcctacatgtccatcaacaggttaaagaagtgggcagatccaacaggttacagtgggcacagggccagacacggtggctcatgcctgtaatcccagcactttgggaggccaaggcaggtggatcacaaggtcaggagttcgagaccagcctgaccaacacggtgataccccgtctctactaaaaatacaaaaattagcccggcgtggtggtgggcgcctgtaaccccggctactcaggaggctgagttaagagaatcacttgaacccggaaggtagagattgcagtgagccgagatcgtgccattgcattccagcctgggcaacagagcgagactctgtctcaaaaataaataaataaataaaataagtgtgcagaaacacgcaagggactatgaggccactcatctctctgcgagaggcagagtaaaacctgaaacacacaatacaaccaaacaagaaaaaccaggctgctgggccacagaacaagtctcagtaaatctcaagtgactgcaacagtacagaatatgttttttgatcataacagaattaaggtagaaacccataataaaaakaaaaccagaaaatccccaaatgtttagaaacaaagcaacatatttctaaataacccatgcatcaaagatgaagtcacaagaaaactagaaagcattctgaacatacatatcacaatttgtggaatacaactaaaccagtgctgcaaggagaatgtagagctttccatgaatatcttagaaaagaagaaagacttaagatcaataatctggccaggcacggtggctcacgcctgtaatcccagcactttgggaggccaaggagggtggatcacttgagatcaggagtttgagaccagctgggccaacatggcaaaactcttgtctgtactgaaaatacaaaaattatcccagcactttgggaggctgaggcaggcagatcacaaagtcaggagatcaagaccatcctggctaacacggtgaaaccctatctctactaaaamcacaaaaaattagccgggcggggtggcgggcgcctgtagtcccagctactcaggaggctgaagcaggagaatggcatgaacctgggaggcggagcttgctgtgagcygagatggtgccactgcactccagcctgggtgacagagcgagactctgtctcaaaaaaaaaaaaaaccccacacaaaaattagccaggcatggtggtgcatgcctgtaacctcagctacttgggaggctgaggcaggagaatcgcttgaacccaggaggcggaggttgcagtgagctgagattgcaccagtgcactccagcctgggtgacagagtgagactccatctcagaaaaaaaaaaaaaaaaaaaagataaataatctaaggtttcaccttaagcaggtaggaaaagtgaatcaatgccgggcgcggtggctcatgcctgtaatcccagcactttaggaggccgaggcaggcggatcgtgaggtcatgagatcgagaccatcctggctaacgcggtgaaaccccgtctctactaaaaatacaaaaaattagctgggcgtggtggtgggcacctgtagtcccagctacttgggaggctgaggcaggagaatggcgtgaacccaggaggcggagcttgcagtgaatcaagatcgtgccactgcactccagcctgggcgacagagcaagactccatttcaaaaaaaaaaaaaaaaaaaacaaaagaaaaagnnnnnnnnnnnnnnnnnnnnnnnnnnnnnnnnnnnnnnnnnnnnnnnnnnnnnnnnnnnnnnnnnnnnnnnnnnnnnnnnnnnnnnnnnnnnnnnnnnnnnnnnnnnnnnnnnnnnnnnnnnnnnnnnnnnnnnnnnnnnnnnnnnnnnnnnnnnnnnnnnnnnnnnnnnnnnnnnnnnnnnnnnnnnnnnnnnnnnnnnnnnnnnnnnnnnnnnnnnnnnnnnnnnnnnnnnnnnnnnnnnnnnnnnnnnnnnnnnnnnnnnnnnnnnnnnnnnnnnnnnnnnnnnnnnnnnnnnnnnnnnnnnnnnnnnnnnnnnnnnnnnnnnnnnnnnnnnnnnnnnnnnnnnnnnnnnnnnnnnnnnnnnnnnnnnnnnnnnnnnnnnnnnnnnnnnnnnnnnnnnnnnnnnnnnnnnnnnnnnnnnnnnnnnnnnnnnnnnnnnnnnnnnnnnnnnnnnnnnnnnnnnnnnnnnnnnnnnnnnnnnnnnnnnnnnnnnnnnnnnnnnnnnnnnttctgaaaacagaagaggagggaatacttccccacccattttataaaaccaacataaccctgccacacaacctgccataggcattatacgaaaattacagaccagtacctctaatggacatcaacacaaaatacccctaacaacaatattaccacatcagtccctcaacacaggaaaaaggatcacacacttggaataaatgaggattaggctggttcaacattcaaaacagtcaatcagtgtggtccagtacattgagactgtctcaaaaaaataataaaataaaataaaataaatataaaataaaatttaaaaattaaataaaaaaataaataaaataaaataaaataaaataaaataaaatggatcctggccctaaacgcaaaagcctacactgggaagcatccaaaagaaaacacaggaactggcccagcgcggcggctcacgcctgtaatcccagcactttgggaggctaaggctggtggatcacctgggatcaggagttcgagaccagccttgccaacatggtgaaaccccatctctgatgaaaatacaaaaaatgagccgggcatggtgatggattcctgtaatcccagatactcaggaggctgaggcaggagaattgcttgaacccaagaggtggaggttgcagtgaaccaagatcacgccactgcaccccagcctgggtgacacagcaaagctccacctcaaaaaaaaaaagaaaaaagaaaagaaaaagaaaacacaggaacttccacagtgaattcctaatttacaaaaaataaaagaaaacacggaagaaatctccagaaatttggtcaaaggatgacttcttaggatgccaaaaaccctaaaccataaaagaaaaacacatacgaatggacatcataaaaattaatttccacttatcaaaccacaatgatggaggccggacgcagtgactcagtccgtcatcccagcactttgggaggcaggtggatcacctgaggtcaggcactggggaccagcctggccaacatagtgaaaacaggtggatcacttgagrtcaggcgttggggaccagcctggccaacatggtgaaaccccatctgtactaaaaatacaaaaattaggccaggcacggtggctcacgcctgtaatcccaccactttgggaggctgaggtgggtggatcaattgaggtcaggagttcaagaccagcctggccaacatggtgaaaccccatctctgctaaagatataaaaaattagctgggtgtggtggtgcgtgcctgtaatcccaggtactggggaggctgaggcaggagaatcacttgaacccttgaggcggaggttgcagtgaaccaagatcacgccaccgcactccagcctaggtgacagggtgagactctgtctcagagaaaaaaaaatttagccaggcgtggtggcgggcgcctgtagtcccagctactcaggaggctgaggcaggagaatggtttgaacctgggaggcagaggttgcagtgagctgagatcgcgccattgcactccagcctgggtgacagagcgagactccgtctcaaacacacaaacaaacagaaactgtggtgatgaaggcaggcaggtgttgccagaggttgggggtagccaccaaggtcggggattcacaggtttggagtgatggggctgatgggtcgactatggtggcaacagaaccacacccccacgtacacatggcttttactgtgtgataacttagaaaaaagcaaaccatggacccgggctcaggtgccccccacccactgtcagggccaatctgatccggcccccacctggctggagagacttcccaccagactctcaccctctctctggtccccagtgtcctcatcggggagaggcaggaaagccccacccaccctccactcctcactctgttggcctctgggcagacgaggctcctgctggctgggggccaggccaggccagctggggccaaagtccaggagccaggctgagaggccccaggctcctcccgaagagggcagagtccctgagaaaggtggtggagctgcccaggaagaggggactaaagtgaactcggccactgctctgtgccttcccctggacactgagctggccgaagtcaccagcctggctgtatgcagggtctagctgcccaggctgctgggagggccctggtcacccaaaacagcccgattcaagagctcagggactcctgatggctctttggacccattgtacagacgaggaaactgaggctcaaagagtagtgacctgtctcacctctgcaggtgtggaggacagcaagggggaaccagggggcattttgggcccccagccagggctgtttgtggcagaaaggactggtcctgcaggaggacccagctccaggctccctcaccctccctccttttcctagtcctgtaggcttggaccacaaccggaagcccagctcgcacccaggcttggacgacaaccgggagcccagctcgcacccaggcttggacgacaaccgggagcccagctcgcacccaggcttggaccasaaccggbagcccagctcgcacccaggcttggaccacaaccgggagcccagctcgtacccaggcgcaggggcctttttttttttccttttgagatggagtctcgccctgtcccccaggctggagtgcagtggcgcaatcccggctcactgcaacctccatttcccgggttctagtgattctcctgtctcagcttcccaagtagctgggactacaggctcccaccaccacgtccagctaagttttgtagttttagtagagatggggtttcaccatgttggtcaggctggtctcgaactcctgacgtcaggtgatccacccgcctcggcctcccaaagtgctgggattacaggtatgaacaaccgcgcctggtcccttttttttttctcttttttgagatggagtctygctctgttgcccatgctggagtgcagtggtgtgatctcggctcactgcaacctccgcctcctgggttccagtgattctcctgcctcagcctcccgagtagctgggattataggtatgcaccacgacgcctggctaattttgtattttcagtagacatgaggttttgccatgttggtcaggctggtctcgaactcctaacctcagatgatccactcacctcagcctcccaaagtgctgggattacaggcgtgagccaccgcgcctggcctaagactctgttgcccaggctgctggagggccgtggtgggatcctcctgcctgagcctcccaagtagctggactacgagctcacactaccaggcctggctaggaggggggaggattgcttgagcctaggagtttgagaccagcctgggcaacatagggagacttccatctccacaaaaaaataaaataattagatgggcatggtggggccagcctgtaggcccagctactggggaggctgaggtgaggggatcacttgagtccaggaggcggaggctgtagtgagccaagatcgcaccactgcactccagcctgggcacctgggtgacagagctagaccctgtctcaaaatgaaagaaagaaaagaaaagagagagacagagagagagagaaagaaaggaagaaaaaaagacacacacacacacacacacacgcacgcacgcacacacgcacacacgcacacaaaaccccccaaaaaaacatttcctgagttctccgtgtcaatgaaactgacctaggagaacagaaaagccctcagggctggcggctggtccggcgcgtgcaggcagccccgtctgagccctgagaagcagcccgggcctccctgaatcccccatcaagggcgtctttgttctgcctgctccctcccgatacagttcctcgttttggggccaggatgatcatctcctccaggggctcttcccatccagggctgggcagcagccacagtgttttcccggcacaccctgggctgcctcaccccccaggccgcgagttcccaggactggaaccagaggggcgctttccccggccccgtggctgagcccgggacagtgtgggcagttctggctctggcctcccccggccccgtgggtgtcagaagctgggctgaccactctccctggagctttcctcccttcctcccttcctcccttyctcyctttctctctttctctctttcgttttgagacagggtctmgctctgtcacccaggtgcccaggctggagtgcagtggtgcgatcttggctcactacagcctccgcctcccgggctcaagtgaccccctcgcctcagcctccccagtagcagggcctacaggccggcaccaccatgcccgtctaattattttattttktgtggagaygagaacctgaggacagccatgtcctgagggtgctccctgggggcggagcctacctgggggcggggccttacctggacgtggtactgcgaggtctcgtgcatgatgacgttggagttggaatacttcttcctctgctctgaaccgggagacaccagtcactcccccgacgggcaggacccacagcctcccgtccagttgggactggacccacaagggaaggtggagtcaagcggagggaggctgctccgtggacctcttggccaccaggaaggatgtgggtgtgaaatcaggacctgcaggaagccccctccctccctccagggaagcccccttggagaaggacgcagctcggagaaggcgatgggcttgctctgagtggagtggggaccagcagcctgtgcccggggggtttctgtccyggagggtgaggggacaggaagggggtcccagcccggcttcttcccactctgagagctgccagcttcactctccctgccctcccaggtcttctcgctttccagactaggcaccttgtccaaagacataagtgaagggtgcatctagctagcgagagggcagggtcgtctctggggaagggcagagtggggggaggtgggggctggccaggcccccctcctggagcagacacctggcggcttatcctgcctgaacctcgctgtgatcaggttacagcaaygagtgcagcggaatcaatattgatgctccctgaattattagtaaaggcctctccccttacgggtgtgggggaggggatccagtggccaggagctttcggaaggttgattagggtccagaggcctccctgggcacccggagatcccctgggccagaccaggcacagctgtggggcaggagcrgctgtcccccacctggatgcagtgcccatttctcccctgtgacgtccagcccgttctcaaacctcactcaccaaacaggtccttggggctcatcttggccacaccgtcggaccggcccaggctgccactgcaggggaggggctgtcagggcagggccaaactgcacccctccctggggactgttcagagggtgagggtggggtattcgggatgggtgggagggctcacttggtggcacccgggcagcagctcacggccccggactggctcatggtgtcttgggtggcggccagcgggagaagggcagacctcagtgtggccccggtctgaggccagtgcctgtcccacacctgggtggacagaagggctgcgctgacacttcctccggcctggctggttcctcccctccttccctgggccagatccctgactggcctggcctgggtgggggtcccttggggggcagagcccctgcccgacatcccagttggccccacgtcccagttggccccacgtcccagttgacagtcgatcagcctcgtcatgcctcagaccctaggtgctccacagggaccccccagaggctgactgggaggctctgacaagggccctgggggcagaaggcgccttccaagctgggcagcatggagtttaaggccctggtgctgtggggaggggggnnnnnnnnnnnnnnnnnnnntcctcatctttgggagcccattccccagcggcgccagaggggcctgtgctccaggcttgtccacagctccggccactccctgccagagtgcccagaccccgggtgcgagtcgtgtccgcgcgatgtacccgcagtaggagagggcgggtgggagctgcaggatggcaggagaggtgaggctggagttggggtaggtcctgaagtccagagggagcccggctctagccgccactcctgccccaccccaggcctgcaccccaaggggctcctgcacccacatgtggacttgccacccacacatgccacctctgtccaggccccagcaaagaggctggcccttggctctttcctgggcctgggagacctggcagggaagaggctgtgcgggcaggaaaccctggggtccccggggtgcagtgtttcctcacctcgagggcagggatgcggccaggtggccagcgcagaacccctggcagcagccaagcctaggggagggactggagggcaggtgtggtgggggctgagactgggagccagtccagtggccccaacacacagtatcactgcccctccaacgaggtagggtggctatggggcaggtgcctctggcctcccccaggggcagaatcctcagagcctgtctctgggctcctagtgctgacctcttccccgagcattttggggaaactaaggcccagccgccagggcagacaggtgggtctgatttgggctggaccctaggggcttcccggggggatggacagagcctgatggccctgaaccaggctgacttgtcccaaggggactatgccctgtggggacctggctgttctgtggctctgtgatcagctccccacaggtccacaccatctgcctcctgccagggctgcagggctgtcccctgtggcttcagagtttgggtctgccacggtgggggtcaccagccactgctgttggtatggagggtcaagggagtggctcggagcacccgggactttctggtttgaccaggtctggcctagtgggagggtctgggaggcccgggggcactgccgctgacatgaggggctgggtgcaccagggggtatggccacttcctccatccatctatccgtggagaatgtctggaatgttcacgggctcagtggcgagcctgagtgtttgcttaatgggattcctggcgggctccaccaagggcgccaggcacgtgtgtccaggcacacacctgggcgagacaccaacgcacccttgcagactcaggcctgggggcacgcaaacatggagggctgtgacacgcgacccccctggggaaggccaggttcctggccttcggttgcctgcagggcatcggggacctcaggcccaggcagggccgggcagcagtggggtgggtccaggtgtggtgtctgggtctgaagcacatgggtatggggctgcctcctgccctgtgggagccccgcccccctggggaggcttctttggcccactggtggtggggacgaagccctggaggcccaggctgcactttgtactgtggtcattttcccggtgtgaagtgaggcagagcggggtgcccggtcagtcgggctgtggaggggaggaggtcccagcagggcaggagggtagagggacgggctccaagttcaaattccagctccacatgctgagtgaccttggggaggggtcagctgagtcacaggggctccaggctgccctcataggcgctgggtggggccctggaatggggaggcccctcaggccctggccctgtcctggtttggaagctatggcttgagggaggaagggataagctggggaagctgagggtgggaaaggagaccgaggcaggcggagaaggcccggtgggagaagctatgccaacaaggcctgggtgctaagcaggcccgggagaggctgggacccaggaggggccgcgaggggaggaggnnnnnnnnnnnnnnnnnnnnnnnnnnnnnnnnnnnnnnnnnnnnnnnnnnnnnnnnnnnnnnnnnnnnnnnnnnnnnnnnnnnnnnnnnnnnnnnnnnnnnnnnnnnnnnnnnnnnnnnnnnnnnnnnnnnnnnnnnnnnnnnnnnnnnnnnnnnnnnnnnnnnnnnnnnnnnnnnnnnnnnnnnnnnnnnnnnnnnnnnnnnnnnnnnnnnnnnnnnnnnnnnnnnnnnnnnnnnnnnnnnnnnnnnnnnnnnnnnnnnnnnnnnnnnnnnnnnnnnnnnnnnnnnnnnnnnnnnnnnnnnnnnnnnnnnnnnnnnnnnnnnnnnnnnnnnnnnnnnnnnnnnnnnnnnnnnnnnnnnnnnnnnnnnnnnnnnnnnnnnnnnnnnnnnnnnnnnnnnnnnnnnnnnnnnnnnnnnnnnnnnnnnnnnnnnnnnnnnnnnnnnnnnnnnnnnnnnnnnnnnnnnnnnnnnnnnnnnnnnnnnnnnnnnnnnnnnnnnnnnnnnnnnnnnnnnnnnnnnnnnnnnnnnnnnnnnnnnnnnnnnnnnnnnnnnnnnnnnnnnnnnnnnnnnnnnnnnnnnnnnnnnnnnnnnnnnnnnnnnnnnnnnnnnnnnnnnnnnnnnnnnnnnnnnnnnnnnnnnnnnnnnnnnnnnnnnnnnnnnnnnnnnnnnnnnnnnnnnnnnnnnnnnnnnnnnnnnnnnnnnnnnnnnnnnnnnnnnnnnnnnnnnnnnnnnnnnnnnnnnnnnnnnnnnnnnnnnnnnnnnnnnnnnnnnnnnnnnnnnnnnnnnnnnnnnnnnnnnnnnnnnnnnnnnnnnnnnnnnnnnnnnnnnnnnnnnnnnnnnnnnnnnnnnnnnnnnnnnnnnnnnnnnnnnnnnnnnnnnggaggagggcgtgggatggaggcgcccccgccggcctcggacccagctccgccccgccccctgccccgcctgggctccagccccagccctctgcgtcctccccaacacccgcctggtgtgcccctccgcgggcctagcccctagagctggggcgctggggacaggcggggcgcagggccgcctccgcgggatgagcagggcgaggcctcgagctcttccttgggcagggcctagctgcgccccagcaggccgggggacgggggaacgctgccaatgggacttcgggggcagcgctggcgcattgctggggagggctccagccctggggaggtcagagcctccgccgggccaggtgcacccctcaggtgccccaggcatggggcagagtcacttcccttaccgggcccaccgcaggcccaggggcagaggcttcggtgagtgggtgggtgtcaggcaggacccarccatgcccaccccaggcctggagccctgagttcacagtgcagctgctcctccaggcccccctttctgcccagcctgggcactgagggatggggtrtcaggggaggtggggacacctcaggccctctcaggatgcctctctccttgcactgccccgtggtcaggcccaggccccacctctgcccaccacagtgggactgtctggttccgtcctcatctgcccggcttccaggatggcccttctccccagctgctgtgaccgctcagaacagggccagggtgcagtggacacagcgggtagcaccggctgccacagcagtcaactggacgaggaggaggtgaaggggcacagggcgccccaggcccatgcagggacccaaggctccggctgccggtcctgggtaggggtgggaatgagcgtggccaagagtctgggtccccgggctatggtcccagaggggcagggctagcgtgtttaccctgggctggccggagcacttcctggggaggcgccataggtgagctcggtggagggctggcaggaagtggccctcctccttcgggcccagtgcctgcccctgagcccaggcaagacctggcttcctggtttacagcctttgccgtttgatctccaggaacctgccgtgatcctgctccatgcatgagcttgccctgacccagagctcagggtcacacacgccaacccctcggtgcacccgtgccctcacccttcctggaggcagagctgggagtggccaagtgggaaayaggcgctggagaggacagctggggggtggggtccctctccactcctaaacgggtgcctgtcaacacgattttgagtgcggagcctgccctcaggagacagtccaggctggtctctcgggccccatccactccgggtcacctggagccatggcgttccctgtggaacaggtgaccactgcctttgtgtgctcgctgagactggaggtatcaggatccattaaccatgaaggcaacaggtctccagcttcagggagggggtccttccctggtctgcatggttygtgggctgggtcctccagatggcaggtgtgcccagctggtcttctgcgagtgcaggcgctggtgagggaggtggcccgaggcgctcaggcgctggtgtgtgaagtgggtcctcagggctgtcctgcagctcaccgtggccactgggggccacagacaggtcaaaggaagtcggcccaggacaactgggtgctcccaccgcttccacgaagacaggcaggaaagactgtccaggtgccacagccacagccaccccagccgagggagccccagtggaggcccaggacagtcccgcagcctcctgccctcaggagtccaccgagcggaaggcgcccggcagccagggcccgagggcgaggccagccaggaactgaccagctggcaagtggggtgtgctctcttgcagggcaggagaactggagatggggtgggggaggtggccataattaggagaattcagggaggcatacacatctctttatttacaaaatgcggtgaagagaaaatatctagatatttgggtgtaattattccaaacatagaaaacacacaatagaatcaagtgaagggaaagctactgtaacagcttagatactttttaaggagaactgatagtaaatctgggaatgggaaaaaaacacagagctagaatttgtttagcactccgtgcaaaaggcaaaagctgataaaactggagtggacggaggctccgaatgtggccctccgctgctctctctcctgcagtctcatccccggccttagccctgacctctcctccgaagcccctgaagggagaagtgtggctaagatggaaattgctaggcagcagagctgttggcttgtttgcatttattgctttaggaacccagagtccactcttgcaccgggcctgcctgcctgtgaggcagagctggggttgctcagagcacaaggcctaccccatcctgcgtctccagcccgacttggaaacacaggtggggcctggccacggagtaaactgggatctcagaacacaaattaggaccattggggaactagggggtgatgggggatgcagtgagatgaggcctctgttctgaagggctctgtcctccctctcggccctgggggcccatggggggtctgtggaggcctggctgctaaagccagaccccactgacagggctgagtgtgcgctcctgggactcatcttgaaggcagttctgtctggtccctaccctccccgcagctgttcccaacaccagggcctccagcagtttgttctgccctggctcctgctcccactcctgccagaacagatggaaccatccaaaaccatctatggccagtcactaggaaaagtgcccttcctgtccaggaatggggaggtgacagctgggggactggtcaggcccaggaggagggccccagygtggggtatcccgggtgtccgtagctacctggtgaaggccgcgatggcaaccacctgcaggacggcctccaggccgtgaagggccaggagcgtggcgctgagggcccagtccgcccacaacactagggcctgccaaagcaggaagtgggcagagaggagggcggtgccagccgtgagggccaggctggcggccagcggcctctcagcctctgtcaggttgcccctggtgcctggagaacagagcaaaggggagggaaggtggtgcgaggcgctccctggagcccaccgcccacaggtgcctggagggctgctgrgaccagagcagctccttgccctacgttcctccggggcctggggaattccagggaaacagcctccatggccacccagaactcaggagagccagagagcatgggcaacacaggcgtgagcccctcctgggggaggtgcccctgcaacagcatggtttgatctgtctctgggtcttctgggtcggctgtgtgggcgggggtgaatttggtttctaaaatgattcaagtgcatctgccacgttttcctaattccaagtggaactgaagggatttttttgaaaaattcccaaagtatttttctctggtccaaggccagttctggaaaatttcacgagtatgtattaaaaacaaaactgcgtatttagcaaacaaatgggtcagtcastagctgagcccaggtgcctggagaccctgcagtgtgcggcgcgcttggggagggtcccgttggcctagcagcccccagcagggccaggccacaccctgtccccaccacctcagggcaggcccaggccccagaagatcagccaagaaccgggcctctgtgccgcagcggtgctcgcaccctcccagcagtgcccgccctggggggcaagctctagaggttctgggacgtragtgcagacaagacactgacggccgggcacccctcagtgggatgggcagctgagagaactcgcctccatcctcctagtgtgtctgaggcctgataacaagaggaagggtgggggccacccttccccgcagccttggttcctcactggacatcrggcatcaggggtgtatctgtatgtgaacaagaggggcccaagattccagcctggcaggggcacagcgccctggaagtgcccattgcgttccccacggcaggacaatgtttcacaaacacgtgtgtttaggtgcacatgttacgaccatgagcacgcagagggctggaagtctgcaccccgctggccacagaggtgagctctggggagggcgaatttccatgttttacttctgcaccccttgaatcttgtacaagaacatacccttgaacaaattgtgtggttaaaaaaaggggagtgaggccaggcactttgggaggccaaggtgggcagattgcttgagcccaagagttcaagaccaaccagggtaacatagtgaaacccygtctccggccaggcgtggtggctcacgcctgtaatcccagcactttgggaggccgaggtgggcggatcaggaggtcaggagatggaaaccatcctggccaacacggtgaaaccccatctctactaaaaatacaaaaatgagccgggcgtggtggcgggcacctgtagtcccagttactcgggaggctgagacaggagactggcatgaacccaggaggtggagcttgcagtgagccaagttcacgccactgcactccagcctgggcgacagagcgagactctgtctcaaaaaaaaaaaaaaaaaaaaagaaaccttgtctcgtctctaccaaaaaaamcaaaacaaaacaaaacaaaattagctgggcgtggtggcaggtgcctgtaatcccagctacttgggaggaggggagggctgaggcaggaggattgctcaagcccaggaggtcaaggctgcagtgagctgtgactgcaccactgcactccagcctgggcaacagagtgagacctcgtctcaaaaaaagtaggtcactggaaggggttgcagacttggggatccctagagctggagtggggaggctgggggctcccacccctccagactctgctgccttttgggacctggcagaactctccagggctctctcctcagacagctaagggcaaggggaaggaaaggggtgctggtgaatattccggagctccagatgtggtggtgggctgggcttctgatctcagtgccattacccagtggcttctacaagacatgcttccaaacacagagtctctcccaacgatgcccccagtgttatttgtctctgggacaaaacttcttgattaatacttaatgacactgtaaggtgagcctgcaaagcaactgggtaagcagtttggataaaaaatgtctctgagaaccacactataaaataattactcttgaaaggctgtggaaacagatagcaactcttaggacaggttcttcacggtgttaacagtccactcacccaggtataaccgaactgcttctagaatccccatcagaaacagcagagcaagatcgaggaccaggtagcggtgaggatagctgaacacctgacctgaagagcagaggcgcggacggaacataagtaacctggcacagcagcagcagccacctcagcttgccttttccttttttttttttttgagacagggtcttgctctgtcacccaggatggagttcagtggcgcaatcttggctcactggaacctccrcctcccgggttcaagcaatcctcccacctcagtctcccgagtagctgggactacaggcgcccaccaccacgcccggctactttttgtgtttttagtagagatggggtttccccatgttggcctggctggtctcaaactcctgacctcaagtgatccgcccacctcagcctcccaaaatgttgggattacaggcgtgagccactgtgcccgkccctgacttacttttatacgtgatcatcaggagcgtggcgaggaaatacagggcgtagtacgttccgctgagataaaacagcatttgaaggggaactgaagagagctggtgagtggttaaggatcctcaagctcaacaggcttgggagcagcctcccaggtggctgaacaagaggggctggttctgtcatctgtttggtggccacagacaccaagggaccatggagtcttggcaatggctcactgcctatctgaggcttctgtcactatgctggctgccaatgtggtcccatgagctgacaaggcctttgtgggacccccctccatgccacaacaatgcggtctgtgcactgcagcccctgccctcctgactgtggacaggactggtcaggggayagcctccacacactggcatccccagtgatgtcaccctgcctttggccccagttatgagttaagagagaaaaaataactttgtcattttctttttttttttgagatagagtcttgctctgttgcccagactggacactgtgcagtggcacaatcttggctcactgcaacctccgcctcctgggttcaagtgattcttctgcctcagcctcctgagtagctgggattacaggcgtgcaaaaccatgcccagctaattttttgtatttttagtagggacagggtttcaccatgttggccaggctggtctgaaactcctggtgtcaagtgatctgtccacctcagcctcccagagtgttgggattacaggcatgagccactgcgcccggccacttttttcagtttcttcagagnnnnnnnnnnnnnnnnnnnnnnnnnnnnnnnnnnnnnnnnnnnnnnnnnnnnnnnnnnnnnnnnnnnnnnnnnnnnnnnnnnnnnnnnnnnnnnnnnnnnnnnnnnnnnnnnnnnnnnnnnnnnnnnnnnnnnnnnnnnnnnnnnnnnnnnnnnnnnnnnnnnnnnnnnnnnnnnnnnnnnnnnnnnnnnnnnnnnnnnnnnnnnnnnnnnnnnnnnnnnnnnnnnnnnnnnnnnnnnnnnnnnnnnnnnnnnnnnnnnnnnnnnnnnnnnnnnnnnnnnnnnnnnnnnnnnnnnnnnnnnnnnnnnnnnnnnnnnnnnnnnnnnnnnnnnnnnnnnnnnnnnnnnnnnnnnnnnnnnnnnnnnnnnnnnnnnnnnnnnnnnnnnnnnnnnnnnnnnnnnnnnnnnnnnnnnnnnnnnnnnnnnnnnnnnnnnnnnnnnnnnnnnnnnnnnnnnnnnnnnnnnnnnnnnnnnnnnnnnnnnnnnnnnnnnnnnnnnnnnnnnnnnnnnnnnnnnnnnnnnnnnnnnnnnnnnnnnnnnnnnnnnnnnnnnnnnnnnnnnnnnnnnnnnnnnnnnnnnnnnnnnnnnnnnnnnnnnnnnnnnnnnnnnnnnnnnnnnnnnnnnnnnnnnnnnnnnnnnnnnnnnnnnnnnnnnnnnnnnnnnnnnnnnnnnnnnnnnnnnnnnnnnnnnnnnnnnnnnnnnnnnnnnnnnnnnnnnnnnnnnnnnnnnnnnnnnnnnnnnnnnnnnnnnnnnnnnnnnnnnnnnnnnnnnnnnnnnnnnnnnnnnnnnnnnnnnnnnnnnnnnnnnnnnnnnnnnnnnnnnnnnnnnnnnnnnnnnnnnnnnnnnnnnnnnnnnnnnnnnnnnnnnnnnnnnnnnnnnnnnnnnnnnnnnnnnnnnnnnnnnnnnnnnnnnnnnnnnnnnnnnnnnnnnnnnnnnnnnnnnnnnnnnnnnnnnnnnnnnnnnnnnnnnnnnnnnnnnnnnnnnnnnnnnnnnnnnnnnnnnnnnnnnnnnnnnnnnnnnnnnnnnnnnnnnnnnnnnnnnnnnnnnnnnnnnnnnnnnnnnnnnnnnnnnnnnnnnnnnnnnnnnnnnnnnnnnnnnnnnnnnnnnnnnnnnnnnnnnnnnnnnnnnnnnnnnnnnnnnnnnnnnnnnnnnnnnnnnnnnnnnnnnnnnnnnnnnnnnnnnnnnnnnnnnnnnnnnnnnnnnnnnnnnnnnnnnnnnnnnnnnnnnnnnnnnnnnnnnnnnnnnnnnnnnnnnnnnnnnnnnnnnnnnnnnnnnnnnnnnnnnnnnnnnnnnnnnnnnnnnnnnnnnnnnnnnnnnnnnnnnnnnnnnnnnnnnnnnnnnnnnnnnnnnnnnnnnnnnnnnnnnnnnnnnnnnnnnnnnnnnnnnnnnnnnnnnnnnnnnnnnnnnnnnnnnnnnnnnnnnnnnnnnnnnnnnnnnnnnnnnnnnnnnnnnnnnnnnnnnnnnnnnnnnnnnnnnnnnnnnnnnnnnnnnnnnnnnnnnnnnnnnnnnnnnnnnnnnnnnnnnnnnnnnnnnnnnnnnnnnnnnnnnnnnnnnnnnnnnnnnnnnnnnnnnnnnnnnnnnnnnnnnnnnnnnnnnnnnnnnnnnnnnnnnnnnnnnnnnnnnnnnnnnnnnnnnnnnnnnnnnnnnnnnnnnnnnnnnnnnnnnnnnnnnnnnnnnnnnnnnnnnnnnnnnnnnnnnnnnnnnnnnnnnnnnnnnnnnnnnnnnnnnnnnnnnnnnnnnnnnnnnnnnnnnnnnnnnnnnnnnnnnnnnnnnnnnnnnnnnnnnnnnnnnnnnnnnnnnnnnnnnnnnnnnnnnnnnnnnnnnnnnnnnnnnnnnnnnnnnnnnnnnnnnnnnnnnnnnnnnnnnnnnnnnnnnnnnnnnnnnnnnnnnnnnnnnnnnnnnnnnnnnnnnnnnnnnnnnnnnnnnnnnnnnnnnnnnnnnnnnnnnnnnnnnnnnnnnnnnnnnnnnnnnnnnnnnnnnnnnnnnnnnnnnnnnnnnnnnnnnnnnnnnnnnnnnnnnnnnnnnnnnnnnnnnnnnnnnnnnnnnnnnnnnnnnnnnnnnnnnnnnnnnnnnnnnnnnnnnnnnnnnnnnnnnnnnnnnnnnnnnnnnnnnnnnnnnnnnnnnnnnnnnnnnnnnnnnnnnnnnnnnnnnnnnnnnnnnnnnnnnnnnnnnnnnnnnnnnnnnnnnnnnnnnnnnnnnnnnnnnnnnnnnnnnnnnnnnnnnnnnnnnnnnnnnnnnnnnnnnnnnnnnnnnnnnnnnnnnnnnnnnnnnnnnnnnnnnnnnnnnnnnnnnnnnnnnnnnnnnnnnnnnnnnnnnnnnnnnnnnnnnnnnnnnnnnnnnnnnnnnnnnnnnnnnnnnnnnnnnnnnnnnnnnnnnnnnnnnnnnnnnnnnnnnnnnnnnnnnnnnnnnnnnnnnnnnnnnnnnnnnnnnnnnnnnnnnnnnnnnnnnnnnnnnnnnnnnnnnnnnnnnnnnnnnnnnnnnnnnnnnnnnnnnnnnnnnnnnnnnnnnnnnnnnnnnnnnnnnnnnnnnnnnnnnnnnnnnnnnnnnnnnnnnnnnnnnnnnnnnnnnnnnnnnnnnnnnnnnnnnnnnnnnnnnnnnnnnnnnnnnnnnnnnnnnnnnnnnnnnnnnnnnnnnnnnnnnnnnnnnnnnnnnnnnnnnnnnnnnnnnnnnnnnnnnnnnnnnnnnnnnnnnnnnnnnnnnnnnnnnnnnnnnnnnnnnnnnnnnnnnnnnnnnnnnnnnnnnnnnnnnnnnnnnnnnnnnnnnnnnnnnnnnnnnnnnnnnnnnnnnnnnnnnnnnnnnnnnnnnnnnnnnnnnnnnnnnnnnnnnnnnnnnnnnnnnnnnnnnnnnnnnnnnnnnnnnnnnnnnnnnnnnnnnnnnnnnnnnnnnnnnnnnnnnnnnnnnnnnnnnnnnnnnnnnnnnnnnnnnnnnnnnnnnnnnnnnnnnnnnnnnnnnnnnnnnnnnnnnnnnnnnnnnnnnnnnnnnnnnnnnnnnnnnnnnnnnnnnnnnnnnnnnnnnnnnnnnnnnnnnnnnnnnnnnnnnnnnnnnnnnnnnnnnnnnnnnnnnnnnnnnnnnnnnnnnnnnnnnnnnnnnnnnnnnnnnnnnnnnnnnnnnnnnnnnnnnnnnnnnnnnnnnnnnnnnnnnnnnnnnnnnnnnnnnnnnnnnnnnnnnnnnnnnnnnnnnnnnnnnnnnnnnnnnnnnnnnnnnnnnnnnnnnnnnnnnnnnnnnnnnnnnnnnnnnnnnnnnnnnnnnnnnnnnnnnnnnnnnnnnnnnnnnnnnnnnnnnnnnnnnnnnnnnnnnnnnnnnnnnnnnnnnnnnnnnnnnnnnnnnnnnnnnnnnnnnnnnnnnnnnnnnnnnnnnnnnnnnnnnnnnnnnnnnnnnnnnnnnnnnnnnnnnnnnnnnnnnnnnnnnnnnnnnnnnnnnnnnnnnnnnnnnnnnnnnnnnnnnnnnnnnnnnnnnnnnnnnnnnnnnnnnnnnnnnnnnnnnnnnnnnnnnnnnnnnnnnnnnnnnnnnnnnnnnnnnnnnnnnnnnnnnnnnnnnnnnnnnnnnnnnnnnnnnnnnnnnnnnnnnnnnnnnnnnnnnnnnnnnnnnnnnnnnnnnnnnnnnnnnnnnnnnnnnnnnnnnnnnnnnnnnnnnnnnnnnnnnnnnnnnnnnnnnnnnnnnnnnnnnnnnnnnnnnnnnnnnnnnnnnnnnnnnnnnnnnnnnnnnnnnnnnnnnnnnnnnnnnnnnnnnnnnnnnnnnnnnnnnnnnnnnnnnnnnnnnnnnnnnnnnnnnnnnnnnnnnnnnnnnnnnnnnnnnnnnnnnnnnnnnnnnnnnnnnnnnnnnnnnnnnnnnnnnnnnnnnnnnnnnnnnnnnnnnnnnnnnnnnnnnnnnnnnnnnnnnnnnnnnnnnnnnnnnnnnnnnnnnnnnnnnnnnnnnnnnnnnnnnnnnnnnnnnnnnnnnnnnnnnnnnnnnnnnnnnnnnnnnnnnnnnnnnnnnnnnnnnnnnnnnnnnnnnnnnnnnnnnnnnnnnnnnnnnnnnnnnnnnnnnnnnnnnnnnnnnnnnnnnnnnnnnnnnnnnnnnnnnnnnnnnnnnnnnnnnnnnnnnnnnnnnnnnnnnnnnnnnnnnnnnnnnnnnnnnnnnnnnnnnnnnnnnnnnnnnnnnnnnnnnnnnnnnnnnnnnnnnnnnnnnnnnnnnnnnnnnnnnnnnnnnnnnnnnnnnnnnnnnnnnnnnnnnnnnnnnnnnnnnnnnnnnnnnnnnnnnnnnnnnnnnnnnnnnnnnnnnnnnnnnnnnnnnnnnnnnnnnnnnnnnnnnnnnnnnnnnnnnnnnnnnnnnnnnnnnnnnnnnnnnnnnnnnnnnnnnnnnnnnnnnnnnnnnnnnnnnnnnnnnnnnnnnnnnnnnnnnnnnnnnnnnnnnnnnnnnnnnnnnnnnnnnnnnnnnnnnnnnnnnnnnnnnnnnnnnnnnnnnnnnnnnnnnnnnnnnnnnnnnnnnnnnnnnnnnnnnnnnnnnnnnnnnnnnnnnnnnnnnnnnnnnnnnnnnnnnnnnnnnnnnnnnnnnnnnnnnnnnnnnnnnnnnnnnnnnnnnnnnnnnnnnnnnnnnnnnnnnnnnnnnnnnnnnnnnnnnnnnnnnnnnnnnnnnnnnnnnnnnnnnnnnnnnnnnnnnnnnnnnnnnnnnnnnnnnnnnnnnnnnnnnnnnnnnnnnnnnnnnnnnnnnnnnnnnnnnnnnnnnnnnnnnccggccgccggcgagaatctgcctagagccgtccagccctgtcggccggggacgacagccgcctcagcctgtcaggacagtgaggagagcaggggccgagtctctcggaagccctcgtgaggactcggacctattcggactgattcggcttcccacttcggggaacttcgaccctcctcggttcaggactcggtctcggctcggcggcttcgtgcaggttcggctcctactcgggcagcctctgttcgcctcggctccgctccgcgggcggactcggctcggctctgctcggcggctggctgccttttcggtccctattcgggcggcggcttcgggcggcctcggcccagctcgggcgtcctcttcgggccccgcttcgggctccgcgaccggcgcttcgggcggtcccggacggcgccttcgggaaggctcggcggagtccggatggaggactcggactcggcggcaaagcagctgggcctggctgaggcggcggcggtggcggccgcggccgctgtggcggcggcggccgcggccgcggcaggaggcgaggcggaggagccggtgctgagcagggacgaggactcggaggaggacgcagactcggaggcggagcgggagacgccgcgggtcacggcagtggcggtgatggcggcggagcccgggcacatggacatgggcgccgaggccctgcccggccccgacgaggccgccgctgccgcagccttcgcaggcaagtgcgcccgccggcctctcgcctcgtccggttcccgcgcgcctaccccgcgcgcctgccccgcacaactgtcccaggtgaccagcccgccacacctgtccctcacacctgctccacgtgaccagcccgctccacccgccctgcacacctgcccctcacacctgctccacgtgacccgcccgccccacccgccctgcacacctgccccacgtgactagctcacccctcacatctgcctctcacacctgccccacccgcccctcacactttccccacgtacctgctccaggtgaccagcctgccccacctgccacaaatacctgcctcgcacacctgctcgacgtttccagccttccccacctgccccacgtgatcggcctgccctacctgccccgcacacctgccccacatacctgccccaggtgaccagcctgccccacctaccccaaacacctgccccgcacacctgcccctggtgacctgccyagcctcacctgacctggccctgccctgcacacacctgccccctgccccccttttctttgtggcagccccgcctcctactggtcccccctgtgcagctctgcccctgccctgccttcgtccatcctggctccccccacctgtcctggagaagccctggggtgggtgggcacctgtggtcaccaggaaccccccacttcctgagggccagttcaggcatgacctgagcgctggggagccaggggtgggcagcctgctggaggccatgatgccagaggtcagcgtggctgtgtggtggcccaggggggctgcggagccacctgtgcaggctcccctcccagtcctccctcttcctcttgcctttttccctaaggacctgctcctcctgccccgcttcctgtcgggcttcctttggggaggctgctgtggctttccagtccayatttttatataagctgcttatagtttcttgccacacaggtcagtctccttctcaggctccaaaacactgggagcccgtggcagagctcacagatgccctacggggctggtgccgtccacccacctcctgtgtcccgcccttgtgtccgtggggcatagacttccccacccactggcttcctaacgcactgtattcttccccattggagttcccgagtgtcccccagggactcacagctcagtgttgagacccttgggaggagcttcttgttgcgttgtgaggcacttttcccctacggagctttgcgggttgaggaactggatcccagtcctggtgtgctgggtatgtcagggcattgcgtgtgctctgggtgcttgttcggcctgggggctgggtgggggccagcagcgtctgggctgcccttggtcagctgagtggccctcgaaggcaaaggggtcactgctgcttgtttggttggttaagaaaaaaaagtgagggaaggctttgtgactctcaggggttggcgtccgtcgctaaactctggtttgacgttgggatttggagccatgaggttgatttcaggtttttgtcatttttgcacgtatttttctgaatgcataaaagaaaaatgatgctgttcatcatgatgtcagagaaatgtgctgacgtgtgttttcttctgaaaaatatggtagttgtgttttgatgtggtaaaagcactttaatactttttaaaaattacgaacagctgacgtcaagtggtttccaggtttaagtaactcagcaggasacgctgccgcctgaggaggctttgggcggctgctcccagggctgccatgggcctggcgttgagcactcactgtggccgcgcgccgcatgccggggcttgtggtgctgagaggcgaggatgagggaaccgtgcgcctggtgtggtctggtcgtggagacagacagcaaacatgcctttttttttttttgagacggagtttcgctcttgttgcccaggctggagtgcaatggtgtgatctcagctcaccgcaacctcccgcctcccgggttcaagtgattctcctgcctcagcctcccgagtagctgggattacaggcatgtgccaccacgcccggctaattttgtatttttagtagagatggggtttctctatgttggtcaggctggtctcgaactcctgacctcaggtgatccgcccgccttggcatcccacagtgctgggattacaggcgtgagmcaccgcgcccggctgcaaacaggcatttttagggcagtttggtgagtgctgggttaatggtatggtcaggactcattcaaccagtatcttttaagcatctgctgtgtgccagagattgccctggacacaggacattctagaactctgggtgacagaagagccacttgcttggcctaggagcatcacaggaagactttgcasaggcagagaggagggtgtgggggtgttggcggcagaaagtgtttctctagaaacactccagcatgtagaggctggagctgcaggacctatctgggatgacaggggcaggaggtggggtgcagctgacctctgtggtaactgccctgtgtgcagatgctgctgaagggcctgtctgcatgccagggggctgagttccatgttgtagggggtgcggtggggtggcaccaagggacataggcaggttagatgtactttttaggaggaaggggtcagagaccaagggcaatggctgtgagcatggggccgaggtcacctgacgatggtggcctgacccctgcggtggaggagaggcaggaatggagctacaagagtgggtccaggaggtgtcctcacctgcggggaggccgagagctcctcgtaggcatagggcacacctgaccagcagaacccacagctgtgccgcagaaggagatagaagccccgtggtggtttgatagagctggggctggctggggtggcgggtttgttgtatgcattttttactgcacgtaaaaggctttactggggaagaatagatttcctctctttttcctggaagagccgaatgacttagacaatggaatagaaatgtaggtcgagcgtgttcatggaagtgttaagatcttcctggttacaagggcacacacctgagggggagtcactttgtttgaagcacctgagcgaggctgttcgctttgtccattctggyttttgttgcttgttaaatgaggctccttctgttgcagaggtgaccacagtgacagtggccaacgtgggggctgctgcagacaatgtcttcaccacgtctgtggcgaacgcggcatccatctcaggacatgttctggtaagctgctccgaggggcacagcccagggcgggtggtgccacgctgggggcctccggcttccccgaggctctcccggggttcagcccgctgtgtgaacgtctgctctgtgagctggggagggacgcactggctcgctctgctctcagaggccttcgggctgtgctggaggtgggagaaattacagctgaggtagaagctgcctcggaaggccaggtgaagagccacacctgtcagatgggcttgtggcctgcgttgggcrgggactcccagcaggctgctgtccggccacagttcagcctctgcccgaggcccggccctgcctgtgctccttatcctatagctgcagggccagctgaaagaagcaaggcgtttccctcccccatatcctgttctcgtagcatttatggtgcagtctcccacgcctgactgctgtctacttagaaaactgctgaaagccagttgcatttcaaatagtgtctgtgccaccttcagagcccttttgtgatcatgttttatcagcttattttatgttttatgtgtggggccttcggcgatctggggacatctggtcaaccagggcaggcaaccttgtttccaagtggcagatgccagggtgggtccagtctccagaaagggattttccctgggaccattggcacctgttacttgtagtcttttcagccttggtcacatacctgggacatcatctccatatacctgaaagcagagtggttatttgtttgttttgtttttgagayggggtcttgctctgtcacctagactggagtgcagtggtgcaatctcggctcattgcaacctccgcctcctgggttcaagccattcttgtgcctcagcctcctgagtagctgggattacaggcgtgtgccaccatgccaggctaatttttgtatttttagtagagacaggtcaccatgttgtccaggctggcctcaaactcctgacctcaggtgcccgccttgacctcccaaagtgctgggattataaggattataggtgtgagccaccrcacccggcckgaaagcacagttattgttagaatggcagcaaacagaaaacttgtgaaggacttcagtaaaaacataagaaacttggaaaccccctccnnnnnnnnnnnnnnnnnnnnnnnnnnnnnnnnnnnnnnnnnnnnnnnnnnnnnnnnnnnnnnnnnnnnnnnnnnnnnnnnnnnnnnnnnnnnnnnnnnnnnnnnnnnnnnnnnnnnnnnnnnnnnnnnnnnnnnnnnnnnnnnnnnnnnnnnnnnnnnnnnnnnnnnnnnnnnnnnnnnnnnnnnnnnnnnnnnnnnnnnnnnnnnnnnnnnnnnnnnnnnnnnnnnnnnnnnnnnnnnnnnnnnnnnnnnnnnnnnnnnnnnnnnnnnnnnnnnnnnnnnnnnnnnnnnnnnnnnnnnnnnnnnnnnnnnnnnnnnnnnnnnnnnnnnnnnnnnnnnnnnnnnnnnnnnnnnnnnnnnnnnnnnnnnnnnnnnnnnnnnnnnnnnnnnnnnnnnnnnnnnnnnnnnnnnnnnnnnnnnnnnnnnnnnnnnnnnnnnnnnnnnnnnnnnnnnnnnnnnnnnnnnnnnnnnnnnnnnnnnnnnnnnnnnnnnnnnnnnnnnnnnnnnnnnnnnnnnnnnnnnnnnnnnnnnnnnnnnnnnnnnnnnnnnnnnnnnnnnnnnnnnnnnnnnnnnnnnnnnnnnnnnnnnnnnnnnnnnnnnnnnnnnnnnnnnnnnnnnnnnnnnnnnnnnnnnnnnnnnnnnnnnnnnnnnnnnnnnnnnnnnnnnnnnnnnnnnnnnnnnnnnnnnnnnnnnnnnnnnnnnnnnnnnnnnnnnnnnnnnnnnnnnnnnnnnnnnnnnnnnnnnnnnnnnnnnnnnnnnnnnnnnnnnnnnnnnnnnnnnnnnnnnnnnnnnnnnnnnnnnnnnnnnnnnnnnnnnnnnnnnnnnnnnnnnnnnnnnnnnnnnnnnnnnnnnnnnnnnnnnnnnnnnnnnnnnnnnnnnnnnnnnnnnnnnnnnnnnnnnnnnnnnnnnnnnnnnnnnnnnnnnnnnnnnnnnnnnnnnnnnnnnnnnnnnnnnnnnnnnnnnnnnnnnnnnnnnnnnnnnnnnnnnnnnnnnnnnnnnnnnnnnnnnnnnnnnnnnnnnnnnnnnnnnnnnnnnnnnnnnnnnnnnnnnnnnnnnnnnnnnnnnnnnnnnnnnnnnnnnnnnnnnnnnnnnnnnnnnnnnnnnnnnnnnnnnnnnnnnnnnnnnnnnnnnnnnnnnnnnnnnnnnnnnnnnnnnnnnnnnnnnnnnnnnnnnnnnnnnnnnnnnnnnnnnnnnnnnnnnnnnnnnnnnnnnnnnnnnnnnnnnnnnnnnnnnnnnnnnnnnnnnnnnnnnnnnnnnnnnnnnnnnnnnnnnnnnnnnnnnnnnnnnnnnnnnnnnnnnnnnnnnnnnnnnnnnnnnnnnnnnnnnnnnnnnnnnnnnnnnnnnnnnnnnnnnnnnnnnnnnnnnnnnnnnnnnnnnnnnnnnnnnnnnnnnnnnnnnnnnnnnnnnnnnnnnnnnnnnnnnnnnnnnnnnnnnnnnnnnnnnnnnnnnnnnnnnnnnnnnnnnnnnnnnnnnnnnnnnnnnnnnnnnnnnnnnnnnnnnnnnnnnnnnnnnnnnnnnnnnnnnnnnnnnnnnnnnnnnnnnnnnnnnnnnnnnnnnnnnnnnnnnnnnnnnnnnnnnnnnnnnnnnnnnnnnnnnnnnnnnnnnnnnnnnnnnnnnnnnnnnnnnnnnnnnnnnnnnnnnnnnnnnnnnnnnnnnnnnnnnnnnnnnnnnnnnnnnnnnnnnnnnnnnnnnnnnnnnnnnnnnnnnnnnnnnnnnnnnnnnnnnnnnnnnnnnnnnnnnnnnnnnnnnnnnnnnnnnnnnnnnnnnnnnnnnnnnnnnnnnnnnnnnnnnnnnnnnnnnnnnnnnnnnnnnnnnnnnnnnnnnnnnnnnnnnnnnnnnnnnnnnnnnnnnnnnnnnnnnnnnnnnnnnnnnnnnnnnnnnnnnnnnnnnnnnnnnnnnnnnnnnnnnnnnnnnnnnnnnnnnnnnnnnnnnnnnnnnnnnnnnnnnnnnnnnnnnnnnnnnnnnnnnnnnnnnnnnnnnnnnnnnnnnnnnnnnnnnnnnnnnnnnnnnnnnnnnnnnnnnnnnnnnnnnnnnnnnnnnnnnnnnnnnnnnnnnnnnnnnnnnnnnnnnnnnnnnnnnnnnnnnnnnnnnnnnnnnnnnnnnnnnnnnnnnnnnnnnnnnnnnnnnnnnnnnnnnnnnnnnnnnnnnnnnnnnnnnnnnnnnnnnnnnnnnnnnnnnnnnnnnnnnnnnnnnnnnnnnnnnnnnnnnnnnnnnnnnnnnnnnnnnnnnnnnnnnnnnnnnnnnnnnnnnnnnnnnnnnnnnnnnnnnnnnnnnnnnnnnnnnnnnnnnnnnnnnnnnnnnnnnnnnnnnnnnnnnnnnnnnnnnnnnnnnnnnnnnnnnnnnnnnnnnnnnnnnnnnnnnnnnnnnnnnnnnnnnnnnnnnnnnnnnnnnnnnnnnnnnnnnnnnnnnnnnnnnnnnnnnnnnnnnnnnnnnnnnnnnnnnnnnnnnnnnnnnnnnnnnnnnnnnnnnnnnnnnnnnnnnnnnnnnnnnnnnnnnnnnnnnnnnnnnnnnnnnnnnnnnnnnnnnnnnnnnnnnnnnnnnnnnnnnnnnnnnnnnnnnnnnnnnnnnnnnnnnnnnnnnnnnnnnnnnnnnnnnnnnnnnnnnnnnnnnnnnnnnnnnnnnnnnnnnnnnnnnnnnnnnnnnnnnnnnnnnnnnnnnnnnnnnnnnnnnnnnnnnnnnnnnnnnnnnnnnnnnnnnnnnnnnnnnnnnnnnnnnnnnnnnnnnnnnnnnnnnnnnnnnnnnnnnnnnnnnnnnnnnnnnnnnnnnnnnnnnnnnnnnnnnnnnnnnnnnnnnnnnnnnnnnnnnnnnnnnnnnnnnnnnnnnnnnnnnnnnnnnnnnnnnnnnnnnnnnnnnnnnnnnnnnnnnnnnnnnnnnnnnnnnnnnnnnnnnnnnnnnnnnnnnnnnnnnnnnnnnnnnnnnnnnnnnnnnnnnnnnnnnnnnnnnnnnnnnnnnnnnnnnnnnnnnnnnnnnnnnnnnnnnnnnnnnnnnnnnnnnnnnnnnnnnnnnnnnnnnnnnnnnnnnnnnnnnnnnnnnnnnnnnnnnnnnnnnnnnnnnnnnnnnnnnnnnnnnnnnnnnnnnnnnnnnnnnnnnnnnnnnnnnnnnnnnnnnnnnnnnnnnnnnnnnnnnnnnnnnnnnnnnnnnnnnnnnnnnnnnnnnnnnnnnnnnnnnnnnnnnnnnnnnnnnnnnnnnnnnnnnnnnnnnnnnnnnnnnnnnnnnnnnnnnnnnnnnnnnnnnnnnnnnnnnnnnnnnnnnnnnnnnnnnnnnnnnnnnnnnnnnnnnnnnnnnnnnnnnnnnnnnnnnnnnnnnnnnnnnnnnnnnnnnnnnnnnnnnnnnnnnnnnnnnnnnnnnnnnnnnnnnnnnnnnnnnnnnnnnnnnnnnnnnnnnnnnnnnnnnnnnnnnnnnnnnnnnnnnnnnnnnnnnnnnnnnnnnnnnnnnnnnnnnnnnnnnnnnnnnnnnnnnnnnnnnnnnnnnnnnnnnnnnnnnnnnnnnnnnnnnnnnnnnnnnnnnnnnnnnnnnnnnnnnnnnnnnnnnnnnnnnnnnnnnnnnnnnnnnnnnnnnnnnnnnnnnnnnnnnnnnnnnnnnnnnnnnnnnnnnnnnnnnnnnnnnnnnnnnnnnnnnnnnnnnnnnnnnnnnnnnnnnnnnnnnnnnnnnnnnnnnnnnnnnnnnnnnnnnnnnnnnnnnnnnnnnnnnnnnnnnnnnnnnnnnnnnnnnnnnnnnnnnnnnnnnnnnnnnnnnnnnnnnnnnnnnnnnnnnnnnnnnnnnnnnnnnnnnnnnnnnnnnnnnnnnnnnnnnnnnnnnnnnnnnnnnnnnnnnnnnnnnnnnnnnnnnnnnnnnnnnnnnnnnnnnnnnnnnnnnnnnnnnnnnnnnnnnnnnnnnnnnnnnnnnnnnnnnnnnnnnnnnnnnnnnnnnnnnnnnnnnnnnnnnnnnnnnnnnnnnnnnnnnnnnnnnnnnnnnnnnnnnnnnnnnnnnnnnnnnnnnnnnnnnnnnnnnnnnnnnnnnnnnnnnnnnnnnnnnnnnnnnnnnnnnnnnnnnnnnnnnnnnnnnnnnnnnnnnnnnnnnnnnnnnnnnnnnnnnnnnnnnnnnnnnnnnnnnnnnnnnnnnnnnnnnnnnnnnnnnnnnnnnnnnnnnnnnnnnnnnnnnnnnnnnnnnnnnnnnnnnnnnnnnnnnnnnnnnnnnnnnnnnnnnnnnnnnnnnnnnnnnnnnnnnnnnnnnnnnnnnnnnnnnnnnnnnnnnnnnnnnnnnnnnnnnnnnnnnnnnnnnnnnnnnnnnnnnnnnnnnnnnnnnnnnnnnnnnnnnnnnnnnnnnnnnnnnnnnnnnnnnnnnnnnnnnnnnnnnnnnnnnnnnnnnnnnnnnnnnnnnnnnnnnnnnnnnnnnnnnnnnnnnnnnnnnnnnnnnnnnnnnnnnnnnnnnnnnnnnnnnnnnnnnnnnnnnnnnnnnnnnnnnnnnnnnnnnnnnnnnnnnnnnnnnnnnnnnnnnnnnnnnnnnnnnactgtttttgtggtttttttttttttttttttgaggacagagtctcaccctgttgcccaggctggagtgcagtggcttgatcttggctcacagcaacctccacctcccaggctcagaggattgtcccacctcagcctcctgagtagctgggattacaggtgcccgccaccacacctggctttttttttttttttttaattttcagtagagatggggtttcaccatgttggccaggctggtcttgaagtcctgacctcaggtgatctgcctgcctcggcctcccaaagtgctgggattacaggtgtgagccacaatacccggcctattttttttgtattttttaatagggacagggtttcaccacgctggccaggctagtctcgaactcccgacctcaagtgagccacctgcctcgcctctcaaagtgctgggattacaggcgtgagccacaatacccggcctaatttttgtattttaatggagaccaaccatgttggtcaggttggtcttgaacttctgaccttaagtgagccacccgcctcggcctcccaaagtgctgggattacatgtgtgagccaccacacctggcctgggcattacctgatttctcacaattttttttttttttgaggcaaaggcctccctctgttgcccaggctggagtgcagtggtgtgatctcagctcactgtaacctctgcctcccgggttcaagcgatcctcctgcctgagcctcccaggtagctgggactatgggcatgcgccaccatgcccagctaatttttgtatttttagcagacacgaggtttcaccatgttggccaggctggtctccagctcctgagctcaggtggtctgcctgcgtcggcctctcaaagtcctgggattacaggcatgagccaccatgcccggccctgattttgcagaatttttatctttatgaggttgggcacggtggcttacgcttgtnnnnnnnnnnnnnnnnnnnnnnnnnnnnnnnnnnnnnnnnnnnnnnnnnnnnnnnnnnnnnnnnnnnnnnnnnnnnnnnnnnnnnnnnnnnnnnnnnnnnnnnnnnnnnnnnnnnnnnnnnnnnnnnnnnnnnnnnnnnnnnnnnnnnnnnnnnnnnnnnnnnnnnnnnnnnnnnnnnnnnnnnnnnnnnnnccagcctgggcaacccaacaagactctgtctcaaaaaaaaaaaaaaaaaaaaaagaatttttatatttatgaatggtaggtaagtggtaaaagtggttgaaatcttctattattgaatgattgacatttaggggctgacttgctaatgcatggtggttcttttcacatctcaggatgggatcttaaaccctcacgctgcctcttgcacctgtgctgcctgctgcgacgacatgaccttagtaagtggccagcgtgtctggaacaggatgacttggtggggctgggggcggctgagtgggtcccacagcccttggcctctcggctgtttccctcctgccctctgccttggagagagacactgtcctcacttctcctgggttgctctgttccctcctccctgatacgtcacagtgaatcctgatgtctcgatggggaacacrtggttggcccccaagatgttgctcaaagaacatttgtggaaaccttaaataatgaaaagcggttataatgtcaccgccttaactctaaaactaaacatacacgcttttccttgtatgcatgccattttatattcctcattttgtaacatgtcagaaaaatgctactgtaaacttattcatgtgtagagcttttaacgcctttttgacrtatttccttattctaaattcttaactgcttcacaaagacccaaaataatttttctttctttttttttttctgagacgaagtctcattctgtcgcccacactggggtgcagtggcgcggtctcggctcactgcaacctccgcctcctggattcaagcacttctcctgcctcagcttcccgcgtagctgggattacaggcatgtgccacaatgcccrgctaatttttgtatttttagtagagatggggttttgccatgttggtcaggctggtctcaaactcctgaccacatgtgatccgcccgcctcagcctcccaaagtgttgagattacaggcgtgagccactgcacctcaaaaaaaaaaaaaaagagcatggagagacctaccgtgttcttggggtgaaacactaaacatcctagaattgtgtagttgatatatagatttcatgtgattctagtggaaaaaacaattttgtgaacgtaaaataattttgaagttgattgggaaaagccagtcggtgagactcttagagacgctgcaggagtaaaggagccgggaggagacgtcggtcccattggcagttgagcctgcaggtagatcatttgcaggggctccaacactgaagtacttagatgtcagtctaggaaatcatgtacagggtttgtacgtggaagatactaaagaaaatgctgaagagagagaccagggaagattgaaatacgtcaaaagaygtcctgcgcccgtggattagaagactcagtaaagatgcgactttttcccaagttgattcgtaggtttaacacaatgactatcaaaatcccagcaggattctttttagatgcagacaagctgattctaaaatttgcatagaaaggtaaaggaaataaaaaagccaaaacagttttgaaacaaaaaagccaaaacagttttgaaataaaagtttaaaatgggtggaatcacattgcggggtcttaagacttacgggctcgtgacagtaatcaagatagtgtggcactggcagagggagagaccccacgatctgggtcaggctagagtgtcatagtagactccagcaaatggccttggagygacaggacgttcatcagcagagacaaaggatgacctaaacttcacacttggtacaaaaatgaattcaaaatgggtcatcgatctaaagtgaaaggtgaaactataacatttttaggagaaaacacattggaaaatcttcctgacctggagttagaactaggatttcttggattggacttcatcaaattttagaacttttggcttccgcttggggagtggtggtgtgatgagctcagtggaccaactctccagagaaataactagtgaaaattgtgaaaaaataaccccttaaggtctccagaaattgtcctaggggagtacagcaaataaacatccaagaaaatgtagtaagtcttggaaagggcagtgaggattgtgacrtttgagctacgaccagctccttccctccctttctgcccccagctccctrtggtggaggctccattgtgggtggttgtgaccaagaaaacggttcccactccttgcagttcccggtcaagggatatggtatctcactgggaggggcaggccaccagcatttctcaaccccttcagctctaagttgcagtaaattcctgggaagtgtgactgaaaatctcttcagtcakccccactcagagggcagaggctttacccaggcatgggaggccaagcatacggagccccaatttccatcaacccacattgcccatagggtggggtgtccatgcagtgagaggctgctgccccccacacagaacccggctaatgcaacagaattccctctgatagactcaggcactgttcctgcctctaggtctatagtaggggctcagacattcagcccaaaagagagagaggccgtaagaacagagagctccaaagcccctcccaaaggaactgacttgatttgaaacagtatggggatgttcaagcctaaaagtgccctggaaaagaatggacattttgatggtaagcagttaagaggaggccagcagttccattagagcaagaaactaaactgtaggtcagcaggtttaccagagaggcgaggaaagccacagcgaagaacccatctgggaaaccgaccttcaagatcgaacctctcagtaaagaagccctaatttaattggctcagacagtggagcagtgtgtgccccagggcattgttgaaagtaatggagcaggcagctggcagttagttgattctgacacttgactacaccaacagcttaacagagatcaggaagagcgacagccaaaactcccaccaccaaaggtgattgcaccccacccagggccgagccctcagaggagcagcagccgaggccgccccaggagaacaggctcagtaagatagtccagctccrtacctgagtaataaacaagctgacagcagcaaggatcccagagaaaggagaactgctttccactgttgctacaatgtatcacctgcggtgtctgattcttaacaaaagatgataagacatgcaaggagccttggaccatacacaggaagaaagcaggcaacagaaattgcctggagaggtccggatgttggggttaacaggaaaaagctttaaaatggctatcctcagtatgttcagaggactgaaggaaaccacagctagagattgcatggaaggtctgaagacactgtctcctcactggagaatgtcaatgaagagatataaattatttaaaaaaaaaagtcggccgggcgtggtggctcacgcctgtaatcctagcactttgggaggccgaggtgggcagatcacgaggtcaggagaacgagaccatcctggctaccatggtgaaaccccgtctctactaaaaatacaaaaaactagccaggcttggtggcgggcgcctgtagtcccagctactcgggaggttgaggcaggagaatggcatgaacccgggaggcagagcttgcagtgagcccagattgtgccactgcactccagcctgggcaacagagcgagactctgtctcaaaaaaaaaaaaaaagaaagaaagaaaattagccgggtgtggtgacacatgcctgtaatcccagctactcaggagactaacgcagaatcacttgaacctgggaggcggaggttgcagtaagccaagatggcgccactgcactccagcgtgggcagctagagtgaaactccgtctcaaaaaagaaaaagaggtgggatctttaggggcgcttaccatcttaatgtggtctcaccatgtgactcacacaccccgcggtgcccccacttaaggaggagttgcaagcgcagcatagcttttgcacacatgaaggtggtggcctctctcctttctcccccagagtggcccagtsaggctttttgtgccttacaaaaggcgcaagaaggagaatgaactgcccacaactcccgtgaagaaggactcccccaagaacatcacattgcttccagccaccgcggctaccacctgtgagtttgagaaaacacagctctagtttactgaggggacctgagtgcattgccttctctcgtcaccactcccacggccactgcgggattctcactyctaaagcacattgcgtggccagagggattccaacgccatcacactcctttgcagtgcgtcccccgggtgggaaggggtgtcccagtgcccagctcggtcttgcttccctgggacccggacactgttggccttgtcctgggctgtttcctagtatgagtgagcatggctgagtgcccagcacacgctcaggggacgtttcctgacaagggcgtccttggkgagggattctcagtgcgctggacgagggctgcggagagctctgtgggtctttctctgtggccgggctggagggcggcgtcaggatcccggctcgctgcagcctcggcctcccaggctcaggcactgctctcacctcagcctcccaagtagctgggaccacaggcacgtgccaccatgcccagctaatgtttttatttttttgtacagacaggatttaaatggggagaggtagcaatagragaaaatgtctttgtaataggcttttgttaactaagtctgggtttttgcatttatagagtaaggtctttctaaaacaccctgtcagctccttcctgaggccctgggtggtgggtgcaggaagagtcccacagcagcagagtctcaagatctgtcgccaggatttttttttgagctggagaggcagccttgctgtgggacacagggcagccttgctgtgggacacggctgctttttaccttcagcttggattaaagattttttcttaattcgaaccacgaagtacttaaaaatcactgaaagttttattttatgtttgttttctggctgggcagcacatttccatggttcacagtttaaacagcgaacaattggtagtggcaagttgccatcctggccatcctggtcatcctggttttctcctgtgaggtcttctccaaggtctgggatttcccccgtgtccttcacatgggagggtacagttaccactgcccgcccttcagyccaggcccccacaaggattggcgcccgtgggtggcacgggacctgtgtgccgtgggcgccactgcctggccgcgtgaaatgtgcttctgcctttccagtcaccgtgaccccctcgggacagatcacgacctcgggggcactgacctttgaccgagcgtccacggtagaggccactgctgtcatatcagagagtccggcccagggcgacgtcttcgcaggggccacaggtgagctgctccagtgcctgcctgacgcgtcctcagcatatccctgtctgtgacatcacatccccgacgccacattgggctgcataggctgctgggtgcctcgagaggggccttgaaccaggcgtttgttggtggggacagcgtgtgagccacgtcaggtgggcggtgcagtgtggatggggttggcgtgyggyagtgggttacttgtgacagatgccagaactggcaaarctgaaaatactctctgtctgccggctcctgcttttgactgcagttgtgcaacagaaatgcagcctagctggttgtgtgctggagaatattctagaagccacactgaggaaaatagagttagaactgattttttttttttttgaggtggagtctcgctccatcccccaggctggagggcagtggcatgatctcggctcattgcaagctccgcctcccgggttcacaccgttctcctgcctcagcctcccaagtagctgggactacagcgcctgccaccatgcccggctaatttttttttggtatttttagtagagacagcgtttcaccatgttagccaggatggtctctatcycctgacctcgtgatgcgcccatcttggcctcccaaagtgctgggattacaggcgtgagccaccgcgcccggcctgatttttataatctattttatttcacctgatatagccccaatcctattatgtcaacaattcaggatcaccacatttcaggggctcagtagccacgtgtggccataagctactatgtgtactgaatggcgcagccatacagcgtgatatttagagtctgctgtgcggacaaccatcccgagcctccctgtcctttttctccccaacagtccaagaggccagcgtgcagcccccatgcagggccagccaccctgagcctcactaccccggctatcaggacagctgccagatcgcaccgtttccagaagctgcgttgccaacgtcacatcccaaaataggtaggtttgaaagaattcacacatgtacaggttattgtcctcagaattgcttccaatgaaagaattcctaagtgaaatgggattcattttggtttggtttgttgtttttgttgatgcattagatcagtggctrgtaaagtgtggcccactgcctatgtttgtaaataaagttttactgacacacagccacgtccattcatgtgtgtgctgtggaagttgcttttggtacagcagcagggcacgcccctagaaaccagttggcctgtgaagcctgaagttctttctggtgagtttgctgttgtcctcttgagggtagacactccccagtggcaggtcttggtctctccagagctggcatagacattcggtatctggtgaaagaaagaaaaaccaaggcctaaatgtggcctaaatctttaaaatgacgatacactgtaaatgcattctaactttgatttttcgtttaactgcacttctatttttttgagactgagtctcgctctattgcccaggctggggtgcagtggcgcaatcttggctcactgcaacctctgcctggttcaagtgattctcctgcctcagcctcccaggtagctgggattacagatctcgaactcctgacctcaagtgatccatccgcctcagcctcccaaagtgctgggattacaggtgtgagccaccacatgcagccaagatttctgtataattatacgttttttgtttttttttttttgagacagagtgtcactctgtcgcccaggctggagtgcagtggtgcgatctcggctcactgcaacctctgcctgccaggtttaagcaattctcctgcctcagcctcctgagtagctgggactacaggtgcacgccaccatgcccagctaatttttttttgttattgtatttttagtagagatggggtttcaccgtgttggccaggatggtcttgatctcttgaccttgtgatctgcctgctttggcctcccaaagtgcttggattacaggcgtgtggctcacctgtttaatcccagcactttaggaggctgaggccaggagtttgagaccggcctgggcaacataaggagaccccatctctattaactggaaaaaaaaaaaaaagtgtggggtgggtgttggtgaagtatttataccaagaaatcagcaaatgcttgaaatcagagctttttctccaggagggctggggttcgcatcgaccgcttgcccctggtacaaggtgtgcatgtggctcctggatctctgtccccaggtgcccttggtgggcagaagtcagaaatgttctcatgtgcacgtgtgcgtgtttgtgctccaaatctgtgtgtgttgaaaaccatgagtttgccccagtgtctctagttccagtgcagaacctcagggtttgtgctagttcctttgtaactttcttctccaattgtaagaaaccccgctgggcgtggtggctcacgccggtaatcccagcrctttgggaggccgaggcgggtggatcacctgaggtcaggagtccgagaccagcctgaccaacgtggagaaaccccatctctactaaaaatacaaaattasccaggcctggtggcagatgcctgtaatcccagctactcgggaggctgaggcaggcgaatcacttgaacccgggagggcagtgagccaagatgatgccaccgccctccagcctgggcgacacagcgagactctgatttagccacttccctcccctggtcattgtccacggcgctgattctgcgaacatttcagggtccagcagccgcattcagatgagttgtacaacatggagctgggtgggtggagcaggaagggatgggacatcctcctgcctgtgttgcctgctggggggatgtcaggctgagtgctcggggatgtcaggtgcttggggatgtcaggtgctggggggatgtcgggtgctgggggtgtcgggtgctggggggatgtcaggctgcgtgctgggggatgtcaggtgctggggggatgtcaggtgctgggggtatcgggtgctgggggatgtcaggctgagtgctgggggatgtcaggtgcttggggatgtcagatgctggggggatgtcaggtgctgggggtgtcgggtgctgggggatgtcagatgctggggggtgtcaggtgctgggggggatgtcgggtgctggggggtgtcggatgctgggggttgtcgggtgctggggggtgtcgggtgctggggggtgtcgggtgccggggggtgccaggtgccccgggggatgtcgggtgccgggggatgtcaggctgcgtgctgggggatgtcaggtgctggggggtgtcaggtgctggggggatgtcaggcagtgatttgttgtttgctggtcagttttttacccgacttcccaacattgcgtgagagttttcttttcttttcttttttgagatggagtctcactctgtcacccaggcttgagtccactggcaccatctcggctcaccacaacttctgcctcccaggttcaaatgattctcatgcctcagcctcccaggtagctgggattatagacgcttccacgcctagctaatttttgtattttttggtagaaatggggtttcaccatgttgaccaggctagcctcgaactcctgacctcaagggatctgcccgcctcggcctcccaaagtgctgggattacaggtgtgagccactgtgcctggcctcttttctttttgagacagggtctcattaagtcaccaaggccgaaggacggtggcgcagtcatggctcactgtagcctcgaccacctgggctcaaaccatcctcccgcctcagcttcctgagtagctgggatcacaggtgaatgtcaccatgcccagctagttctttgtttttgatttctgttttgtagagrcaaggtcctgctatgttgcccaggctggtcttgaactcctgagctcaagtgatcctcccacctcagtctcccaaagtgcagggattacaggcatgagccactgcaccgggtgatgagaatttttatttattttttatttttaaattttatttgtttatttttttgagatggagtctcactctgttgcccaggctggagtgcagtggtgccatctctgttcactgcaagctctgcctcccggcttcacacctttctcctgcctcagcctcccgaggtagctgggactacaggcgtctaccaccacgtccagctaattttttgtattttttttagccaattttttgtatttttttgtatttttttaaacacagtgaaacgcggggtttcactgttagccaggatggtctcgatctcctgacctcatgatccgcctgccttggcctcccaaagtgctgggattacaggcgtgagccaccgcgcccggctgagaatttttaacggaggccattttgaagctaggagatgtattaatttcttggtttgttttgctttccaaatgctctagtgttgacatccctgcctgcgctggcggtcccacccccgactcccaccaaagcggcacctcccgcgttggtcaatgggctggagctgtcagagccgcggagctggctgtrcctagaagagatggtcaactccttgctcaacacagcrcagcagctgaagacgctgtttgagcaagccaagcatgccagcacctaccgagaagctgccacaaaccaggccaagatccacgctgaygcagagcggaaggaggtaaccttggaacaaatgggaagacacgacctgtgcygagtaaccccaggccaccctggtgcctgtgcccagctgcgyaagmcccaccttggctcacaaggcccctgccccacctttctggaaaagggagctgtggagagtcatttacaaatgaagcttttcctaaagaaaagtgacagctattgttgttaaggtggttttggtttttgtaaataaggttgctttgtttcagaaagggaaacaattttgtgcgcatcggccgttgtgaatactcacsttttctaggcattattcatcctttgtcttcctgtagtgaaatgtgcttatattttatgaagtttggagaacatcatctattgagtctctgagtatcagcgactggcagggcgaatgctgagccccttcctgggagccgagctccgtccatctgctgtcacaaagmcctcccagcttctggcacgttcttcagaaggcggctcctgtgcatggtgggaggctcacagggcgtagtgcccatgttttctgtagcttcctattactgcagcacaagcaaaaggtcacttaggccccttcggcctcttttcatatggagtctctacttcatatgaaccctttacttagattgaagactttgaggtaatataaaggttcaggtgggtgacatgaatagggtagatagaaattactagagccagagtaaactggagagagggtggaggtttctcagctacttctcatagcccaaacccagcagacaggtaccgtgtgtcacagggcacggggacgagaaggtgagagaggagggcgcctgtctgctcagcacagatggggagctctgaaggccacaggaaaggacagggatggattttgttgtagctgctttttcgggtacggtaacrtggactttggtttgtaaacaaaagtcaaattcatatttttcccaccaaatctatgtaagaaacgttttcccccatttcttttctactttctatttttatttttatttgtggaacaggctgtcactctgtcgcccaggctagaatgcagtggcacaatctcggctcactgcaacctttgcctcccgggctccagcgattcttgtgcctcagcctcccaagtagctgggactacaggcacccaccaccacacctggctaattttctgtatttttggtagagacggggttttaccatgttgcccaggctgatctcacactcctgagctcaggtgatccacccgcctcagcctcttaaagtactgggattgcagatgtgagccaccatgcccagcttctactttttatagaagaactttttatttatgtatttattttattatcattatttttttttcagctgctgctttattttactttattttattttttgagacggagtctcgctccatcacccaggctggagtgcagtggcacgatcttggctaactgcaacctccacttcctgggatcaagcaattatcctgcctcagcctcccaagtagctgggactacaggcgcctgctgccatgcctggctaatttttgtatttttagtacagacagggtttcaccatgttggccaggctggtcttaaactcctgaccycaagtgatctacccrcctgagcgtcttaaagtgctgggattatacgtatttatttatttatctatttaaaaaaaatttttttttttgagacggagtcttgctgtgtcgctcaggctggagtgcaatggcacaatctcagctcactgcagcttcctcctcccgggttcaagtgattctcctgcctcagcctccggaatagctgggattacaggcatgtgctaccacacctggctgattttttgtatttttagtagagacggggtttcactatgttagccaggctggtctcgaacccctgacctcaggtgattcacccacctcagtctcccaaagtgctgggattacaggcatgagccaccttgcccggcctatttattttttaatttttaaatttttctgtcattcagtgcacatcaggtacttgttatagattctactagacaagcacataacgaacagtgattatcatcccaggccgtattcaatgttaggggtttgttacggattctactagacaagcacataatgaacggtgattctcaacccaggccgtattcaatgttaggggtttgttacggattctactagacaagcacataatgaacrgtgattctcaacccaggtcgtattcgatgttaggggtttgttacggattctactagacaagcacataatgaacagtgattctcaacccaggtcgtattcgatgttaggggtttgttacggattctaccagacaagcacataacaaacagtgattctcatcccaggccgtattctatgttaggggtttgtgtagtttccccaggacctgtagtggtgattgtccagaagccttccataggaggaatgcatggtcattaggtatgccacagctccaaacaccagcaacaccactcaatgactattgaggtaatgacagtgacactgcagctccacatggctggggaggtctcaccatcatggcagatggcaaagcgggaggaaaggcatgtcttaatggtgacaggygrgcagaagagctttttagattcttaattttttaaatgactgatcaatatgtgattagkgttttttgtgttttttttttttttttttttttttttaagaggtaaggtctcactctgttgcctaggctcatggctcattgtaggctcaaactcctggaaatacgggtgcatgccaccacgcttgcctaatttatttttttattttttattttttgtagagactgggtcttgccgtgttgcccaaggtggtctcaaactccctgggctcaagnnnnnnnnnnnnnnnnnnnntgtttctactcctgaagacaaagataattttaaaatactttttcactgggcacagtggatcacacttgtaatctcagtgctttgagaggctgaggtgggaggatcttttgagcccaggagtttgagaccagcttggacaacatggtgaaaccccgtctctacaaaaaaatataaaaattagctgggtgtggtggtgggcacctgtagtctcagctacttaggaggctgaggcaggagactcacttgaacccaggaggcagaggttgcagtgagctgagatcgggccactgcactccagtctggcgacagagcaagactctgtctcaaaaaacaaaaagtccaggcgcggtggctcacgcctgtaatcccagcactttgggaggccgaggcgggcggatcacgaggtcaggagatcgagaccatcctggctaacatggtgaaaccccatctctactaaaaatacaaaaaattagccgggcgtggtggcgggcgcctgtagtcccagctccttgggaggctgaggcaggagaatggcgtgaacccgggaggtggagattgcagtgagccgagatcgcgccttccagnnnnnnnnnnnnnnnnnnnnnnnnnnnnnnnnnnnnnnnnnnnnnnnnnnnnnnnnnnnnnnnnnnnnnnnnnnnnnnnnnnnnnnnnnnnnnnnnnnnnnnnnnnnnnnnnnnnnnnnnnnnnnnnnnnnnnnnnnnnnnnnnnnnnnnnnnnnnnnnnnnnnnnnnnnnnnnnnnnnnnnnnnnnnnnnnnnnnnnnnnnnnnnnnnnnnnnnnnnnnnnnnnnnnnnnnnnnnnnnnnnnnnnnnnnnnnnnnnnnnnnnnnnnnnnnnnnnnnnnacaaaaaaacaaaaagaaaaaagaaattaaaaaggaaaaaaataaagaaaaagatatatatatattttgagatggtcttgctgtgtcacccaggctagagtgcagtggtgtgatctcggctcactgcagcctccatctcccaggttcaagcgattcttgtgcctcagcttcccagatagctgggattacaggtatgtgcaaccacgcccagctattttttggtattttaggagagaagaggtttcgccatgttggcgaggctggtcttaaactccaggcctcaagtgwtctacttgccttggcctcccaaagtgttgggattacaggtgtgagccaccgcacctggccaaaaaaatactttaaaaaaaaaaaaaaaagtatacttccaaacaaacagctacttaatgctgaaatttatagaggaaaagaaagtttaaaggcaaaaaaatctataaccctgcacccaaagataatgaccgtgaacacttactgtgtgtccttttggtcttttttggtaattgaggtaaactgtatgtacagcaaagtgcctcaatctccaccataaaatgtagtgagttttgatgaatgcatgaacctggtcatgagaccatttcaatccctgcagaagcaccactcatgtccccttccatcggtcccctgccccatggacagtcactgctctcattttttttttttcttttctcttttgaggcagcatctcactctgtcactcaggctggagtgcagtggcatgatcttggttcactgcagccttgcgccaccatgcctggctaatttttgtattttttgtaaagatggggtttctttttttttttttttttttgagacagtctcacactgtcacccaggctggagtacactgatgcaatctcggctcactgtagccttcgcctcccaggtttaagtgattctcctgcctcagcctcccgaatagctgggattacaggcacatgccaccatgcccagctaatttttgtgttttaagtagagacgaggtttcaccatgtttgtcaggctggtcttgaactcctgacctcaggtgatcctcctgcctcagcctcccaaagtgctgggattacaggcatgagccaccgcacctggcctcttttttttttgagacaagtttcgctcttgttgcccaggctggaatccaatggcacaatctcggctcgccataacctccacctcccaggttcaagagagtctcctgcttcagcctctcaagtagctgagattacaggcatgcgccaccacgcccagctaattttgtattttcagtagagacagggtttcaccatttaggtcaggctggtcttgagctcctgacctcaggtgatctgcccacctcggcctcccaaagtgctgagatgacaggtgtgaggtactgcacccagttgattttctagatttcctaccacaactgatttctaattcaactccaatatgcttagaaaatatactctgatttcagttcttttaaattgattacgatttatttcggccaggcatggtgactcacacctgtaatcccagcactttgggaggccaaggtcttgaggccaggagtttgagacaagcctggacattgtgagaccctgtctgtacaaaaaaaaaaaaaaaagggtcgggtgcagtggcttacgcctgtaatcccagcactttgggaggccgaggcgggcagatcacaaggtcaggaggtcgagaccatcctggctaacacagtaaaaccccgtctctactaaaaatacaaaacattagccaggcatggtggcaggcrcctatagtcccagctgctcaggaggctgaggcaggagaatggcatgaatccaggaggcagagcttgcagtgagccgagattgcaccactgcagtccagcctgggctacagagcgagactctgtctaaaaaaaaacaaaaaactttttttttaaagggtttcactttgtcacccaggctggagtacagaggtgtgacctcggctcactgcagcctcaagttcccaggctcaagcaatcctcttgcctcagccccccaagtagctgggactatgggcatgtgccaccatgcttggctaatttttgtatttttcatagagagagggtctcactgtgttgccaggctgatctcaaactcctgagctcaagccatccacccacctcagcttcccaaagtgctgggattacaggcatgaaccactgtgcccggccaaaatgtttccttcattagccggatcactggagcccaggggtagaggttgcagcgagctgtgatcacgccactgtgctccagcctgggcaacagaatgagaccctgtctcaaaaaaacaaaaagatgtgttttatgatcatgtatatacttttcgtggtgaatattgcatatacacttgaaaagagttttattcagtcattggttttcgttttctgtaatgtcattaggtcaaggtggttcatagtgtggtccaaatcttgtttttcttcaacctaaagatgtactttcagcttttcttttcatataggtctgttggccatgaattctctgtttttgtctgtaatgtccctctttcacctttatttttgagggacgtttttgagtgacatggaattctgggttgtcacttacatatatatatttttttgagacagagtctcgctcttgttttccaggctggagtgcagtggcacaatctccgctcactgcaacctccatttcccaggtttaagcaattctcctgcctcagcctcctgagtagctgggactatcggcgtgcgccaccacacccagctaatttttgtatttttggtagagacggggtttcgccatgttgctcaggctggtgttgaactcctgggctcaagtgatccacccgcctgggcctcccaaagtgctgggattacaggcatgagctaacacgccggcctatttatttatttattattttttgagacaaagtctcactctgtcaccaggctggagtgcagtgatgccatctcggttcgctgcaacctccgactccctggttcaagcgattctcctgcctcagcctcctgagtagctggaattacaggcacacaccaccatgcccagctaattttttgtatttttttattagagacagggttttgccatgttggccagaccggtcttgaacacctgaccgacctcaggtgattcacctgcctcggcctcccaaagtgctgggattataggcatgacctacctgggttgtcactttttatcattcaccagtttaaagatgtctttccatcatcttctggccagcctgcctacctgccttccttccttccttccttcctttcctcttttcctccttccctccttccctccctccctccctctctccttccttccttccttcctccctccctccctccatccctcccttccttccttcttttttctttcttttttgagacagggtcactgtctgtcaccgaggctaagaagcagtgttgtggtcacatctcaatgcagccttgagttcctgggctcaggtgatcttcccttagcctccagagtagctaggactaccggcactggccactactcccggccaatttttagctggggtttcaccatgatgcccaggctggccgcaaactccttggctcaagcgatcctcttacctcagccttmtgagtagctgggactacacatgtgtaccaccatgcccagctatttttttgtttgttttgtatagatggggtttcactatgtttctcaggctggtcttgaactcctggactcaagcaacccaccttccttggcctcctaaagtactgggattaccagcatgaaccactgctcctggctataactatttctttttttcytttttttttttttttttttttttggagacagagtcttgctctccaggctagagtgcagtgacacgatctcagctcactgcaagctctacctcccaggttcaagcgatctcttgcctcagccttccaagtagatgggactacaagtgtgcaccaccacacctggctaatactttgttgttttgttttgttttgagacggagtcttgctctgtcgcccagggttggagtgcagtggcacgatctcagctcactgcaacctctgcctcccgggttcaagtgattctcctgcctcagcctcccgagtagctgggactacaggtgcatgccaccactcctggctaattttctgtatttttggtagagaggaggtttcaccatgttagccaggatgttcacaatctcctaacctcgtgatctgcccgcctgggattacaggtgtgagccaccgtgcccagcctcaggatctgcttcttttggctactttttcccttcatcatggatcctgttatcccttcttcacacgtccagtacttcctgattgtgtgttggaattttagtttatatactgtttatatggtagagtttatatggtagagactctgaattttgttggattctgttgtcttcccctgaagagtgttgggctttgttctcgcaggctgaattcttatggatcaccctgaagaggatcagtgttgatgctgttagggcaggtctgtctggctttttcttctgcctgacacatccttagtcttggatctgcgaagctgtggttttctggatgttcctgggaagtccgtggtgtttttaagcctctaacttgtgaaggttcaaactccagactttcaggtggtgagcagcagccgcagtctctgctcagtgttctcggtcttcagccgtccatttctgctgagtcttccccacatgctgtgtcatcagctcagggtcaaacaaggacgtggggagcgtttatgtgctggatgggagtgtcctctctctgtgcttgctcctttctagggtttctcccctcattttccagccactttgtcagctctggccagggtgactgcagcctgctaccacggtgtggccgcccatgtctggtggcctggggctgcctccaggagaagccttcctggctccatctccctgctacgtcacctgtccctgctatgtcacctggctgcctctctcccctgctcatttggcagccagagtgtctgatgctgctgcgtcagctgggtccctgccctgaaaggctgggctttgaattttattagtaattttatgtatttctatgagagaaatgtggcatgaaatccctttatccttaaaatcccgtttggtagacagccaagccttttaaaacgttagaaagggcggcccctttctcagctggaagcagctgttgcagtgaacatcccgtgcatctgaaaatgtcaggagttagaagaaatgtcaggaagtgttagaagcgatgtgttccctttctctaaagctgtgtatcggacgccctgtcctcctcctctcggtgtgaatagctgagccaggactcagagtgaccgagtgtgacgccctgtcctcctcctctcggtgtgaatagctgagccaggactcagagtgaccgagtgtgacgccctgtcctcctcctctcggtgtgaatagctgagccaggactcagagtgaccgagtgtgacgccctgtcctcctcctctcggtgtgaatagctgagccaggactcagagtgaccgagtgtgacgccctgtcctcctcctctcggtgtgaatagctgagccaggactcagagtgaccgagtgtgacgccctgtcctcctcctctcggtgtgaatagctgagccaggactcagagtgaccgagtgtgacgccctgtcctcctcctctcggtgtgaatagctgagccaggactcagagtgaccgagtgtgacgccctgtcctcctcctctcggtgtgaatagctgagccaggactcagagtgaccgagtgtgacgccctgtcctcctcctctcggtgtgaatagctggagtcaggacttagaggctccgaatgtgataccgtttctgtcttcctcctctcagtgccatggcttggggtggatactgcttcacactccttcagggtggcccagacacagtaggtttcattttcctttttttttttcttttctctggtggctacaaaagtgaactttttttcttttttttctttttctttttttcttgagacagagtttcgctcttgttgcccaggctggagtgcaatggcgtgatctcggctcaccgcaacctctgcctcctgggttcaagggattcttctgcctcagcctcctgagtagctgggaatacaggcatgtgccaccacgcctggctaatttttgtatttttagtagagatggggtttcttcatgttggtcaggctggtcttgaactcccagcctcacgtgatccgcccacctcagcctcccaaagagctgggattataggcgggagccatggcactcggccctattttgtccgttttcttgagacatcttaaatgaacatatagcttcaggaagccatggtagcagacaggaccacagtgctttccgtgatgtggccgtctcctagagtccagcagaccggaccttcgcaagaaaaactgctgaggagatggagaaggaaaggccaaaagcctggtattcactccagaggcagtcgctgaggagatggaggaagggtcaaaagcctgatattcacttcagaggcagtcgctgaggagttggaggaggaaaggccaaaagcctgatttatcagtccagaggcagtcgctgaggagatggaggaggaaaggccaaaagcttcgtattcattccacaggcagttgctgaggcgatttgaggaggaaaggccaaaagcctggtattcacaccagaggcagttgctgaggagatggaggaggaaaggccaaaagcctggtattgactccagaggcagtcttttgttgttgttgttgagtctcactctgtcacccaggctggagtgcagtggcagaatctcggctcactgcaacctccgcctcccgggtgcaagcgattgtcctgcttcagtctcccragtggctggaattacaggcacgcgccaccacgtctggctaatttttgtatttttagttgagatggagtttcgccgttattagccaggctggttttgaactcctgcgttcaggtgatccaccctccttggcctcccaaagtgctgggattacagacgtaagccaccrtgctcaactaggttttgtgttttttatagagacagcatcttgttktgttgccgaggctggtcctgaacacgtggtctcaagatattcgcccagtcagcctcccagagtgctgggactctaggcgtgagcccctgcttctggcccccaggccagtagtaaaaagccaaatatcatccctttcagagcatcaggacagcggttgtgctcagggaggctgggaatgggcatcgtgccctctgggggtgcggcagggtcagttggctggaggatattcatggtgctgctgccccctgctgccgtgctgagggctgacatggtgaacagtcatgggcacttgcagacgtggttgtgcccagtgctgtgtgcatgcagccgttccagcaaaggtggtggtcacttggaccattgtggtgccatcatggtacagcacccaggcaggagcaaggccgttgtgttctggtgagatgatggttctgaattagatgtggagatttctttgagatcagctccacaggtatcttacgagggctcgggggtgaggctcagaagtcctacaaggaggggcctcaacctgtgtcccttcacctgcagcaacagcaacgcggagcaacctccaggagcctggggggcgcctgggctgggcgggagtcggaggtcggcgaggggaggaaggtggtcgcatgttggcgtcctcctgccctgtaggaagtactgaatggttccccacaacagtaggatgaaaatgagtttctgttccctgatcccacgccactgcagaatgggaggaaggctttatgccggggtgtccaatcttttctcttccctgggccacactgcaagaagaggaattgggccacacattaaaaatctcataatttttttttgttttatgagacggaatcttgctctgttgcccaggctggagtgcagtggcgcgatctcagctcaccacacacaacctctgcctcccgggatcaagcgattctcttgcttcagcctctcgagtagctgggattacaggtgcgcactactgcgcccagctagtttttgtattttgccatgttggccaggctggtcttgaactcctgacctcaggtgatccgcccacctcggcctctcaaagtgttgggattataggcatgagccaccgcgcccggcccataatgttttaagaaagtttacgaatgtgtgttgggcctcatgcaaagccatcctgggctgcatgcagcccgcgggctgtgggttggacaagcttgctttgtgccattaaattgttatttgtaattagtgctggaaagtcagggtttgagaggcagacactgctgtctctgaatggaaaggtccacgtgtgggaatgaggaagccttgctcatgagcaccctgacagagcacccatgcctccagcagtgggagggcaggcgtgacgctgccgattccacattgtatctggaatgtttgttttggagatggagtttcgctcttgttgcccaggctggagtgcagtggtgcgatctcagctcactgcaacctgtgcctcccaggttcaagcgattcttctgcctcagcctcccgagtagctggggttacaggcgcttgccaccacgcctggctaatttttgtatttttagtagacgcggtatttcaccatgttggccaggctggtgttgaacccctgacctccggtgatccacctgtctcggccttccaaagtgctgggattacaggcatgagcctcggtgcctggccttttatctggaatttaaaaaaaaaaaaaatcaaatgtagcccagctgaagctattaaggggattgttgccagctttaaccatgggaaatctgcattcgtgtgtatgtaatgagctctgcagagattcaacaaggcagaaaagcagatgcccttggctgtcaagggcrcagtgtccagtggaagccagccgagtggctgcagggtcttggactcactgccctggccccggcttgttgttggccatgctgccctgagcgcaaaccccattcctctagcctgtccccgtttctagtagctcgctctcaggctttctccagtctccctaacttccttttaaagtgttaaatatagtacagcacagaagggtatgaaagggagaagaatacgtaagttggacagtaacaatgtccttgactcctaggaagctcagaaataggtctgtgctgtgcctggatggtgcctccgtgcctggggatctggaagggtggagacagaccccagagcagccgcttccctgcgggggcctctcccaacaccgtaaggccgcgggtgcctcaagcagcgccgagaggggcttgtgtttcagtgacatttccttgaagtccaggtatggggtttctgtaaatgaaggcttttgcctgccttgttctccagtgtcagcctaacactcacgtgagccaaataggcccggccagacccaagacagctcagtcacctgttccgcatcaaacatcagattccagagccggactggaccaacgtcctgccgtggcccagtgagcgagggttgctggcgtctttgggatactcgggagcagcccgccatccccrtgtccccagggaactcttcagagcaccccccagcagcgtggaagcccccggaaatgcaggcttggagtcccccgagggagccrggggtgttgtggtgggaggggcggccaggtgcccgggacggggtgaggcggcgccggmggggcagcctgggaaaagcacagaggtggctttgcagtcccacttcagggggaccctgcctgacctgggatgaggtgtgtgggctttctggggcaggggcggggacaggttgtaaatctgaatttgtctgatgcttcctcagagatctgtatcatggtcatttcatagaaacggcaaactctgtcccagctcaaaaagatgctattagactaatcctttgatctctttacgtgtgcggctcagctttcagataaacctgcttgatgttttgagggttttctcttatttccgttgcttcctcgagggagagtaatccagtctaatttgcatttctcttacttttaagctgagctgctgcgccctcacgggacacagtcatggggagccctctgccccatggtgggcattggtgaagccacagtggtcccgggggcagacctcaagggtgcacagcagcagccccttgggccctgcctgcccaagccccacctggccccacctgccctgtgttggggactttgtatttcagcctccatgcagggtgacgctgggactccccagcttccggttcacggcttcagggtccagcaggttctcctgaagccccatctaccgctggcttcctgctcactctcccctctcccgctctgtctctccagaggaggccgggcctgtggaattaggcggctgcttcacctgaannnnnnnnnnnnnnnnnnnnnnnnnnnnnnnnnnnnnnnnnnnnnnnnnnnnnnnnnnnnnnnnnnnnnnnnnnnnnnnnnnnnnnnnnnnnnnnnnnnnnnnnnnnnnnnnnnnnnnnnnnnnnnnnnnnnnnnnnnnnnnnnnnnnnnnnnnnnnnnnnnnnnnnnnnnnnnnnnnnnnnnnnnnnnnnnnnnnnnnnnnnnnnnnnnnnnnnnnnnnnnnnnnnnnnnnnnnnnnnnnnnnnnnnnnnnnnnnnnnnnnnnnnnnnnnnnnnnnnnnnnnnnnnnnnnnnnnnnnnnnnnnnnnnnnnnnnnnnnnnnnnnnnnnnnnnnnnnnnnnnnnnnnnnnnnnnnnnnnnnnnnnnnnnnnnnnnnnnnnnnnnnnnnnnnnnnnnnnnnnnnnnnnnnnnnnnnnnnnnnnnnnnnnnnnnnnnnnnnnnnctccaatcacctggcccctgaagcaggcggaggcccctgtgcacagtgggcctgtggccccatttggttcaggagtgatggtgacacggagttggctccatccgaggctcctggcagcattacatcctctaagaataagtcataaagaaagcactccttgtaagatacacgatccaccaggctgcctccaaccacagcctcatctccatccggggtgtgtctaggttttcttttttattattattttttatcatttgagacatgttctccctctgtcacccaggctggagtgcactggtgtgacctcagctcactgcaacctccacctcccaggctcaagcaatcctcccacctcagcctctctggtagctaagaggtgcatrccaccatgcccagctaattttttttttttttttttttgtagagacagggttttgccatgtcacctaggctggccttaaactcttgggctcaagcgatgctcccgcctcggcctcccaaagtgctgggattacaggtgtagccaccatgcctggccagtatctaggttttcaagttagacttagttttatttgcagaaagaataatgaatacattattaacttattctttgatagttagaaattaataggcattttatatgtgatcttatggtcttactcttggttggctgtttctgaaggagtggctttgttatctgtaatttgtctaatttaaaaatcaattataatgaaaccagcatatgtgattcacaaggcttttttccacctggaccagagtacaccagctattgcattgccaaaagtaggtgtgttcctgttgtgtgatgtgcagatggggggcccctgcagcagggaaggcaggccaggaaaccccttcgcagtctctgctgaggggctggacccgctgcttgggcgggactccccgcagggtgctctgctgcagtctcctcctctgcccgcctgcggcccagagaactctgaatgctaatggcaatgccagctgcttggcagcatgagcttcttggggcgcctgggcaggcctgggcacttctgccctttgtgccatccgcagtcctgtgatttcctgacagtttcctgaaagcgcagaatgggacttgtcgatgtccttggcygcrgaaacgcggtgtcttgtcctaaccttctgcaacgcacacacacctcttccgcagtaatgaatggttttttgtttttgtttttgagacagagtctagctctgtcacccaggctggagtgcagtggcgcgttctcggctcactgcaagctccacctcctgggttcatgccattctcctgccttagcctcgcgagtagccgggagtacaggcacccgccaacacgcctggctaatttttttgtatttttagtagagacagggtttcaccgtgttagccaggatggtctcgatctcctgacctcgtgatccgcctgcctcagcctcccaaagtgctgggattacaggcgtgagccaccgtgcccggctaatgaatggttattttaaaaaataaacgtatttcgggataattttaggtttacagaaaagttgcaaagtgagcgcagagggtnnnnnnnnnnnnnnnnnnnnnnnnnnnnnnnnnnnnnnnnnnnnnnnnnnnnnnnnnnttgcaaagtgagcgcagagggtcccttttgccactccgcagcctcccctctgtaacttcaaaagcccacagggcatggctgttgtagctgagaaaccgtcgctgggtgtccctgtgaactccggactttgaatttcactatcaatgtcctgtttctgctctaggaccttgtccccgctgccacctgtgggagacagcctcccgtgcaccatttgcccagcaccctcaggcctgtgacggtctctcagtctttccttgtcttccatgccctgcagttctgagagggcctggccaggcagtttgtccaggtgccccgatccaggcttgtcttgtgctttctcgtgggggtggacgacaggtttcagggaggggtgcygccgcctgtctcaccccactgtggcgtccctgacatccaagtgacattacagacagctctgaccttcctcaccagagtcaggtgtctgtaggtgtctccttggtgacaggactgcttctccctttgcacatttagtcaggcagcaagtccacggccgtgggggggcttctcctagacgggaggatctggaatagcttggacttgtatttatttatttgatcatttgtttgtatccggatgggctcattttatatgtgttttaaactctgagctagaaggcaacactactttcttgtgaagcacaccatctgtccttggccctagggagctcctgccgtcggctcctgggtcccctgatgcacccctttcaacagacttttcattttggggtacgtcctgacttcctggcactgcagggtgctccagcctcctcttgcattccctgccctggcccgggaatcagccccttctccaaggagccccgggtccttttattggcaagtcttaagagagtgaggcctgggtgccaggcagggagccccaggtccttttattgggaagtcttagagagtgaggcctgggtgccaggtgggtgccaggtgggtccggtgctgctgggatgttgtcacgtggaggccctcagctgcagagcagggacgagggtgtcacctgttcagctgcagagcagggatgagggtgtcacctgtgtgtatgaacatctccgcagccacttctgtatctgtgaagagaacatgagttcatgctactgcctttgactctaattcagaccccaaagctccttctaaccttcctagaacgttatttttcagtttaaaaaaaaaaaaaagttttgcaaagggcataccgtgaaaggcccaagtggttgaaagtcccagctgaggctgaagaggcgcctgcgaggcaacaggacaggcttcccgttcagttcaggggtgctgtcctccaggaactatgctggggggcaagtacaggacgtcctggtgtgtggtgcacagggactgctggacacggagacccgtgcccttctcagcgtgggggccgctccccgggacagtgaccacgctcccgccagcctcccaccccacctgacctctgtctgtgaggggctggaccagggtcctgcctggcccggccatccacagagcaacccagaatgttaataaagcctgcagaagctgtgttctccttcgagaagcttctctgtggttacagactttttaagaaatattttgtcggctgggcttggtggctcatgcctgtaatcccagcattttgggaggccaaggcaggcggatcacctgaggtcaggagtttccgagaccagcctggccaacagggcaaaaccccgtctctactaaaaatacaaaaattagccaggcatggtggcaagcgcctataatcccagctacttgagaggctaaggtggaagcattgctcgaatctggaaggtggtggttgcaatgagctgagatcgtgccactgcactccaggctgggcgacagagcgagactccatctcaaaaaaaaaaaaaaagtttgtcatttaaagtagaggcacaggccaggcgcggtggctcatgcctgtaatcccagcactttggggggccgactcaggtggatcatttgaggtcaggagctcgagaccagcctgaccaatatggtgaaaccccatctgtactaaaaatacaaaaaaattagccaggcgtggtggtccgtgcctgtagtcccagctgtggggaggctgaggcacaagaatcacttaaacccaggaggtggaggttgcagtgagccgagattgcgccactacactccagcctgggcgacagagtgagactccatctcaaaaaaataataatawataaataawgtagaggcagggggcaacctaaattagcaccaaaattcctcctaatgctcctgttttctgaagtgagtgactgaatgtcggagctctgaatgtcttacaactggaaaaatgttaaagatcacgtttgcgaaggagggaggcaagcatcagaacagaacctcggagcaggtctgcacgcgtgcaggggccgtggggccgcgctggagtcgtttcctgygctgctctgtgctgctcacagacgctgccactcacccactggccacggcccctcccgcagcgcctgcggatgatctgggcgcatagcgggcgtgcaggtcgcggcgccaaggcctctcctaggcccagtggtcttctccgtctcagagagcattgacggcggagctcacaactgtcaagcaccttagtcatgccgcaaacattaatcattgacagcatgttgacctatgcgctgattaaaaagaaaagctccaataatgtaattccaggagaaagtacacaaacctctggtggcatcttttcaatccaccacagaaaccagctcaggtggggccgtgggggtgttggctggggcaccgccgcagcagtttgggacacatgcctgccacggtgcgcccaggctgatgcccacagccctgctcaggagtgttgggagcggtggactcctgagtttgattttctgtgctggcctggctggagtgaagctccttggagtttggagaaagatttccatgctgatttccctttgtttttgtttgtttgtttgtttgtttgttttggagacagtcttgctctgtcgcccaggctggagtgcaatggtacaatctcggggtttcaccgtgttagccaggatggtctcgatctcctaacttcgtgatccgcccacctcagcctcctaaagtgctgggattacaggcatgagccactgcatccggccctgatttccctttttttttgagatgggagtctcgctctgtcacccaggctggagtgcagtagtgcaatctcggttcactgcaacctccgcctcctgggtgcaagctattctcccacctcagcctcccaggtagctgggattacaggtggccaccaccacacccagctaatttttgtatttttagtagagactgggtttcgcaacgttgcctgtgctgaactcctgacctcaggtgatccacccgcctcggctgcccaaagtcctgggattacaggtatgagccgctgctcccggcccatactggtcttccagtgaatgaatgtagggggcaaactgcactgaggccaggaaagagctgattctggaggtgacaagaacgttctgagcagcactggggcagaggcgcagtcaagagtccaatgggagctgggcgcagtggctcacgcctgtaatcccagcactttgggaggccgaggcaggtggatcacgaggtcagaggttcaagaccagnnnnnnnnnnnnnnnnnnnnnnnnnnnnnnnnnnnnnnncaggaggcggaagttgcagtgagctgagatcgcaccacggcactccagcctgggcgacagagtgagactccatctcaaaaaaaaaaaaaaaaaaaaaaagggggtccaatggggggaacttggggcctcctgcctgcacctgcctctgtccccggtgtctcaggggctctccacggccacgtcactgactggcctgttgtgtccttcttgcagcagtcctgcgttaactgcggccgggaggctatgagcgagtgcaccggctgccacaaggtcaactactgctccaccttctgccaacgcaaggtaggtctcacctacaccaggctcagtgcccccgcctcctccctcgctacgaagacccctgggtggccctccctccccttgtgctcctggtgccacacctgactcccctccctgtccctccctctgggaatccggggctcctgcctggctccgtgaagaccctgcagaaggctcacatgtgacatggccaggtagtgctctcatgtgaggccccacagttggtggccggaaaccctgagggctgctggtcagtgcttcccagccctccacacccctgcacagccacgcaagagagactgtccacagttccattattgagccctccacacccctgcagagccacgtgagagagactgtccacagttcctctattattcagccctccacacccctgcagagccacgcaagagagactgtccacagttcctctattattgagccctccacacccctgcagagccacgcgagagagactgtccacagttcttctattattgagccctccacacccctgcagagccacgcgagagagactgtccacagttcctctattattgagccctccacacccctgcagagccacgcgagagagagcgtccacagttcctctattattgagccctccacacccctgcagagccacgcgagagagagactgtccacagttcctctattattgagccctccacacccctgcagagccacgcgagagacagcgtccacagttcctctattattcagccctccgctccacagaaattcaagagaaattttgtaggctacaaacggtagttcaggattgtataactttgtctaccataatcagagtactcgggagcatttagtcactcttttttttttttttttttttttttttgagacagagtctcattctgtcacccaggctggagtgcagtggtgcgatcttggctcgctgcaannnnnnnnnnnnnnnnnnnnnnnnnnnnnnnnnnnnnnnnnnnnnnnnnnnnnnnnnnnnnnnnnnnnnnnnnnnnnnnnnnnnnnnnnnnnnnnnnnnnnnnnnnnnnnnnnnnnnnnnnnnnnnnnnnnnnnnnnnnnnnnnnnnnnnnnnnnnnnnnnnnnnnnnnnnnnnnnnnnnnnnnnnnnnnnnnnnnnnnnnnnnnnnnnnnnnnnnnnnnnnnnnnnnnnnnnnnnnnnnnnnnnnnnnnnnnnnnnnnnnnnnnnnnnnnnnnnnnnnnnnnnnnnnnnnnnnnnnnnnnnnnnnnnnnnnnnnnnnnnnnnnnnnnnnnnnnnnnnnnnnnnnnnnnnnnnnnnnnnnnnnnnnnnnnnnnnnnnnnnnnnnnnnnnnnnnnnnnnnnnnnnnnnnnnnnnnnnnnnnnnnnnnnnnnnnnnnnnnnnnnnnnnnnnnnnnnnnnnnnnnnnnnnnnnnnnnnnnnnnnnnnnnnnnnnnnnnnnnnnnnnnnnnnnnnnnnnnnnnnnnnnnnnnnnnnnnnnnnnnnnnnnnnnnnnnnnnnnnnnnnnnnnnnnnnnnnnnnnnnnnnnnnnnnnnnnnnnnnnnnnnnnnnnnnnnnnnnnnnnnnnnnnnnnnnnnnnnnnnnnnnnnnnnnnnnnnnnnnnnnnnnnnnnnnnnnnnnnnnnnnnnnnnnnnnnnnnnnnnnnnnnnnnnnnnnnnnnnnnnnnnnnnnnnnnnnnnnnnnnnnnnnnnnnnnnnnnnnnnnnnnnnnnnnnnnnnnnnnnnnnnnnnnnnnnnnnnnnnnnnnnnnnnnnnnnnnnnnnnnnnnnnnnnnnnnnnnnnnnnnnnnnnnnnnnnnnnnnnnnnnnnnnnnnnnnnnnnnnnnnnnnnnnnnnnnnnnnnnnnnnnnnnnnnnnnnnnnnnnnnnnnnnnnnnnnnnnnnnnnnnnnnnnnnnnnnnnnnnnnnnnnnnnnnnnnnnnnnnnnnnnnnnnnnnnnnnnnnnnnnnnnnnnnnnnnnnnnnnnnnnnnnnnnnnnnnnnnnnnnnnnnnnnnnnnnnnnnnnnnnnnnnnnnnnnnnnnnnnnnnnnnnnnnnnnnnnnnnnnnnnnnnnnnnnnnnnnnnnnnnnnnnnnnnnnnnnnnnnnnnnnnnnnnnnnnnnnnnnnnnnnnnnnnnnnnnnnnnnnnnnnnnnnnnnnnnnnnnnnnnnnnnnnnnnnnnnnnnnnnnnnnnnnnnnnnnnnnnnnnnnnnnnnnnnnnnnnnnnnnnnnnnnnnnnnnnnnnnnnnnnnnnnnnnnnnnnnnnnnnnnnnnnnnnnnnnnnnnnnnnnnnnnnnnnnnnnnnnnnnnnnnnnnnnnnnnnnnnnnnnnnnnnnnnnnnnnnnnnnnnnnnnnnnnnnnnnnnnnnnnnnnnnnnnnnnnnnnnnnnnnnnnnnnnnnnnnnnnnnnnnnnnnnnnnnnnnnnnnnnnnnnnnnnnnnnnnnnnnnnnnnnnnnnnnnnnnnnnnnnnnnnnnnnnnnnnnnnnnnnnnnnnnnnnnnnnnnnnnnnnnnnnnnnnnnnnnnnnnnnnnnnnnnnnnnnnnnnnnnnnnnnnnnnnnnnnnnnnnnnnnnnnnnnnnnnnnnnnnnnnnnnnnnnnnnnnnnnnnnnnnnnnnnnnnnnnnnnnnnnnnnnnnnnnnnnnnnnnnnnnnnnnnnnnnnnnnnnnnnnnnnnnnnnnnnnnnnnnnnnnnnnnnnnnnnnnnnnnnnnnnnnnnnnnnnnnnnnnnnnnnnnnnnnnnnnnnnnnnnnnnnnnnnnnnnnnnnnnnnnnnnnnnnnnnnnnnnnnnnnnnnnnnnnnnnnnnnnnnnnnnnnnnnnnnnnnnnnnnnnnnnnnnnnnnnnnnnnnnnnnnnnnnnnnnnnnnnnnnnnnnnnnnnnnnnnnnnnnnnnnnnnnnnnnnnnnnnnnnnnnnnnnnnnnnnnnnnnnnnnnnnnnnnnnnnnnnnnnnnnnnnnnnnnnnnnnnnnnnnnnnnnnnnnnnnnnnnnnnnnnnnnnnnnnnnnnnnnnnnnnnnnnnnnnnnnnnnnnnnnnnnnnnnnnnnnnnnnnnnnnnnnnnnnnnnnnnnnnnnnnnnnnnnnnnnnnnnnnnnnnnnnnnnnnnnnnnnnnnnnnnnnnnnnnnnnnnnnnnnnnnnnnnnnnnnnnnnnnnnnnnnnnnnnnnnnnnnnnnnnnnnnnnnnnnnnnnnnnnnnnnnnnnnnnnnnnnnnnnnnnnnnnnnnnnnnnnnnnnnnnnnnnnnnnnnnnnnnnnnnnnnnnnnnnnnnnnnnnnnnnnnnnnnnnnnnnnnnnnnnnnnnnnnnnnnnnnnnnnnnnnnnnnnnnnnnnnnnnnnnnnnnnnnnnnnnnnnnnnnnnnnnnnnnnnnnnnnnnnnnnnnnnnnnnnnnnnnnnnnnnnnnnnnnnnnnnnnnnnnnnnnnnnnnnnnnnnnnnnnnnnnnnnnnnnnnnnnnnnnnnnnnnnnnnnnnnnnnnnnnnnnnnnnnnnnnnnnnnnnnnnnnnnnnnnnnnnnnnnnnnnnnnnnnnnnnnnnnnnnnnnnnnnnnnnnnnnnnnnnnnnnnnnnnnnnnnnnnnnnnnnnnnnnnnnnnnnnnnnnnnnnnnnnnnnnnnnnnnnnnnnnnnnnnnnnnnnnnnnnnnnnnnnnnnnnnnnnnnnnnnnnnnnnnnnnnnnnnnnnnnnnnnnnnnnnnnnnnnnnnnnnnnnnnnnnnnnnnnnnnnnnnnnnnnnnnnnnnnnnnnnnnnnnnnnnnnnnnnnnnnnnnnnnnnnnnnnnnnnnnnnnnnnnnnnnnnnnnnnnnnnnnnnnnnnnnnnnnnnnnnnnnnnnnnnnnnnnnnnnnnnnnnnnnnnnnnnnnnnnnnnnnnnnnnnnnnnnnnnnnnnnnnnnnnnnnnnnnnnnnnnnnnnnnnnnnnnnnnnnnnnnnnnnnnnnnnnnnnnnnnnnnnnnnnnnnnnnnnnnnnnnnnnnnnnnnnnnnnnnnnnnnnnnnnnnnnnnnnnnnnnnnnnnnnnnnnnnnnnnnnnnnnnnnnnnnnnnnnnnnnnnnnnnnnnnnnnnnnnnnnnnnnnnnnnnnnnnnnnnnnnnnnnnnnnnnnnnnnnnnnnnnnnnnnnnnnnnnnnnnnnnnnnnnnnnnnnnnnnnnnnnnnnnnnnnnnnnnnnnnnnnnnnnnnnnnnnnnnnnnnnnnnnnnnnnnnnnnnnnnnnnnnnnnnnnnnnnnnnnnnnnnnnnnnnnnnnnnnnnnnnnnnnnnnnnnnnnnnnnnnnnnnnnnnnnnnnnnnnnnnnnnnnnnnnnnnnnnnnnnnnnnnnnnnnnnnnnnnnnnnnnnnnnnnnnnnnnnnnnnnnnnnnnnnnnnnnnnnnnnnnnnnnnnnnnnnnnnnnnnnnnnnnnnnnnnnnnnnnnnnnnnnnnnnnnnnnnnnnnnnnnnnnnnnnnnnnnnnnnnnnnnnnnnnnnnnnnnnnnnnnnnnnnnnnnnnnnnnnnnnnnnnnnnnnnnnnnnnnnnnnnnnnnnnnnnnnnnnnnnnnnnnnnnnnnnnnnnnnnnnnnnnnnnnnnnnnnnnnnnnnnnnnnnnnnnnnnnnnnnnnnnnnnnnnnnnnnnnnnnnnnnnnnnnnnnnnnnnnnnnnnnnnnnnnnnnnnnnnnnnnnnnnnnnnnnnnnnnnnnnnnnnnnnnnnnnnnnnnnnnnnnnnnnnnnnnnnnnnnnnnnnnnnnnnnnnnnnnnnnnnnnnnnnnnnnnnnnnnnnnnnnnnnnnnnnnnnnnnnnnnnnnnnnnnnnnnnnnnnnnnnnnnnnnnnnnnnnnnnnnnnnnnnnnnnnnnnnnnnnnnnnnnnnnnnnnnnnnnnnnnnnnnnnnnnnnnnnnnnnnnnnnnnnnnnnnnnnnnnnnnnnnnnnnnnnnnnnnnnnnnnnnnnnnnnnnnnnnnnnnnnnnnnnnnnnnnnnnnnnnnnnnnnnnnnnnnnnnnnnnnnnnnnnnnnnnnnnnnnnnnnnnnnnnnnnnnnnnnnnnnnnnnnnnnnnnnnnnnnnnnnnnnnnnnnnnnnnnnnnnnnnnnnnnnnnnnnnnnnnnnnnnnnnnnnnnnnnnnnnnnnnnnnnnnnnnnnnnnnnnnnnnnnnnnnnnnnnnnnnnnnnnnnnnnnnnnnnnnnnnnnnnnnnnnnnnnnnnnnnnnnnnnnnnnnnnnnnnnnnnnnnnnnnnnnnnnnnnnnnnnnnnnnnnnnnnnnnnnnnnnnnnnnnnnnnnnnnnnnnnnnnnnnnnnnnnnnnnnnnnnnnnnnnnnnnnnnnnnnnnnnnnnnnnnnnnnnnnnnnnnnnnnnnnnnnnnnnnnnnnnnnnnnnnnnnnnnnnnnnnnnnnnnnnnnnnnnnnnnnnnnnnnnnnnnnnnnnnnnnnnnnnnnnnnnnnnnnnnnnnnnnnnnnnnnnnnnnnnnnnnnnnnnnnnnnnnnnnnnnnnnnnnnnnnnnnnnnnnnnnnnnnnnnnnnnnnnnnnnnnnnnnnnnnnnnnnnnnnnnnnnnnnnnnnnnnnnnnnnnnnnnnnnnnnnnnnnnnnnnnnnnnnnnnnnnnnnnnnnnnnnnnnnnnnnnnnnnnnnnnnnnnnnnnnnnnnnnnnnnnnnnnnnnnnnnnnnnnnnnnnnnnnnnnnnnnnnnnnnnnnnnnnnnnnnnnnnnnnnnnnnnnnnnnnnnnnnnnnnnnnnnnnnnnnnnnnnnnnnnnnnnnnnnnnnnnnnnnnnnnnnnnnnnnnnnnnnnnnnnnnnnnnnnnnnnnnnnnnnnnnnnnnnnnnnnnnnnnnnnnnnnnnnnnnnnnnnnnnnnnnnnnnnnnnnnnnnnnnnnnnnnnnnnnnnnnnnnnnnnnnnnnnnnnnnnnnnnnnnnnnnnnnnnnnnnnnnnnnnnnnnnnnnnnnnnnnnnnnnnnnnnnnnnnnnnnnnnnnnnnnnnnnnnnnnnnnnnnnnnnnnnnnnnnnnnnnnnnnnnnnnnnnnnnnnnnnnnnnnnnnnnnnnnnnnnnnnnnnnnnnnnnnnnnnnnnnnnnnnnnnnnnnnnnnnnnnnnnnnnnnnnnnnnnnnnnnnnnnnnnnnnnnnnnnnnnnnnnnnnnnnnnnnnnnnnnnnnnnnnnnnnnnnnnnnnnnnnnnnnnnnnnnnnnnnnnnnnnnnatacacgagtttatgcatgttatgaagccccaacaggtaatcccctgctcccagcaccgcctgggtcaagtccacccacctgctcccagcaccgcctgggtcaagtccacccacctgctcccagcaccgcctgggtcaagtccacccacctgctgccagcaccgcctgggtcaagtccacccacctgctcccagcaccgcctgggtcaagtccacccacctgctcccagcactgcctggattgagtcacctacgtgctgtggtggcaacacttttcttttaatccttaactttggaaaatgtgagacgtgcacatgagttggatcgcccaggagaggcccgtcgccctcacctgtatcagctgctttagcgcctgccctcctggcttgtccccctctctctttgggctgagggctgagcattttaaagcaagccccacgcatcattattttcatttgtgaggcctggatcactgtaagtcagatttggattgtgttttaattggatttttagtcactgtttttatttcattacttatttttggtttttatttgttcgtttgtttttggttttgtttctgtttttgagacagggtctggctctgtcacccaggctggagtgcagcggcgcgatcttggctcactgcaacctccacttcccaggttcaagcgattctcctgcctcagcctccctagtagctggggattacaggcacccgccaccacgtccggctaatttttgtatttttagcagagacggggtttcaccatgttgttcaggctggtcttgaactcctgacctcatgatctgcctgccttggcctcccaaagtgctgagattactggcatgagccaccgtacccagcctattttaggttttctatagacagggtctcgctttgtcacccaggctgcagtccagtggtgccatcacggctcactacagccttgatctcctggctcaagtgatcctcctgcctctgtctcccaagtagcttggaccacaggcatgagccaccacacccagctaattttaaaacatttttttttttatagagmtagggttttgctatgttgctcaggctggtctccaacccctgacctcaagtgacctcracctcccgaagtcattgtttttacagtctgtgatgttggcttttctcatttatttgtatcaggcactttcattgttagcttcttgtgaatttaaccatttttttccgtttttcaaaaactgaaacgctaacttctaattctggcttttcagataatgatttttttttcaaaagtgttttagcattatactgtaagaagcatcacattgatgtttaagatggaaaaatttgctttaaaaaagaactgagtagttctgattttaaaagtcaaccctgggcctttgcctctttgctggaagaacctgatggaagcttctgtagctcagagtcaacactgatgtgcgccctctctccctccatctgcacaggccccagggagtggctcaaacctgtagaccagagaaggaagcatctagaactcctgggggccttgtccgccgcccacatcctctcacggggggcagctcccatgaggggtgcaggcccctcaccccacacagagtctcggcaggaaccggaacccttcctggttgccccagagtggaggcccgggaggggcgggcggtgggtctgcacccgatgctgcagtttgctgatgtatgtgctttcatgctatgtagatttatagtctattaccaggtaattttaattttttttttttttttttttttgagacgtagtctcactctgtygcccgggctggagtgccgtggcacaatcttggcttactgcaacctctgcctcccaggttcaagtgattcttgtgcctcagcctcccaagtagctgagattgcaggtgcgcatgaccacaggcggctagtttttgtatttttagtagagatggggttttgccatgttgggcaggctggtctcgagctcctggcctcaggtgatctgcccacctcggcctcccaacatgatgggattacagccgtgaaccactgcgcccggcctaattttgctcttttattataatcagctggaattctgctctctagggaataactctgtcaccatttggaagcatttatttctgctctgtgtgtcatatacgtacctatcacgcccccgtgcacggagctgcctctgtctgacgaggccgtctcagcttcagcacctggcgcttcctctagagctctgctccattccgaggtgctcgacgtagcagggaggcagagcctggttctgtgtgctgacctcacaggagctgtggcttctcccaggcaccatcccccacctcctttctctgcagccacgggctggttccagtttgctttttcatctttgccattaaaaacagaactggggcggggcgcagtggctcacacctgtcatcccagcactttgggaggccraggcgggcagatcccctgaggtcaggagttcgagaccagcctgaccaacatggtgaaaccctgtctctactaaaaatgcaaaacattagccaggtgtggtggcgtgcacctgtaatcccagctgctagggaggctgaggcaagagaattgcttgaacccaggaggcagaggbggtgagccgagattgcgcgttacactccagcctgggaaacaagagcgaaactctgtcygaaaaacaacaaaaaaacccccacagaacttgatcgtaatttacatatgtaatatttacatatttaaatgtttttctgcatgtgtgatattttttgtttacatccctaacacaaaacaactggtttggagagtcttaccctggtttgttgtttgactttttttttttttttttttgatatggagttgttctgtcacccgggctggagtgcagtggcaccatctcggctccctgcaacctctgcctcccagggctgagcagttctcctgcctcagcttcccgagtagctgggattagaggtgcctgccaccatgcccagctaatttttgtatttttagtagatacggggtttcaccatgttggccaggctggtctcgaactcctgacctcaggggatccaccctcctgggcctcccaaagtgttgggattacaggcgtgagccaccgtgccctgcctgttgtttgccttttgatccaattcctcaaaccaagagagtgtggggaaggctgtattggagcagagcccaccagagtttgggcgcacgggggctggggagggcattctcagcacctccaggtgaggttacasagggctgcaccctctggggtctgccttggggaccctgcccagaccctgctccacccactgaccctgctgacatgggtgtgtcctcccttccaggactggaaggatcaccagcacatatgcggccagtcagcagstgtcaccgtccaggcagacgaagtccacgtggctgaaagcgtgatggagaaggtgaccgtgtgaggctccatcggccgccctgggagctggggcccctcgcactcctgtgaggcttttgcaggtcgaaggcccccctgaggactctggggggacgttgagaagaggggtgtgggaaggtaaagaaacttgctggacaagtcattaacasactttaagcgaatggtgccctgggaagygcactccccctgcccgggccccctgcccgctcgcggacagattttttatccytgggatcatgagcgtccggtcttgcccacagggcctgtgctgcgacgcacatacatacgtgttgtgtctgtcaataaagtgtaaataaggtctccctgccccacacggccggttgcagtgccagccctcgggggggggtttcctccccttcctcctactgcgcaggtgggaaaaccaagcccaccgcacctcyrgtgcacgggacagcgcggccaggccggagcctccggtgcacggggcagcgcggccgggctgaagccctggcgtctggtggctcgtgtagtccaggaggtcttcgttccttctgttccacgagaccctcgtggctgctgggaggtgcagcaggcctacggcccttcccgccaggtttcggggcacatggtgcctcctgtgccctggctgcttgagcragcccgacggtccagcacggcctgttcagtccacgtggacagcttggtggcctcggtccagggatccacacgcagagcctcatggcctcctggtctcccccttgtttctcatggccctggcgccaggtggaggagagagaaagggctgaagcctgtggggggcacaagggggcgtgtccagcgtgtttgggcactgggctgggcctgaacatgggacccccctgccctcctgaccgagagcgctgctggagcagcatcactcttgttctggaagcttctgccctcatggcctgtgttctctgcacacagaaggctccatggctgtggctgccttggggcgagaaagtacasactcagcaacagctcagcaggcacctggggtagggtggcagcgccaggaggaacctgcaccagtgattctgatgtttgcctctgaagcgctttctgcaccagctggagctgagcccgagaggtggccaaagcccccttggaaggggatgttcactgggccccgcagaggccccccgatattttcagtctctgggtttctcaggaccacctggtttattctggttttcttttttttttttctttgagacagagtctcactctgtcacccaggctggagtgtggtggcacaatgttggctcactgcaacttcgcctcccaggttcaagcgattcttctgcctcagcctcccgagtagctgggattataggtggccaccagcacacccagctagtttagggatttttagtagagacggggtttctccgtgttggccaggctggtctcgaactcctgtcctccggtgatccacccacctcgacctcccaaagtgctgggattacaggtgtgagccaccgccctggcctatttacttagtaaagtctctgcccagccaggccaagccctcactgatgtttcatcatcctgctcaggcgtgcccggtgctgcaccgttggtgctgccagtgagcagtggaggctggaaaaggtgtctgggctgctgcaggacgcgctccagatgctgcacctcaccccacctgcccctcaccccgcctgcccctcaccccgcctgcccctcaccccgcctgcccctcaccccgcctgcccctcaccccgcctggcccttcctctgaccattatcccgcctggcccttcctgtgcccctcaccccacctgccccttcctctgaccctcaccccgcctggcccttcctctgaccctcaccccgcctggcccttcctctgaccctcagcccgcctggcccttcctctgaccctcaccccgcctgtcccttcctgtgaccctcagcccgcctgnnnnnnnnnnnnnnnnnnnnaccctgtttctattttttaattaaataaacatataaataaacaaacatcttgttacttctaattttgtgtccttggctcttaagcattcccttagagacagaatgtggttggatcttaggttttaatctagtctgatagtctctgccttttttttttttttttttttttttttgagacggactgtcactctgtcccccaggctggaatgcagtggctccatctccactcactgcaacctccatctcctgggttcaagtgattctcatagctcagcctcccaagtagctgggattacaggctcctgccaccacactcagctaatttttgtatttttaatagagacgggtttcaccatgttggccaggctggtctcaaactcctgacctcaagagattcacccgcctcagcctcccaaagtggtgggattacaggtgtgaaccaccacactagtctctgccttttgattggagtgtttaatctacttttttgttttgtttttgtttttgttttttagacaatctcactctgtcgccaggctggagtgcaatggcacgatctcagcccactgcaacctcaacgtcccgggttcaagtgatttcccttcctcagcctcctgagtagctgggattataggcatgagccaccacgtccaactaatttttgtgtttttagtagagatggggtttctccgtgttggcaaggctggtctcgaactcctgacctcaggtgatccactcgcctcagcctcccaaagttctaagattacaggtgtgagccaccgcactggaactcggcctgttttgttttttgaattgagacagagtatcactttgttgcccaggctggagtgcactggcgtaatctcggctcactgcagcctccacctcctgggttyaagggattctcgtgcctcattctcccgagtaactgggactgcaggagtgtgccatcagacccggctaatttttgtacttttagtagacacagggtttcaccatgttggtcaggctggtcttgagctcctgacctcaagtgatccgcccgcctyggcctcccaaactgctgggattataggtgtgagccaccacacccagctgttttgtttttttttttaagtggggtctctctctgtcacccaggccagagtgcagtggcacaatctcagctcagtgcaacctccgcttcccgggttcaagcaatactcctccttcagcctcccaagtaactgggattacaggcacccgccaccatgcccgtttttgttgttgttgttgtgtgtgtgtgtgatggagtctcgcacggttgcccaggctagagtgcagtggcgcaatctcggctcactgcagcctctgcctcccgggttcaagcgattctcctgcctcagcctcccaagtagttgggattacaggcatgcaccaccatgccaggctaatttttgtatttttcgtagagagagggttttgccatgttggccaggctggtcttgaactcctgggctcaagtaaccctcccaccttggcctcccaaagtgctgggattataggcatgagccactgcgcaaaacctaatctcatgtttaatgtaattatcaatgtgagtggatttgtgtttatatttgcagtttatgtttcatgttttgctcctctgttctttcactgccttcttttctgttaaatgtgtattttctagttgtgttttctagtgtaccacttcaattcttttgttgaacatttttaaacagtatctttaaagttgttattttcttactgctataggtattacaatatacattttaatttatctcagtttcagtaggagkatagaatttcctcaagcagggaaagtgtactgcagaggctgagtgtatacattcctggcaaacactatttgggccccaatataagcacttactgagctcctttcacctacagaacgaacacatcccgttcttttaaaagctgccttccagccggacctccagcccaggacaccctgtcctcaagcctccctcagatcctgttctttaaaaagctgccttcannnnnnnnnnnnnnnnnnnngcccttcctgtgaccctcaccccgcctgtcccttcctgtgaccctcagcccgcctggcccttcctctgaccctcagcccgcctggcccttcctgtgaccctcaccctgcctgtcccttcctgtgaccctcagcccgcctggcccttcctctgaccctcagcccgcctggcccttcctctgaccctcagcccgcctggcccttcctttgaccctcaccccgcctggcccttcctgtgaccctcagcccgcctggcccttcctgtgaccctcaccccgcctggcccttcctgtgaccctcaccccgcctgtcccttcctgtgaccctcagcccgcctggcccttcctctgaccctcagcccgcctgtcccttcctgtgaccctcagcccgcctggcccttcctctgaccctcagcccgcctggcccttcctctgaccctcaccccgcctggcccttcctgtgaccctcaccccgcctggcccttcctgtgaccctcaccccgcctgtcccttcctgtgwccctcaccccgcctggcccttcctctgaccctcagcccgcctggcccttcctctgagactctacaatggcttttcatccaacccagcagggtctgccattgccgcaaggtggaggcatctcagaggccctgcttggccttgccctgtccaggcaggcgggccgtgggttgacctccatgagacagcagggctgggcctgctcctttgggttttaaccaacataaaggtggcaggcaattgaggacctgcacctcttaagaataatcccccaaagctgagaacaccagcatctctgcagagagcacagctgcaggaagtagctgaacccctgcctggtgggggaggcaccgtgggagccctctggcacagtgacccccgccagcagtgatgccacctggcttcctgcgccaggccctgcaggaatggagtgggggtattccctggaattgtgggggccacttactcttccccaactttccgtaaaacagaagccaagcaccacgcgtctgttgggatcccaggtttccacagctcctcctttccaagcctgggaggctgatggtcagaggtcgccctgccccagggctgtcagcacccccaggacccccagatgcatgtgcacctcccatggcctccagcgctgtcaggcacgtgtggggctgtgggtcctgggacaaagctggcgggagcccctccttcactctcacgggtgtctgagaggaatcsactgtgactcagtctgttccgggggtgactgggacaggctggtcctgggaagyaggtagtcggagaaggtgtcctggaggaggcagccgctgaggccatcacagaagtgcgtggtcaccagacgggacggggcagccgcactaaagtagtaattgggcttggtcctctctccacccaatactcgttttcttttcttttttgagacagggtctccgtcacccaggccggagtgcagtggcacgakctcggctcactgcagctttgactccctagctttaagggatcctcctgcctcagcctcccgagtagctgggattacaggcgtgaccaccacacccagcctgcactgagtattttagcaagctgaggttgtgcccaatgctgtagactgcacagcccacagtctgtcagtgttcagatgggagcctggcaccctgactggccaccctggctgcaaacgccgaatccccagcacaggaargttccagccagcacrattgggaggcggagggtcccccatttctcccacaacctgggcctgggagagagctggatccagtccagggtaggctgttcctgcatggagggccctgggagccgcccctcttcccccagggtcaggggctgcactggttgatggagccagggtgcagacaggcagcttgggtcgctctgcccagcccctggccccgctgccgcctccctgctcccaccccttggcccagccacattggtggacgctgggcagaggttggctgggcaccaggggtgactgagcacggagctccctccagggaagccacttggtggggccccacccatcaccacaggccccttgctgtggggcttgggkcatcctctggccagggactggcaggaagctaggctctggcctcaaggcagcttctaaaatgacaggttgggctcccctgccggggtctgctggggcagcatgagcctggagccccctgtgcctggttctcagaggtgggagttggcccgggcagggcctggcggctgacagccccccacccgcctctccccatttgtttcttcccatcggaactgggcttccccaggagacaccttgccctgctgggtgctgcttcctctcccctgcagagaggggaagctgggccccagcgctgcggaactgagtggctctcgggggccccttcccccctcaccctgagcaggcggccggcttggtggggtctgctctgtgggcttccttggcggggagaaagaggttaactggctggggggcctggggccactgaggcagaaacccctcttccccactccccatcagcccccaggagccttcacagctgagtttgggaaggaatttgtttaattaacgtacaaaagcgccctccccatctccttggtccctgaggcctggccatcaggccggggggcgtccgggggtgcccggctcagcagcaggcacgcagggccttgcggaagacgttgcggaactcggcgttgaagacagtgtagatgacggggttgagggcgctgttgacgtagcccagccaggtgacggcgctgaccagccgcgggggcacggagcaggcaggacacagcgcctgcgtgatgtgcaccacraagaagggcgtccagcacagcaggaaggcccctgggggcgccgagagccgcgttagcgccccscgcccagccggcctcgtacyccccccctcctctcctccccgcccctcaggacaggaacccaccgaccaccaccggcaggaccctcatggccttgcgctcccggccggtgatcttggcacgccgcctcctgcgggtctgcggtggagtctggggtgggagcgcggcggctctgacggcgtcggggggagcacagttggagccgcaggggtccggggggaggccgggcgcggggggcgcacagtcggggccrcaggggtcctgggggaggctgggcgcggsgggcgcacagtcggggccgcagggaccccggggaaggccgggcgcggggggcgcacagtcggggccgcaggggtcctgggggaggcggggcgcgggtggcgtgggggaaggcgggccagggccgctgggtcggcggggcgcgcggccgtgcagcttggcgcgacgtgccacctcccagcgctgcaggccgcggaacgtggcccagtagagcagcagcatgagcgggcagggtaggaagaaggagcacacggacgagtagmccacgtagtcgcggtcctccaggcggcacacggcggggtcgcggccgcgcacgtcgttgaggccgcacagtacgggcgccgccaccgccgcggacagcagccacgtggcgccgatgagcagcagctgccggcggctcccaccctgccggttgtagcgcagcggcacggccacggccacgaacctgcggggagcgccgagggggcgccggacagcgcacaggccgcggtgagggcggcgggcggggcgcgggggcgccggggcgcgggcggggagggcggcgcacctgtccacgctgatggcgcacaggttgaagatggaggcggtgcacagcatgacgtccatggccatgagggcgtcgcacaggcgggggctcagcagccacgcgccaccctggacctgcgcggcgacaccacaggccctgaggtttcccagccaccgcgggcccttgtgacccscccccactcttatgggtagttccagggctgaatacggagaagggggcccggctgtgagccagaggccagaggaccgggcagggaaacaccccttccccackcagatctccctttgttttgagttagggtctcgctgtgtcaccgcggctggagtgctgtggctccatcatggctcactgtagcctggaattcctgagctcaagcgatcctcccacctcagtctccagagtagctgggattacagccgcgcgccaccacccccggctgatttgtttttctttttgttttttgagacggagtttcgctcttgttgcccaggctgragtgcagtggtgagatctcaactcactgcaacctccgcctcccaggtttaagcgattctgccgcctcagctcccccgaatagctgggacaacagccgcagccaccacccccggctgatattttaaaattttttgtagagaccaggcctggtatgtttcccaggctggtctcaaactatcctcctgcctttgcctcccaaagtcctgggattacaggcgtgaatcacggcttctggccttggtctcccttttgttacaaacatgagaacggcctggggaattccctgggggcgggcctgatatcatcgggctcaaagggagcccctccccagcctggggtaggcagggtccccgctgggcctagaagcgaagctggctgctctgttggctaagttctctgtgggagactcgggcacgttaattcatttctgtttcttcatctgtaagacaagggtgatgatagtatccacatcataattgtcttgaagataaattataattaaaaatatgaagaccgtgcccagtgcccagcgtaggactccacgtggagtgactctctccaagggcaaaggagcaggcagcccctctaatccttcccgccgatttggggagattaggagcttaaacgtcgtcactgtgacgtctgcggctcgaaaggagcacaggtcacgcgtgtcccgtgctgctggtctctgccccagccgcctggattcactgtgtccatcaaggggaaacctcgagtccccctcccccacagtcggggacaccgcgtctccagctcagccctaagctgcttttctctggccgcagaggggctggcaccaaggccgacccactcgagggccagacctggtgtggagtgtgggctccatcccccaattccccctcaggcttccccccagggttctcagcaggggcctggtccccacacaccctcccctcccctgggttttgtccagcccaggtctcccctgcgagctgtgagcctccttctgggggtgtgccagcatctgcactaggtgtgtgtggtgggcagtggctgtggcagtgtgtgtgtgtgtgtcccacggcagccagggggctgagcctgcatctgcctgtctgtccagctggctgccctggaggtgaaatccagctacggaggggactgggcttgacaaagtcgcctgtttccggggtccctggatagaaggacgggcatctcctggataacagacgccaagacagacggggaaggagaagaggaacgagggtcgggggacagacagcgcagcgggtggaaggtcgcgaggtggcggcggtgggtgtatcgccgagggacaaggcgcagcgcccctgccgccgccccagctggaagctccgcaccagaaaggggccgggtcgcgccgggtcctccgtagggacagggacggggaaccgaggagcagrtgaggatgctcgtgcggccggacgcggctcacctcggagtagacgaagagcggcagcaccaggagagcgaggaggaggtcggcggccgccaggctcacgatgaaggagttggtgggcgtctgcagggcgcgctcggtggccacgctcacgcacacgagcgagttccccgcgagcaccgcgccgatgagcagcacgccccccaccagcgccgccgcgccctgcccagccagccccgcagatgcccccgcagatgcccccgcggccggcccgcgcccagccagcagcccgtccgcgtccgcggtgctgcggttccccatggcgcgcccgggcgggcgctgagcaccgcggacaacgccgggtcgcaagccggggagtccctcccctcgggcacgccccggccggaccctggtcccgcccccgacccgccccggctcaggggggcccccgcggcgctccaccgtgagcccagtatttgctcatcttggaattttgcgcagggagagacgggcacgtggacgaatgcggcggcccaaagagacgggaatgaagcgaggtggtggccacgggcaggccagcatcgcccggcgccgcgcggggtccgcgacccragaaaccgacaaggatggaggggcggccagaccaggccctgaagcgcgcgggcatcgacgccagcgccatccyacccggcccgtrcgtgcgtcccggccctcgggcgctcaccctagtccacctggtatctggcaaaacctccctcccaggcccgttccgccagacgcagaaagacctgagctcaggctctgcccgcctcccccgcggactcgcctcgacctcgtgcgcrccctccacgcccgctccccctgcccccgactccgcgcccgactcaaccgccgacgcctagctcatcccgccgccccccccmmgcagcctctggysctcagcccccgcgaccaccacggtcagccgcggccccacccgttgcacagttgatcctcgcgtggccgcctccgaaactgggcggacagctgagcggtcgaccccgctccctcctccattccctccggcccaagaccgtgagctaggtaggcgcccctctgaccctgggcagggggtcccgggaccggacagyaggttcggctcgcgaggaggccaggagaaagacacgacaggccggggtaggttccaaacgtgcagaagagaaagtgcttgcaaagcgcagcagagarttctatggactcttcaccaaagaggggtgacctgtgacctgagaggtattttctgtagtctgtcactaaggggcctagaagacactaaaagggggcaccactctgtgggaccccaggcggcgcacatcctgatgctctagtctgtttctgggaggcctggagtggaggggctgtgccaggaattgaggcccctgacctcraaggtctggaggacacgggctagacggaggcgctgacagggcgtgcgttaaagggagaaatgaggactctgagaaggagcaggcaccgtgagcctcacaggacaaggtcaccggggctgcgggggaagggcctgcaccagggacaggtgtgcacaggcatcaggtgcggccgcagccaggctcagtccctcttgtgcagatcagtctgctgcccttgtgaacccttgagcaaaagaagtcaccacaggagagaccaccagggacaggtgtgcacaggcatcaggtgcggccgcagccaggctcagtccctcttgtgcagatcagtctgctgcccttgtgaacccttgagcaaaagaagtcaccacaggagagactgggacagtggaagtttcttctctcccaggatggaaccggggagggtggccctggggtctccggctgggcgccaaacggcgagtccagcccagcctctggtcggcttagagttccttcaagtagcccccaagatgtctgcgaccaccaagagtgaaaaccaagctaggcggagaaaggatgtgtgcagcacacatctctgacacacagatccagaaacaatggaaacaatgagaaaagacagacaaccccaatttgktttttttttttttttttttttgagatggagtttcactcttatcacccaggctggagtgcagcagcacaatcttggctcactgcaacctccgtctcccgggttcaagcgattctcctgcctcagccttctgagtagctgggattataggcgcccgccaccacgcccggctaatttttttgtatttttagtagagacacggtttcatcatattggccaggctggtctcgaactcctgacctcaggtgatccacctgcctcagcttcctaaagtgctgggattacagctgtgagccactgcccccagcctccactaaacttctgttgtttatctgaaaatcaaatgtaactggatgtgatcacatcttactgcaatcatggctcactgcagcctcaatctcctgggctcaagtgatcctctggcctcagcctcctgtacaactgagactacagatgcgtggtgccacacccagctaattttcttattttttgtagagacggggtctcgccatgttagcccagccggtctcaaactcctgggctcaaatgatcctcccacttcagcctctcaaagtgctgtgattacaggcatgagccatacagccagcctaaacaatttttaatgaggacctccactcataccttacacattaaaaaattaactcaaatatgctgtcaggagaatcaaaagacacagaccaggaaacgacatttgcaaatggccacgtctggcaatgtttcttccattttagtgtagtaggacgtcgttgattttcctgatggctactcatgtttgaccacttttcccatgtgcctgttaactgtcagcatgccctcttctggaatgtgcctgttaaaaatctttgcttttgttaaaaattgggttgtctacgccaggcgcagtggctcacacctgtaatcccagcacgttgggaggccgaggcaggtggatcaccaggtcaggagttcaagaccagcctggccaacatagtgaaaccccatctctactaaaaatacaaataattggccaggcgtggtgactcacgcctgtaatcccagcactttgggaggccgaggcaggcagatcacagggtcaggagatcgagaccatcctggctaacacggtgaaaccctgtctctactaaaaaatacaaaaaaatcagccgggcgtggtggcgggcacctgtaatcccagctactgaggaggctgaggcaggagaatggcatgaacccgggaggcggagattgcagtgagccaagattgtgccactgcgctccagcctgggtgacagagcaagactccgtctcaaaaaaaaaaagccgggcgtggtggtgtgcacctgtaatcccagctgcttggcaggctgaggaaggagaatcacttgaacccaggaggcagaggttgcggtgagcggagatcacgtcattgcactctggcctgggaaacagagcaagactctgtgtcaaaaaataaataaataggctgggcgaggtggctcatgcctgtaatcccagcactttgggaggccgaggcaggcagatcacgaagtcaggaaatcgagaccatcctggctaacacagtgaaaccctgtctctactaaaaatacaaaaaattagccaggcgtggtggcgggcacctgtagtcccagctactcgggaggctgaggcaagggaatggcgtgaacccgggaggcagagcttgcagtgagccaagatcgcaccactgcactccagcgtgggcgacagagcgagactccgtctcaaaataaataaataaataaataaataaataaataaataaataataaattaaaattaaaaaagaaacaaattttttttaaaaattagcaatcatatatccagcaaatggcttgtatacaaaaaagattaataattctcaaaactcaacagtaatgatatcacaaaaagaaaattccaaatgagtatcctttatgaatatagatgcaaaagttctcgaaaaaatatgagcaaacacagtcccttttaaagtgctgcctgccagaaaagcagcattttttttttttttttgagatggagtctcactctgtcacccaggctggagtgcagtggtgtgatctcggctcaccacaacctctgcctcccgggttcacgctattctcctgcctcagcctcctgaacagctgggactacaggcacgtgccaccatgcccagctaattttggtatttttagtagagacagggtttcactctgttggccagactggtctcaaactcctgacctcatgatccgcccactttggcctcccaaagtgctggggttacaggcgtgagccagtgcctggccgaaaaacagcatttttaaaaggattatgtaccataacccagtgggatttatcccaggaatgcaagggtgaacgaacagacgaaattcaatgtcatacaccacattaacagaatgaagaaaaacccacgcgatcatcccaactgatgcagaaaaaaccatttcataaaattcaaaaccctttcatgataataagactcaataaactaggaatagaaacaaacttcatcaggccgggcgccgtgactcatgcctgtaatcccagcacttcggaaggccgaggcgggtggatcacttgagatcaggagttcaagaccagatgcccaacatgttgaaatcccatctccactaaaaatacaaaaattaaaattagctgggcatggtggcgcacgcctacagtcccagctactcaggaggctgagacacgagaattacgtgaatccaggaggtggaggctgcagtgagacgagatcgcaccactgcactccaccctgaatgacagagggggactgtctcaaacaaacaaacaaaatacaaacacagctaacatcatactcaatggtgagaaacaaaaagcctttgaaagagacaaggatgcccactgctgctgcttctgttcaacattgttctggacattctagcaagagcattactcaagaaaaagaaattaaaggtatccaaaattggaaaagaaaactatttctacttgcagatgacatggtcttatgtatagaagatcctccacaacaggccaggcttggtggctcaagcctgtaatcccagcactttgggaggctgaggcgggcggatctcaaggtcaggagatcgagaccatcctggctaacatggtgaaaccccgtctctactaaaattacaaaaaattagccgggcgtggtggcgggcacctgtagtcccagctactcaggaggctgaggcaggagaatggcgtgaccctgggaggcggggcttgcagtgagccaagatcgtgccactgcactccagcctgggcaacagaccaagactctgtctcaaaaaaaaaaaaaaaagaaagacaccccatctctactaaaaatacaaacattagctgggtgtggtggcgtgagcctatagtcacagctttttgggaatctgaggtgggaggatcctttgagtccaggaggttgaggccgcagtgagctgtgattgagccaacrtattccaagctgggcaacaaagtgagaccctgtctcaaaataaaataaataatgaaaatgagtaaaggacttgaatagacatttcttcaaagragatacccaaatggccgggttcagtggctcacgcctgtaatcccagcactttgggaggccgaggcaggcggatcccttgaggtcaggagttcgagaacagtctggccaacatggtgaaaccccgtctctactacaaatacaaaaattagctgggtatgctggcgggcgcccataatcccagctacttgggaggcggaggtgggacaatcgcttgatcccgggaggcagaggttacagtgagccaagaacacgccactgcactccagcctgggcaacagtgcgagactctgtcttaaaaaaaatatggctgggcacggtgcctcacatctgtaatcccagcactttgggaggccgaggtgggcggatcatgaggtcaggagatggagaccatcctggctaacatggtgaaaccccgtctttactaaaaatacaaaaaaattagccaggcatggtggcgggcacctgtagtcccagctactcaggaggctgaggcaggagaatcgcctgaacctgggaggtggaggttgcaatgagccgagatcgcaccattgcactccagtctgggtgacagagcgagactccgtccccaaaacaaacaaacaaacaaaaaatatacatatgtcacacacaaatggccacaaagcacttgaaaagatgctcaacctcattagtcactggggaaatgcaaatcaaaaccacagtaagataccattccatatccattaggatggccatggtagtaaataaataaataaataaataaaaataccaagtgttaaggatgaggagacattcactgcttttgggaatataaaatggtcactgtgagaagaagtccagcagttcctcaacaagtttcacgtagagttgccatatgactcagtgggtatgttacatacccaaaagaagtgaagacaggtgttcaaataaaagcttgtatgtaaatgttcacagcggcactattcacaatatacaaaaggggccgggcatggtggctcacgcctgtaatctcagcactttgggagaccgaggtgggcagattgcttgaggccagaagttcaagaccagcctggccaacatggtgaaaccccatctccactgaaaatacacaaagtactggccgggcacagtggctcatgcctgtaaccctagcactttgggaggccgaggcgggtggatcacctgagacctggagttggagaccagcctggccaacagggttaaaccccgtctctactaaaaatacaaaaattagccgggcgtggcaggtgcctgtaatcccagctacttgggaggctgaggcaggagaatagcttgaacccgggaggcggaggttgcagtgagctgagatcaggtcagtgcactccagcctgggtgacagagtgagagtccgtctctaaagtaaataaataaataaatattttttaaaaatacaaaaattagggggtgtggtggtgcatgcctgtagtcccactacttaggaggctgaggcaggggaatcacttaaacctggtaggcggaggttgcagtgagcggagatcatatactgcactccagcctgggcaacagaacgagattctgtctcaagcagacaaacaaacacaatatatacaaggtagaaataaaccaaacgtcctcagcaggtgaatggatgaaccaaatgcagtgtgatttttccattaaaatgaatgaaattctggggccaggcgcggtggctcctgcgtgtaatcccagcactttgggaggctgaggcgggcggatcacctgaggtcaggagttcaagaccagcctgaccaatatggcaaaaccctgcctccatgaaaagtacacaattagcygggcatggtggtgctgtaatcccagcaactccagaggctgaggcaggagaattgcttgaacccagaaggcggaagttgcagtgggccaagatcgtgccattgcactccagtctgggcaacaagagtgaaactccatctcaaaacaaataaataaaaataaagaaataaataaaaatagtgaccagggtcttgctatgtttcccaggctggtctcgaactcctggcctcaaaccatcctcctgcctcaccgtctcaagtagccgagaccacaggcatgtaccaccatgcccagcttttaggattttattggtatgaaatacccagaacaggcagatccacagagacagaaagtaaattcattgttactcaggagctgaagggatgggggaaggggaggtaaatgctttatggatttgagattttccatctggggagtaaaaagttctggaactaaacagcggtgctggttgtataattccgtgaccgtactaagtatcacttcatactttaaaatggctaaaatggtaagtttcatgttatgcatgttttcccacaataaaaaaaaaaacaaaactcagcagtagagaacaatttaaaaacgggcaagagatgtgaagatacatttaacccacgacaacatgcaaatggaaacaagcacctggaaagaggttcggaatcacccgccactggggaaatgcaactaagaccacaaggaggtgttgccgcagagagaatggctgaaggttaaaaatagcgactgcagggatgttgacagtgtgcagagaaagtgaggccgggcgctgtggctcacgcctgtaatcccagtgctttggaaggccgaggcaggtggatcacttgaggtcaggagtttcagaccagcctgggcaacatggtgaaaccctgtctctactaaaaatataaaaattagccagtcatagtggcaggcacctgtaatcccagctacttggagggccgaggcacaagaactgcttgaaaccgggaggcggaggttgcagtgagctgagatggccccacggcactccagcctgggtgacagaacgagactccctctgaaaaagaaagaaaggaaggaaagaaaggaagaaaggaagaagaaaggaagaaaggaagaaaaagaaaaaaagaaagaaagaaagaaagaaagaaaaagaaagaaagaaagaaagaaagaaagaaagaaagaaagaaagaaagaaagaaagaaaagcaagcaagccagcaagccagccagccagccagccccacattgctggcggggctgtgaaatgatgcaaacgctggggaaaatattgtggctgatttaacagacggatacagtgcatgactcgcaaccacagcagaacatcaaagggcttgacggccatttctccgtccactccatgatgtataaatggctcacagacacttgagaacatgctccacatcgctggccattagggagatgccaatcaaaaccgcagcgagacaccacgtcgcacccaccggcatcgttagtacgcgacaaacaaaaagccacaaagtagcaagtgttggcgaggacaagaaccgtgtccctgctgcgctgctgggaagacagtttggcgtttcctcagaatatttaacacataattactctgtcacccagcaattccctcataactatacaccaagaacgcttgaaaacgggatcgggaagcgccgtttgcacacccacgttcacagcagcgttactcgccgtcgccccaaaggggaggcagcccaggtgtccatcaagatgcccacagatgagcggacgcggtcgatgcggtccctgcacacagcgggacacagttccccacaaaagggaaggagattcccacacaggccaggccgcggcggcgaaggcggaggatgctgcgctgagaatccagccggtctccaaaggacaaatcccgtgaggctccccctgcgcgcagtccctggaagcgctgaatccacagacagaaagtggacggggcgccggggctgaggaggggagggggcgtttgatggggacagagcttcattctgggaggacaggagagtctgagaacggattttgggaggacgggagcgtctgtgaacggattttgggaggacgggagcgtctgtgaacggattttgggaggacgggagcgtctgtgaacagattttgagaggacgggagagtctgagaacggattttgggaggacggaagagtctgagaatggatttttggaggacggaagagtctgagaacggattttgggaggacgggagcgtctgtgaacgattttgggaggacgggagcgtctgtgaacgattttgggaggacgggagcgtctgtgaacggattttgggaggacgggagcgtctgtgaacggattttgggaggacgggagcgtctgtgaacggattttgggaggacgggaaagtctgagaacggatggtggggatggatgcaccgaatgatcctgaatcgcgcacttcaaagcagataaaatggcaacaccggccccccaacagtcacgccacgctgaagctggagacgaactcgccccagcaaggtgctccaggggcctccggaactccggccgcagccccttccccggggccccccagtccccccccaaaccctcccccaagccctccggcccctccgcccccgcaggctccgaggcttcgcggtgcggttccctctgcgggtcccaggcccgcgctccgttcgccccccaggccgggacgtccccctcccccagccggccgaggggcgccagcgcggcggagggggcgggaggccgggccggggcgacagctgggggggcggccctgaccttcccgggatcgctgggcgcggccgggccgtcccctttccgggcgccgccataaaggggccttgcgggggcccggggccgtggccgcagcgctcagctcctgcgccccgaccccgccatggccccccggcccctcctgctgctgctgctgctcctcgggggctccgccgcgcgccccgcgccccccaggtgagccgcccgccaggcccgcccgccccccgggcccacccgcccccagtgcgccctgaccccgacccccgaccgcccgcagggcccggcgacactcagacgggacgttcaccagcgagctcagccgcctgcgggagggcgcgcggctccagcggctgctacagggcctggtggggaagcgcaggtgaggccgggtggggtggggggtcctggcgtggtgccccagcagcaacgcgcgaccccccagctccaggactaactctgttttggggcggggggcagcgagcaggacgcagagaacagcatggcctggaccaggctcagcgcgggtctgctctgcccgtcagggtccaacatgcccatcctgcaggcctggtgagcacccgccccaccgcagaccccactccagaccccaccccagacccctccttctgtcctggcctccccgggtcagcgctggtggccactggaggcccaattccagcagcggggccggggtctccagccccagccctcagaccctcacgtgctgtctctgcaggatgcccctggacgggacctggtctccctggctgccccctgggcctatggtttcagaaccagctggcgctgctgcagaaggaaccttgcggcccagatgaggaaggaaccccctcaccacctgcccggcccaggagcgcagctgcatttggggtggggggcaggatgggggagagggggaggggtggtacttggcaccaataaaggaggaatcagacccagacgctgggagttgtctgtgtccactcagtgtaatcgaggcaacccctgtgtagcggggctgagggatggatggaggcccatccacccaggagggactgaccacacccagctgccctttacacctgcaggcacggcggcccctcatccttatctctggcatcagggccacctcctgtacctcgactaagtactgcagggccccgccccaccccttgtcatccattaggaaacattctggggctcgggggatcccggacaccctctcagctcctgcccgggggcccatgtggtcagtgtttctgtaaggggtagtggggagggtgtgaaggggccaggggggctcaggcgggcaggaagaggggagggtggaggtgtcacctggggtgccaggaatccactctggcgtgaggactccggaccctctgtctcgtgtggcctcggaccagtggcttgacccctcagagcctgtggagcacggagcgtgcagggcttgaaggcgaccatgagggcaccgtgcagggttaggacactgagcccagccccagccatgagaggccagaagcttcggcgcacaggcctggaggaggagaactccacctacccctcacgacagccacttcctcgccccgaccctacccagtggcctctccctagagctgggggcttctggggggccaatgaaaagagcagggcaagtgtcgagtctcacctcaccccctctgtcgggcaccagggccccccaggaactcccagctgcccctcacagccccgccttagcctcagtcactaaggccctgtccagccccgccctgagaagccgacttgtctctggggcaggcaggggtgtccccaggacacagtgaggagagccttttccttcagaacctgctgtcaggcagggagggaggtgctccctggggaacacccgggttctgagcctcaaggggtggccttaggaactttgcctgagggagatcttaggggaggagccaagccagggcagcctgggctagggaggcaggttccagacaccccgacaccaagggccgagcccccgcccccagcccccagcttctctcccacaccctagccctgcccctgccctgcccctacccccacggcacccatgagccgctctccagtcccttctgccctgtgcctcggtgcctgtgacctgagccccctggttgacccctgcactcagtccaacttgggccaaacgactgcccctccttctggcagtgggctggaccagccggccagcgggagcccccttggcagaagccggtcgtaaaggatcataaactgggcggcgtctggctggggcgaaggtcgctgaggtaggaactgcgccagtcctagacgccagacccgctcagaccctcctgccaggtgacagccgccaagatggggtcttgggccctgctgtggcctcccctgctgttcaccgggctgctcgtccgacccccggggaccatggcccaggcccagtgtatgtgcgggcaggggtaggtggggcacgggcggcggggagccaggggctgggaggcactgatccctcctctgcaaccttacagactgctctgtgaacaaggacatctttgaagtagaggagaacacaaatgtcaccgagccgctggtggacatccacgtcccggagggccaggaggtgaccctcggagccttgtccaccccctttgcatttcggatccagggaaaccagctgtttctcaacgtgactcctgattacgaggtgtgggcggcaggcgggcgggatatgggggtcccgggagaagggcacctgcatcctcaggccacacctcccttgggggcctaggagttctatgcctgcgggcatccactgacacccatgcttggtggtgcctgccctagaaggctgggccatttcgggatgaagctgcctgggcccacaccctcagcactgaccactgatgatggggaccctgggccagcgcctgcccacttggcctcagtctccccacctgtggggcaggacggtgactgcagacctgtctacatccacaggagaagtcactgcttgaggctcagctgctgtgtcagagcggaggcacattggtgagtccccgccccgctctccccgccccacccggccacctctgctgggctctgccctgccggtccaggaccagtctttgatgacgtcagctagggtgtggtttcaaattccacccccccgagggtgatgcccacatttcctccagtccagactctgccctgagctgtggagtccccgtcactgaccccttgtccagcagacaccccatccagtgtgcccaagactcccacccactccctcaaccatccacaagggaggcacctttatcctgccagtcacggggaccaccttggttcccactcgccctccctccccacgtgtcccccacagccccccactggtaaatctgttggctgtgccccagctcgacccagaaatccagagtctgtccacctccagtcccatcagggccgggacaccagcactcattttgggaaacttccagccggcccaccggcttccctgttgccctttgctggccccagtccactccacgtggcagaacagcccctgtggatgttgtaaaccaaggctgcccagcccaccccagccctccacggctcctttctcaccgagtcaaacccagacatactgtgcagaggctccactgcagcctcagggctcccgccaggcacgcccctccctcaccggctcaggactgcagtcttcagagaaatcccaaccaccctatgccctgttgcatcccagccccgctcccccaacatcctgcttcttgaccggcggcatttttttcggctttattaaggaaaattgcagaatcctgaggccagcacaggccccctcacctaccagcacacagcaggctctgtgccctccatgcaccacggcacgtcacctgcacatatcttgggatatgtctctgaaagagagagactcttttttgagacagagtctcactctgtcacccaggctggcgtgcagtggagcgatctcggctcactgcaacttccgcctcccgggtccaagcgattctcctgcctcagcctcttgagtagctgggattacaagcatgcgccaccacggccggctaatttttgtatttttagtagcgacggggtttctccatgttggtcaggctggtctcaaactcctgacctcaggtgatctgcccgcctcggcctcccaaagtgctgggattacaggtgtgagccaccgtgcccggctgacaatccagtttcttcacaaataaatctccaggaaaaaagatgggagaaagggaaaggtacagatgaacagaaactcaggagaattaccaaccaggtccataatgtgggccctgattcaaacaaacaattgttaaaaaacccttcagagaccacggggaatgtggcatcctggacatttgaggtagaaagtgaccgcttttcccaggtgtgacaacgacattgtggttatgttctaaaaagaagagtcctggctgggcgccgtggctcacacctggaatcccagcactttgggaggccgaggcgggtagatcacctgaggtcaagagttcgagaccaatgtggccaaaatggtgaaaccccgtctctactaaaaatacaaaaattagctgggcatggtggcaggcacctgtaatcccagcactttgggaggccgaggtgggcagaggccgaggcaggagaatcgcttgaacctgggaggcagaggttgcagtgagccgagatcacaccactgtactccagcctgggtgacgacagagcgagactgtatccaaaaaaacccaaaaaccaaaaaacaaaaacaaaaaccaaaaaaaaaaaaaaacagagaaaagaaaatggattgtctttcctcacctgagattctgctggctgcatccccaagtacctgcattatttttctgtggagcacctgccacctcctggctttataaagtcctttttgtctgttgttataagtcctgccaggacaggcaccaccaggcagagatttgtctcttgtgatctctgaatcccaacgcctagagctgtgcagcccctgtagccccccaacaactgaatgagcgagtggacggatggccgtcgaggggtgcaccccactcacggcggggacgggtggccgttgaggggtgcacctcactcacggcggggacgggtggccgttgaggggtgcacctcactcacagcagggacgggtggccgtcgaggggtgcacctcacttagggcggggacaggtggccgttgaggggtgcacctcactcacggtggggacggatagccgtcgaggggtgcacctcacaacggggaggggctgtgggagaggctgacggccacatcctgcaggtgacccagctaagggtgttcgtgtcagtgctggacgtcaatgacaatgcccccgaattcccctttaagaccaaggagataagggtggaggaggtgaggccagcgaagccgcggggactgggcacgggggtgtgggagcccagggtgagggcaggaggtgagtggtggccgggggctcaaccacagtgggggtccacaggggccaagagtgtggccggaccaagcccctctccctccccaggacacgaaagtgaactccaccgtcatccccgagacgcaactgcaggctgaggaccgcgacaaggacgacattctgttctacaccctccaggaaatgacagcagtcagtgccgcccaccctgccccagcacgagcccctcgcctctgacacccacagccgccctcgccctccaaggctcttaggctctgtcctccctgaccctccccagggtgccagtgactacttctccctggtgagtgtaaaccgtcccgccctgaggctggaccggcccctggacttctacgagcggccgaacatgaccttctggctgctggtgcgggtgagcaggtcaccccagccccgagtcccacacacttgaggccccccggccccagctgctcccaggcctgatccagcacagccgtctgttgcaggacactccgggggagaatgtggaacccagccacactgccaccgccacactagtgctgaacgtggtgcccgccgacctgcggcccccgtggttcctgccctgcaccttctcagatggctacgtctgcattcaagctcagtaccacggggctgtccccacggggcacatactggtaatggggagggaggggcagtgcacggggcagggccttctaggcaggctggacacagggacggccaggatcaggagaggaagggcggggtcggggtcagggggtggggccgatttcggtcgtgattttgaaacaaatgcagactctccttggaaaccaacccttcccatcttgagcggtgagggagcaaaccctgaacacacagggaggagcgtgggccccagagccaggcggtctcaggggcctggggaggtgggctggggccctggagctcttaagggatgctgacatctctgccctgctcacagtcaccactgggcccacacaggctgtctgcaaaccttcctggcaccaaggcacctggggccaccaaacagtacatgggaggcagaaatgcagaccccgggagcccccacttcctaaatgtttgcttacccgtcaagacaagccttgtgcaaatgggactcagtatctttgggcaactggactcattcattagtaagggacccacaggggtgttactgattgtgatgctgggacaagggactgtcctaggcaggcagggacgcccggccaccagcgggactgggcccctcctcagccaaccctgcccttgatggggagtcagaggggccaggctggggccatccaccccagccccacgacgtgccctcccttccgccatccctgaagccatctcccctcgtcctgcgtcccggacccatctacgctgaggacggagaccgcggcatcaaccagcccatcatctacagcatct

SEQ ID NO: 96539 - DNA, 12648 bp, Homo sapiens
accaagcgtgagccaaagcagggcgaggcattgcctcacctgggaagcacaaggggtcagggaataccctttcctagccaagggaagcggtgatggagggcacccggaaaatcaggtcactcccaccctaatactactgcgcttttccaatggtcttagcaaatggcacaccagattatagcccatgcctggctcagagggtcccatgcccacagagcctcgctcattgctagcacagcagcctgagatcgaactgcaaggtggcagcaaggctgggggagggacgcccaccattgctgagccttgagtaggtaaataaagcagctgggaagctcgaactgggtggagcccaccgcagctcaaggaagcctgcctacctctgtagactccacctctgggggcagggcatagccgaacaaaaggcagcagaaacctctgcagacttacatgtccctgtctgacagctttgaagagagtagtggttctcccagcatggagtttgagatctgaaaacggacagactgcctcctcaagtgggtccctgacccctgagtagcctaactgggaggcaccctccagtaggggcagactgacacctcacatggctgggtacccctctgagacgaagcttccagaggaacgatcaggcagcaacattgcttttcagcaatattcgcggttctgcagcctccactgctgatacccaggcaaacacggtctggagtggacctccagcaaactccaacagacctgcagctgagggtcctgactgttagaaggaaaactaacaaacagaaaggacatccacaccaaaacctcatctgtacgtcaccatcatcaaagaccaaaggtagataaaaccacaaagatggggaaaatacagagcagaaaagctgaaaattctaaaaatcagagcgcctctcccccctccaaaggaacgcagctcctcgccagcaatggaacaaagctggatggagaatgactttgacaagttgagagaagaaggcttcagacgatccaacttctccaagctaaaggaggaagtttgaacccatcacaaaaagctaaaaaccttgaaaaaatattaagacgaatggctaactagaataaacagtgtagagaagtacttaaatgacctgatggagctgaaaaccatggcacaaaaactacgtgatgaatgcacaagtttcagtagccaattcgatcatctggaagaaagggtatcagtgattgaagatcgaatgaatgaaatgaagcgagaagagaagtttagagaaaaaatagtaaaaagaaatgaagaaagcctccaagaaatatgggactatgtgaaaagaccaaatctacgtctcattggtgtacctgaaagtgatgaggagaatggaaccaagttggaaaacactctgcaggatattatccgggagaacttccccaacctagcaaggcaggccaacattcaaattcaggaaatacagagaataccacagagatactcctcaagaagagcaactccaagacacataattgtcacattcaccaaagttgaaatgaaggaaaaaatgttaagggcagccagaaagaaaggtcgggttacccacaaagggaagcccatcagactaacagctgatctctcagcagaaactctacaagccagaagagagtgggggccaatattcaacattcttaaagaaaagaattttcaacccagaatttcatatccagccaaactaagcttcataagtcaaggagaaataaaatcctttacagaaaagcaaatgctgagagattttgtcaccgccaggcctgccttacaagagctcctgaaggaagcactacacatggaaaggaacaaccagtaccagctactgcaaaaacatgccaaattgtaaagaccatcgaggctaggaagaaactgcatcaactaacgagcaaaataaccagctaacatcataataacaggatcaaattcacacataacaatattaaccttaaatgtaaatgggctaaatgctccaattaaaagacacagactggcaaattggataaagagtcaagacccatcagtgtgctgtattcacaagactcatctcacatgcagagacacgcataggctcaaaataaagggatggaggaagacctaccaagcaaatggaaagcaaaaaaaagcaggggttacaatcctagtcgctgataaaacagactttaaaccaacaaatatcaaaagagacaaagaaggccattacataatggtaaagggatcaattcaacaagaagagctaactatcctaaatatatatgcacccaatacaggggcacccggattcataaagcaagtccttagagacctacaaagagacttagactcccatacaataataacggaagactttaacaccccactgtcaacattagacagctcaatgagacagaaagttaacaaggatatccaggagtttaacgcgactctgcaccaacaggacctaatagacatctacagaatgtctccaccccaaatcaacagaatacacattcttctcagcaccacactgcacttattccaaaattgaccacatacgtgcaagtaaagcactcctcagcaaatgtaaaagaacagaaattataacaaactctctctcagaccacagtgcaatcacactagaactcaggattaagaaactcactgaaaaccactcaactacatggaaactgagcaacctgctcctgaatgactactgggtacataatgaaatgaaggcagaaataaagatgttctttgaaaccaatgagaacaaagacacaacataccagaatctctgggacacattcaaagcagtgcgtagagggaaatttatagcactaaatgcccacaagagaaagcagaaaagatctaaaattgacaccctaacatcacaattaaaagaactagagaagcaagagcaaacacattcaaaagcctacaggagtctagaaataactaagatcagagcagaactggaggagatagacaaacaaaaaaccattcaaaaaatcaatgaatccaggagctggttttttgaaaacatcaacaaaattgatagaccactagcaagactaataaataagaaaagagacaagaatcaaatagacgcaataaaaaatgataaggagaatatcaccaccaatcccacagaaatacaaactaccatcagagaatactataaacacctctatgcaaataagccagaaaatctagaagaaatggataaattcctggacacatacaccctcccaagactaaaccaggaagaagctgaatccctgaatagaccaataacaggctctgaaattgaggcaataattaatagcctaccaaccaaaaaaagtccaggaccagatggattcacagctgaattctaccagaggtacaagaaggagctggtaccattccttctgaaactattccaatcaatagaaaaagagggaatcctccctaactcattttatgaggccagcatcatcctgataccaaagcctgacagagacacaacaaaaaaagagaattttagaccaatatccttgatgaacatcgatgcaaaaatcctcaataaaacactcacaaaccaaatccagcagtacatcaaaaagcttatccaccatgatcaagtgggcttcatccctgggatgcaaggctggttcaacatacacaaatcaataaacgtaatctagcatataaacagaaccaatgacaaaaaccacatgattatctcaatagatgcagaaaaggcctttgacaaaattcaacaactcttcatgctaaaaactctcaataaattaggtattgatgggacgtatctccaaataatcagagctatctatgacaaacccacagccaatattatactgaatgggcaaaaactggaagcattccctttgaaaactggcacaagacagggatgccctctctcaccactcctattcaacatagtgttggaagttctggccagggcaatcaggcaggagaaagaaataaagggtattcaattaggaaaagaggaagtcaaattgtccctgtttgcagatgacatgattgtatatctagaaaaccccattgtctcagcccaaaatctccttaagctgataagcaacttcagcaaagtctcaggatacaaaatcaatgtgcaaaaatcacaagcagtcttatacaccaataacagacaaacagagagccaaatcatgactgaactcccattcacaattgcttcaaagagaataaaatacctaggaatccaccttacaagggatgtgaaggacctcttcaaggagaactacaaaccagtgctcaacgaaataaaagaggacacaaacaaatggaagaacattccatgctcatggataggaagaatcaatatcgtgaaaatggtcattctgcccaaggtaatttatagattcaatgccatccccatcaagttaccaatgactttcttcacagaattggaaaaaactactttaaagttcatatggaaccaaaaaagagctcacattgccaggtcaatcctaagccaaaagaacaaagctggaggcatcatgctacctgacttcaaactatcctacaaggctacagtaaccaaaacagcatggtactggtaccaaaacagagatatagaccaatggaacagaacagagccctcagaaataataccacacatctacaaccatctgatctttgacaaatctgacaaaaacaagaaatggggaaaggattccctatttaataaatggtgctgggaaaactggctagacatatgaagaaagctgaaattggatcccttccttacaccttatacaaaaattaactcaagatggattaaagacttaaatgttagacctaaaatcataaaaaccccagaagaaaacctaggcaataccattcaggacataggcatggcaaggacttcatgtataaaactccaaaagcaatggcaacaaaagccaaaattgacaaatgggatctaattaaactaaagagctactgcacagcaaaaaaaaaaaaaaaccaccatcagagtgaataggcaacctacagaatgggagaaaatttttgcaatctactcatctgacaaagggctaatatccagaatctacaaagaactaaaccaaacaaatttacaagaaaaaaacaaacaatcccatcaacaagtgggcaaaggatatgaacagacacttctcaaaagaagacatttatgcagccaaaagacacatgaaaaaatgttcatcatcactggccatcagagaaatgtaaatcaaaaccacaatgagataccatctcacaccagttagaatggcgatcagtaaaaagtcaggaaacaacaggtgctggtgaggatgtggagaaataggaacacttttgcactgttggtgggactgtaaactagttcaaccattgaggaagacagtgtggcgattcctcaaggatctagaactagaaataccatttgacccagccatcccattactggggtatatacccacgggattataaatcatgctgctataaagacacatgcacacgtatgtttattgcggcactattcacaatagcaaagacttggaaccaacccaaatgtccaccaatgatagactggattaagaaaatgtggcacatatacaccatggaatactatgcagccataaaaaaggatgagttcatgtcctttgtagggacatggataaagctggaaaccatcattctcagcaaactatcgcaagaacaaaaaaccaaacactgcatgttctcactcataggtgggaattgaacaatgagaacacatggacacaggaagggaaacatcacacaccagggcctgtcgtggggtggggggagtggggagggatagcattaggagatatacctaatgtaaatagttaatgggtgcagcacaccaacatggcgcatgtatacatatgtaacaaacctgcacgttgtgcacatgtaccctagaacttaaagtataataataaaaaatagggttctaggcacttcgggaccggcagcttaaggtgcagacatggccaagtccaagaaccacactacacacaaccagtcccgaaaatggcacagaaatggtatcaagaaaccccgatcacaaagatacgaatctcttaagggggtggaccccaagttcctgaggaacatgcactttgccaagaagcacaacaagaagggcctaaagaagatgcaggccaacaatgccaaggccatgagtgcacgtgcccaggctatcaaggccctcgtaaagcccaaggaggttaagcccaagatcccaaagggtgtcagccgcaagctcgatccacttgcctacattgcccaccccaagcttgggaagcgtgtttgtgcctgtattgccaaggggcccaggctgtgctggccaaaggccaaggccaaggatcaaaccaaggcccaggctgcagctccagcttcagttccagctcaggctcccaaaggtaccgaggcccctacaaagccttcagagtagatatctctgccaacgtgaggacagaaggactggtgcgaccccccacccccgtccctgggctaccatctgcatggggctggggtcctcctgtgctatttgtacaaataaacctgaggcaggaaaaaaaaaaatagatctccctctccctctccttctctccctccccctccccctccctctctgctcggtctccccctgatgccgagctgaggctggactgtactgtcgccatctcggctcactgcaacctccctgcctgattctcctgcctcaggctgctgagtgcctgggattgcaggcgcgcgctgccacgcctgactggttttcgtattttttggtggagacggggtttcgccgtgttggccgggctggtctccagctcctgaccgcaagtgatctgacagcctcggcctcccaaggtgccggggttgcagacggagtctcgctcactcagtgctcaatgttgcccaggctggagtgcagtggcatgctctcggctggctacaacctccccctcccagccgcctgccttggcctcccaaagtgccgagattgcagcctctgccctgccaccaccccgtctaggaagtgaggagtgtctctgcctggccgcccatcgtctgggatgtgaggagcccctctgcccggccgcccagtccgggaagtgaggagcgcctcttcccggccgtcatccggtctaggaagtgaggagcgtctctgcccggccgcccatcgtctgggatgtggggagcgcctctgccccgctgccccgtctgagatgtgaagagcgcctctgccggggcgcgaccccgtctgggaactgaggagcgtctttgccccgccgccaccccgtccgggaagtgaggagcatctccgcccggcagccgccccgtccaggagatggggggcagcccctgcccggccagccaccccgtccaggaggtggggtgcgcctctgcctggctgccccgtctgggaagtgagcccctctgcccggccaccaccccgtctgggaggtgtacccaacagctccttgagaacgggccatgatgacgatggcggttttgtcgaatagaaaagggggaaatgtggggaaaagagagatcagattgttactgtgtctatataggaagaagtagacataggagactccattttgttctgtactaagaaaaattcttctgccttgggatgctgtaaatctatgaccttgcccccaacccggtgctttctgaaacatgtgctgtgtccactaagggttaaatggattaagggcggtgcaagatgtgctttgttaaacagatgcttgaaggcagcatgctcgttaagagtcatcaccactccctaatctcaagtacccagggacacaaacactgtggaaggcggcagggccctctgcctaggaaaaccagagacctttgttcacatgtttatctgctgaccttccctccactattgtcctatgaccctgccaaatccccctctccgagaaacacccaagaatgatcaataaatactaaaaaataataataataataataataaataaataaataaaataccagaaaaaaaaatccagtgaacaaagaggtttcatcacccttattacacagtcctgcagaagatcacagcagtagatgtaccgctgtacagatgtagagggacagaggagagggataaataaaccattttattctaactcggcttaaaaggaaccattatttcctcctataaaactgaatgaagaagaaggaaagaatctctgaggacatttaattaatgggtacccacttctgatggcatcttagggagaaaaaaaaggaaccacacagtagtttaaccatcatagtcaacttgttaaacatgtatccacaattacatcaccattaagctataacaattccatgtggtctcttaaaaacgaaattatttttatctctaaatttaccattgcaacatcacattctcaacaaatgtttagcatttatggttttgttttggttctttctctttttttcttttttctttttttgccggcttaaatgattaatgagactatcctatgaccactgttccagagattgaacagttcccagcttccaagacaaagaatttgcaagactgtttaagactgttcattttaagctattaagccaataattaaaattgcattctacattaaagagaatcctaattcacataattctgaatacactgtaagaaataaatctgaaagccaaagaaaggtcataaaactgacaaagccaaagcaataataacatatataccatttactagcatctctcatttcaatgctttgtagatactaattaattaatcacaaaggaaaaaatatttttgatttggcttttgatccacttcattctgttctatttttatttggaaccaagcagcaaagtgcaaaaatcagaaaattcgatctgaaaatgctgttcaatttttgtaagacctctatttctgaggcaatctggatactatcacaaacaaagaaactgtaaaatcataaagaggttaatgtctatatgatatttggatatcattcatttgaattggttgtttggacactgacaacatttttcagtttttataatcttgggtattgtgtaaccatagcactgagctcagaggacacccaacagaacaaaaattcaattttagggattgctggttagccacttggggtgcattccattccctcacacataataaaatcaccctgttctagtttggacttgtgtgtttccttcaataaataagagtgaaggtcaacatactggtaccatattaactctgctatatctgctatcatagtctatctggagaagattctaaaacatgaaataagttaacaaataaaatatttctctaatgttcatttaacaaaccaatttgtgtgaatgtgccaggtacttggccaaactccacaaacacaaaggtgaataataaatggtgccttacaatactttctcagtaaaatgagaataatatttcctacctccagaatttgtgcggggattaaatgagctatattttgtaaagcacccagcataatgcctgctacgttgcactaatggccaattttaagtagctatttcatttttatgattataccgatctacctagagccgctaagcacagccatgaagaaactgaataaatctcctataatttcctataataaagaagcataaagaaggtttatcaacgaaggttaatgtaaaaagtgagaaatcagaaaattgtagaagaaaagataatttccatcttcaaaatcgaaaaatatgacaggcttgtatttgttggtttctgacttgttttgtaacaatgcctaggagtagagatcatacagtaagacaaacacattgcacatcacaagtaagagctttgactggtgaatcctttgtgaagatcaatttagtaatatcaaaagccaacaaaaagttcttactccctttgaccatgtaattgcacttataaaaactggacctaaggaaataatcaaggatgtagaagaaggaaaactgcaaccaagaaaaaaagaaagttaaaaacaactaatatgaatttgaataaatagactatggtaatatctgtttgctataatactaggagctaaaaattattagaaaattaaacattaattaaaccttaattaaaattaaggttagacaattacataatatattaaatagaatgtatttaaacattcatataaaaaagactagaatgttaatagttaagtggtaatggaagtttaggtgattttatttttttatttatccttttctgattcttccaaatttcctacattaaacatctttaactaattggaatttttttttttttttttttgagacagggtctcactctgtctcctaggctgcagtccagtggtacaatcacagctcattgcagcctcaacctccccaggttcaggtcatcctcctgcctcagccccccaagtagctgggactataggcatgtgccaccatgcccagctaacttttatattttttgtagagacagggttttatcatgttgcccaggttggtcttgaactcctggactcaattgatccacctgccttagcctcccaaagtgctagaattacaggcatgagccacggcgcctggccagaattttttttttaattaaaacttaaactgttcttgaatccgaattattaatctgacccaatatgatatttatggtctcaggcagctatcggaataatttggtagttctatatacagaataggagtacaaaatatctatggaatgctgatggtaagtggcatgcctgtggcagtgaaatggaaagaaaagaaatagaagacctagagaaaacatatcaaaaaaataaaagagtaagaaaaataagagaaagatgatataattgcagaacacgtagaagagagtactttcaacaagtacctcttactaccttattctagtgttacagaagagttactgtaagacttactatggttgctataactaataataataaaagacactaagtgaagaaggaaaaagagagtaataagagagacacagacagaaatgtggggaatactctttataaatttaaaaacctaaagaaaaccatttttaaaaaaggataaaatgagaaattacccatgctgacatttcaagaactagaaacaagtcttcttccctcctctccccatatcagcatgccataggctttgttaacattcaaatccttcaaatcctcccatttaactttaaaagccactttctgattcctcagggatctagaactagaaataccatttgacccagccatcccattactggggtatatacccacaggattataaatcatgctgctataaagacacatgcacacatatgtttattgcggcactattcacaatagcaaagacttggaaccaacccaaatgtccaccaatgatagactggattaagaaaatgtggcacatatacaccatggaatactatgcagccataaaaaatgatgagttcatgtccttcgtagggacatggatgaaattggaaatcatcattctcagtaaactatcacaagaacaaaaaaccaaacaccgaatgttctcactcataggtgggaattgaacaatgagatcacatggacacaggaaggggaatatcacactctggggactgtggtggggtggggggcaggggggagggatagcattgggagatatacctaatgctagatgacgagttagtgggtgcagcgcaccagcatagcacatgtatacatatgtaactaacctgcacaatgtgcacatgtaccctaaaacttaaagtataataaaaataaataaataaataaataaataaataaaagccactttctgacaaaccgcaagtttaagtaataatgaaaatctgctgccccctgctggtcattcaaattcatcaactgaagcaaaatcaaactaagggttaaaagtttacttttacagaaaactgtatttctagtacaatttcataaacatttcttcttcacaaatgtttcttctttctgtcacaaagcctgacacttttcaaataggatacataaaccttcacctttccaaattccccaggtaatttaggctatttaattttaaaaccccttagcttgttttgaatttgggctatcaaatcctttgttttgcaatatagcctaagaaacaaaaatattttttactatgaaaagatacttcagccttccaaattacaatgagattttcagttaaatcataagaaaaatcctgagttgtaaaataagcgagttttttaaaatattataataaaagaatgaaggtagagtaagtatctgatatggtttggctctgagtccctacccaaatctcatgtcgaattgtaatccccacatgccacggggggacctggtggaaggtgatggattatgggggctgacttccgccttgctgttcttatgctagtgagttctcacgagatctggtgctttaaaagtgtgtggcacatcccccttcactctctccccttctccgctatggtaagatgtgcttgcttcccattcaccttctgccatgattgtaagcttcctgtggcctcacagtcatgcttcctgttaagc

SEQ ID NO: 96540 - DNA, 12765 bp, Homo sapiens
gcttataaccttgaggaaaaacaggctcgaatatttcaacttttagtgaactacgaaagatttgagcaaacagaactcaggcataaaagtgattcaaagtgtgctttcaagtgagttgaatgggatgttaactggcctgtgtgatctccattagaacaactggacttaccagagtaggcccagtacgggtcgcctgaagccttgcgcctgcggatctgcactgcgctgccgtgtctattctcgtgcagggccccaacgtagccttctgtcaacgctggaagagaggaaaacccacaatgagacaaaggcagcaccccactggatacaggaagggtgtcaaatgaacaccattgggtgacttcgtagaatcatagtccttgaggatgactgactagaaccaacttattttacaaaaaaaaaaaaaactataggaaagtccagacaaattattattattaatattaggaatcgttgacaaggaacctttactttgtgccaagaagtgcagtacactaagcacttcatatacattatcttagttgatttgcaaaacaccaccaagcagtacaaacagtgatcccaataatggggcccttttatggataagcaaactgaagcttcaacaacagaaagaactttaacttgaccaaggtcatacatacaactaactggtagacttcggttccaactgcatgtataagtttacaacctgtgtgtaaagaccctcgggctccatttgatctttacagagccagggtcattctatctcttttacagatggaggaactaaggagcagagacacaaagtaactggccccaggtcacccagtaggtatgcagtagatgagaaaaccagacttaagaatccctgcatcaaagccagccacccaaacacaggacaatctgaaacctaggagactccttgtgattagtaccagtcttccacatcctttgggccactaacagtcacctgtggtgccagaagatatgaaacaagaaagcctccaaggcccacaatgcccacaaaagaaacactgattagtgatgtatatttgaaatctcaaaatcatttcaatccaccaagcaacagcaaaaatactactctcacccattatggagagcttccatctgcctgctatagcgttcaaagccctctcttcccagctacctcatggatgcggatttcttttgttgtgagcccacacctgaaaacactgatgtataagaagacaaatgtcacaggtgcctcaaaatccaaaatgaaacggaattacacgcaaacaatataccccagctgactatgataacatttaaatgcacctaaacaaaagcaagcctgctttcaaagagaaaaaaaaaaatttaagaaagttttgggaagctgtatattcaattgaagacaaagatgggaccaggaaaacacaacgcattctgtattccaaattagtcaatggaataatatcgccaagatattattagccttttagacaatgtgacagtcattaaaaaaaattaagaaacctgtagagtactttatgcttacacttcaattaaaaagactagcattaaaagatgtaatgcttgaacaatagtattccacagagatgagccctttagagggaaacaagaatcctataaattctcaacacaagcctaaaaagtaaacctgatgtcatttatgtctgctcattggtcctcaaagaaaattcatgtcaaaatttaagcttccactcatttttcaagtacaaggtaggtttaggtgccttccatccaaaccattctacaaataattattccccattaatccttcctctttccatcaaaacagtgagtaaaacactgtcttgctatgttagtaataaatgtggcttccattagggtatgtggttgagcctcaatttccttgactgtaaaatggacctaaaaatgccagccttctaagactgttacaaagataacgcaagttatggtgagcagagcacctaactcagcactgggcatacactgcttttggttttgttttttttttgaaacagggtcttgctctgtcgaacaggctggagtgcagtagcaagatcatggttcactgcaaccttaacccctgggttcaagcagtcctcccaacttagcctcttgagtagctgggaccatcagcgcatgccactatgctcagctgattttttatttttgtagctgatcttaaactcctgggctcatgcaatcttctcacctggtcctcccaaagtgttgggatggcaggtgtgagccactgcacccagccctagtgctttttagtgtccgacaacatagtggaaatttgctgtagaggatctgttttgtaataaccatatccccactccagctagctgtgtatcacgcattggacagctaacccgccaccaccaatgttagctctaggagtgagccttgtttggttcaagccagtcaatcacttttaaccattctcgtggccccagtgatgcattcaggtatgggcacactggccagtcagagagattcttcttccttcctgaaggtattagacaaagtggaagcctcggggggtggttgaggaccaagtaagggattaacagaggaccttaaaattagaaccaaagccagggggaccaaaaaatcaattctgttgacaaaatttaaactctgccagcctgggtaacaaggcgaaaccctatctctacaaaaaataaaaaaattagcgcgtgtgccatcctggctaacacggtgaaatcctgtctctactaaaaatacaaaaacaaaattagacgggtgaagtggcggcacctgtagccccagctgaggcaggagaatggcgtgaacctgggaggcggggcttgcagtgagccgagatggcgccacggcactccagcctgggagacacagcgagattctgtctcaaaaaaaaaaaaaaaaaaaaaaaaaaaattagagtgtgtggtggcacacgcctgtagtcccagctacttggctggctgaggtgggacgatagcgtgagccagggaggctcaagtgagccgtgattgtgccactccactccagcctgggcaacagagtgagaccctgtctcaaaaaaaaaaaaaaagaaaagaaaaagaaagaaagtttaataaaataactaaaataaaatatttaaaccttcgacaaagctgatttgaagctagccctctctgagggtctatttttactgggatcagttttacctgctaaagcacatttttctgtcttttgtaccaaagaagatcctcaaatgacacccatcgtatgctttaaaccatcacttgaaatcctggtcataaatttctccatccataaaaggccattgttgtactagagctctcttaaccctgggctactttaaaaccaaccaaccaaccctatgccttggacttcaccccagacacacatatacatcacaatgtggtataaggaattggacttgagcaacaggactgcctgtctaaaggtaattcacttaagacagaagtaaaaggtacggttctgctacatacgacaagaggtaacagaagggacagggccatcccaagaaggtaggttaatcttatcttcctcacactacgcaaagtattgaggtacaaagtgggttttccacagcaaggtcagcatgggcaggaaaactggcttctaaagtacatgctgcatggcgtatgaagggctctaagctccctggaaatagggcacaggcatattcctgaactactactgtcaacctaccactcacaatggaaatcagcgcatggtgtgtgttcatcaacagtgagggaatggcagccaggtgcgaggctcacgcctgtaatcccagcactttgggaggccaaggtgggcggatcatgaggtcaagagatcgagaccatcctggccaacatggtgaaacctcgtctctactaaaaatacaaaaatgagctgggcatggtggcacgcctgcagtcccagctactcgggaggctgaggcaggagaatcgcttgaacccaggaggcggagcttgcagagagccgagatcacgccactgcactccagcctggcaacagagcaagactccgtctcaaaaaaaaaaaaaaaaaaaaagtgagggaatgaatgaacacatgaaagatcaaaaagctgatggtttctgtgttctagagggtagtgatggtaagaaaatgtgtgtgtatctatgcatgttatgtacctgtttacataagccacaggcaaaaccaccacccagaacctcactgactctctagccactgcccacctatcacaaacagcaagcatttaatacatgaagcaaaaagaaaatggccctgagtaaccaataagcaattctttaggaaggcaattgttcagaaatgaacagggcaggacttttaacctcagcaccacattttattttttaactagataaactactcattaaaggtgactatatttagttttcccttttgttccatctctgtcagtaatgtgtgacctctccccctcccctatctgtaagagcataatcaagtaatgtgccacatgataaaatttcagtcaatgaaaaactgcatatatgatgctggtcccatgagattataataaagtattttttactgtaccttttatgtgttcggatatgtttagatacacagatacttaccactgtgctacaattacctacagtatccaggacggtaacacattgtacaggtttgtagcctagcagcattaggctacaccatatggtctaggtgtgcagtgggctggctattccatctaagtttgttaagtacactctatgatgttcgcacaacaaaagcgtctgaggactaattatcattattactggcactcacataatttaaaataagacaacactttaagtcctctcctcaaatgcattttaatcgacgatgctgtgattttttttaaaaaccaacttttaaaactattatttgaacagcagtcaaaaagtatatatagagtatattaagcaacttaatattttattggcaaggagcagtgatttgcaaatagaaacagtctgtggttcccaagtaaagatacagagtcagcacaccaaaattcaatcaattttaatactctttgtactcttctaagctcagacagacaaccaaaggcggtgtggcaatgatatggtatggctatgaatcatgctattgattttcaatatcttctgtgcagaaaattaaattatgcaaatgaatgcctttacggatcctcaccttaatgtgaaattgcatacttgcttatgtcagcaacttaattacacaattaaaaatggagcatgcttatgaaaatatgtagtttcactcttcagaatagacaataagtgtaaatctgcctatggttatcatgtgaataacaagagggaggacatggtgttatgcacacatatattctaccaagtgttacagcaccaagcccactatggtttatggaggggaagtcgtttttcagtgaaaagcttaggaggacttttagtcatgttatagcacagcgagaaattggaatatcagttatgtaagacacagagaagcccagcagtatatgctgtacattgctgcattctcctcctcaaagaggtcatctctaatgacattttaaccaacacacacacacacacagacacccatggcctgacaaacctgagcatcaggaatatcacatttaagtagtctgaatagtgtaataatgaaatgggtttagaaaggaagaatacagtgactcccatcatacaggaaaatctgagtctctcgattttgacaaggtaagagtggagatttcaaaaccaatagtattaactagccaatgatgcttacgtctcactcagcaggaggaatcttaagtcaagttggttgctaggcagagagctgaatgagtgacaggtattttcatcagggagtttccataaactctgtctcttctcagaacttctactgagcctacctcatttccagcccgaagcaaaaaaagataaaaatattaccagacccgctcttttccggttagcgcggcgtgagaagccatgagcagcagtctctcgcracaccctgtacraggcggtgcgggaagtcctgcaccrgaaccagcgcaagcgcmgcaagttcctggagacggtggagttgcagatcagcttgaagaactatgacccccagaaggacaagtgcttctygggcaccgtcagacttaagtccactccccgccctaagttgtgtgtgtgtgtcctgggggaccagcagcaytgtgacgaggctaaggccgtggatatccccyacatggacatcgaggcgctgaaaaaactcaaaaagaataaaaaactggtcaagaagctggccaagaagtrtgatgcgtttttggcctcagagtctctgatcaagcagattccacgaatcctcggcccaggtctaaataaggcaggaaagttcccttccctgctcacacacaacgaaaacatggtggccaaagtgggtgaggtgaagtccmcaatcaagttccaaatgaagaaggtgttatgtctggctgtagctgttggtcacgtgaagatgacagmcgatgagcttgtgtataacattcacctggctgtcaacttcttggtgtcattgctcaagaaaaactggcagaatgtccgggccttatatatcgagagcmccatgggcaagccccagcgcctatattaaggcacatttgaataaattctattaccagttcaaaaaaaaaaaaaaaaaaaattccagacccaaaggcccaatttcttcctataaaaatgtcctaagagtcacctactactgaagatatcaacgcaactgtttcctacgtgcctcatttaatttcccagagccaccggacatagtttataagaataaatgtttttattccagaataaaaaagcagatgtgtatcccatctgccttaactgtgtcttcgggaggattctgtgtaatccttactctcagtgtttcacagaaatattgacttccggggaaaaaaagacttgcaagctgtgttaactcttctgtgttaatttgcagtctaaacatttttcatacaaagagcccggctcctctgaataccacatgaaacagcattcgtgacatagatgttttttcttaagttttactctcagagagatgaaagggtcactgagtctatattgaatatgaataaatgttgttacataatatatccatagggaatatttttcctacaagattgcaaattcatgattgaaattagagtacaatgaatgtcttactgtttttgacaaaggtggtccatttacatatagatttgtgtatatgaatgtcaatggaagtctgaggtgtccaccaagaaaagaagatacatggccacaaaggattccaaaataaccccggcattcatccacaacactggttcatctgactgtattgaaccagccatgtcgacttgacctctgctatgtcattatctcctacagggaaaagtgattatatgacaaaggttatgcaaaggtgaaagcagagtaagtctgtgatgagaacatcccaaagttccatctacaatatggctgcacatcctatgatcaaagcaaaacagcgtagtaacacataagggtatttctcattaactgtatgtccaattctaggtcattccaaaggacttagaagcctgggagaataggtcagcttccatataaaattgaaaacatcagaacaaagaaattctggttctccagtgccaaaatgaaaactacttagggtgatgggtgggtggttctcatatacagagtcctagttcttctcccagatatactgccaaaacataagccaactaaaaacaagcaacaggcactcacattgtcaaatctagaacgaagatatccagaatggcagacaagcagttaagtaggttgtttatatctattttaatggcacatcaacaaacaaattaaagatccctcaaggatggtgaaatctccattgagcacaattttctctaaattttaaagagcatttaagaacattaaatcccacacaatagtctaaaatgaaaatctttttttatgcctacaatgggcaaaagtatcaaattaagttaaaagtaattaaatattctgatcaacctctcatttcctttgtgcctgtatttcaatcaattgtagtaaaatgtgctcggtgagtgtcccaaaaagtaaaatgaaaaagtgtgttcctttgtaagcactgcattataaatggtccttctagttgtttgtaatactgagctaacctcaaatacaatagattatattacactagattccctattttatcatattcaaatatacttactgtttcaactataaaaagtttttttcatcaccttacatgaataaagagacctaatatagagccatgatgttttttaagtaaaataaagtactgaaactcagaggcaattcaagggaaagaggaatcacacagcaatgtcgtatcctagagggaaaaacaaacagaaaaaaaagcattgtaaaaatgagctataagccaggcagagaacaaaatactgaagtcctctattattttactcttaaatagtgtcagttacaaagggcagaatctattaaaaaaaaataaataagggctaaaatggacaaaacattggagtcattcctctgccattaactctgtcagttttaaaacttcagaaattaaaaaatacacactttccaacagatctcagaaaagatacacttataaaactgatttataatggagctcattatacatttgtgatgaaaatctgaaaaataccatggttccctctttctcacaggcaccttcctaaaaaaatttgggctcacggcatcaaatatcagacagaaataaaatgactactctttcaggccattttactactgtttgattctcaaggaaacaaatctcctgattctataatattaccaggaaaatgaagatcagtgacagacagtgttggtgtaatatcaaaggccacagacctgtactttccattttacaattgtggcatctctttatatctttaatggccagcagaaatggcaaacagcagagagattacatgctggtggccaccatgctgaacacggccacccatctgaacttttgtttcacccactgtacatgtatgcatgggtgtatgcgtattgcattagttgccagtgtggaaaaccccaggagagaacaccaatatctgtattttcatttttttaaaatgtgagagctgggtcatgttcccaaatggcaacaatatgctatgtgaatagcaagtagctctttagagaagagtcatgaatatccagctagctgccttctccacccagtcccacttgttcatttgtatttcttaaagagtccctgtggccatctgtgtttgcacccatggcctggcccaatcataagttatttactaaatcaagtcaattattgcctatgaggaaagcatcattaaaattaccatcaatacacaggctcatgtaattcttccagtagtcctgtagcttaggtacaattattcagaaaaggtatgttacttacataagaacacataggtctgaaccagatattactctcagtcctctataactgatactacactacaactatacttcacaaaattgaattttaggcatcataaaaatatctgtgagttaatatgaatagctactccacttgctcaaaggtaaacaaacatcacaagtgaaaaatttctacatgagcctcataaaactaaaaatgtaacaattccaaaagaaagaagttgtctaggttagtctttccaccactattggcaattgtctaagataaaatcatgttcccaatattattaacagtaaaatgtagagtgatttttctaacttccaattacaactacacaaactttggttattgtctataaataagaaagtcacttccaagccaagcagaaatatgtatcaaattgatcacaaccaggaacagatttctttgttctttctccactcccactgcttcccttgactagccttaaaaaaaatttttttttttcaaataggccaagtcccatcactttggaaggccaaccagggaggagagcttgagcccaggagtttgtgaccagtctaggcaacaaagcaagaccccatctctaccaaaaaaaaaaaaacaaaaaaaaaaaaaaaaaaagcaacagagcaagaccccatctctacaaaaataaaaatgaaaattagccaggcaaggtggttccagctattcaggaggctgagacgggaggatcacttgtgcccaggagtctgaggttgccatgagccgtgatggcaccactgcactccagcctgggcaacagggcaagaccttgtctcaaaaataaaataaaaataaagaagtaagcattaagttacaacttgagttaaggaagcaaataagaaagtgacatgttgattaataaattatcttgattcatgttatctttcatttaaaatgtgtaattgtgactgcctaacacatttttatccatgagaaataagcttgcagtgagccaagatcgcaccactgcactccagcctgggcaacagagcgagactccatctcaaaaaaaaaaaagcagattcatccagcagttatttgtcagttgtataagtcgaatagagcaccatggttagtaactttgtgccaaaccccaaaacaaactatgtcacctaactttggtatttgaaagaaataggccttttatataggccttttatattgttgagtcatttttacatgcacattccatgtgaaatattgaatgaaataggtttatatatatatatacatatatatatatatatatatatatgtatatatatatatatataaaaatggacaaagaagccctatttaaatgtggttgggtacccattttaaaacctcagcataggccgggcgcggtggctcatgcctgtaatcccagcactttgggaggccgaggcgggtggatcacgaggtcaggagatcgagaccacggtgaaaccccatctctgctaaaaatacaaaaaaaattagccgggtgcggtagcgggcgcctgtagtcccaactactcgggaggctgaggcaggagaatggcgtgaaccccggaggcggagcttgcagtgagccaagatcgcgccactgcactccagcctgggcgacagagaaagactccgtcttaaaaaaaaaaaacaaaaaaacctcagcatatccacaacctctagcaaaatgtgccaggagcaagcaggtgattaataattccagaacttagaaatgagtaagcttcacaataacaaaaatatccaccaagataatccctaaacatggtagatggtagaaaacaccctgaatgcacaagccctaggacctgcgtctggggatcaaatacaggggacactccaaccatgacacccctttgcttaaaacaccgtatcatgaagggggtggacctcattccaaaactctcccccgagtaaaaccaaagacctctgacttccagagccaggttgaagaaaccacttgaaccctagctggtcagccactcaatagcccatcgccatctattccccaagctttgtgcttctggtcagcaaactatgtactccacctccaacacccaccatctgcttaagtagctcctaactcctgcttatcaaaaagataatttctaggaagtttggtaagatttaggcaagttttcttggtctctccatgacaggatgctgccatggcattcaacagtatatactctacaccgttcctgccctcttggagcttccagtccatgaggaaggcaatcaataaacacataaagcaaaacttgtataatgactgaacaacatgaaaataaagtgaaacacacatgatacagccacagagaatacaagcagggaaagaatgtacttagagagagagaggaggcagggaaagaaacatcatttggagaaaagaaacatcattttagttgagggcattgacagggagagatgatagggttcaaagacaggggaacagcacatacaaggatgttgaggcaggaaaaagggtggcatccaccctggtaaatcttgatgagctggtgttggggagaagtgggaggctgaagatgcaccaagtcaggatccttcaggaccttaaaggaacttaagaaggcaatgaagaaccaacatggcagtcaatatggtctgatatatgccttcctttaaagcagcgttattgagatataatggtttttagtataattacagacttgcataaaccattgctgtaatctaattttagaacattttaaccaatatatgctttgtaaaaacaactctgctgggcagggaacagattggagggaggcgggcaagagcagaaacagtggctcctcactccgatccccagggtgagtcaagacgaatcattgttaagtgtgtacttccacctgtgcacaggggactgtggagggagtgctcctggaagaaaaagtttggaaagcaaaacaaatattcaactcatctatttatatttacttggtcaaatgcctaatgaacgtgtttttagatttcttttgatattatttttacaaacttcaccttcacccttcttcatctgaattaggattgttcacaaaatgaactgcttagacagatcaatgggggaaaaaaaagataatagttaatgagaatcaagccaaatacaagtattcacagagaaaataaggaaaagaaagaatatacattattactaaattttcccttagctatata

SEQ ID NO: 96541 - DNA, 17026 bp, Homo sapiens
tgtgcaatggtgcaatctcaactcacagcaacctcctcctcccacattcaaacaattcttctgcctcagcctcctgagtagctggatctacaggcgcccgtcaccatgcctgactgatttttgtattttcagtagagatagggtttcaacaccatggtcaggctggtatggaactcctgacctcaggtgatccacctgtcttagtctcccaaaatgctgagattacaggcatgagccattgtgtccagcctatagtgtttattttaaaataattaacagagttttttcagatgttttcagctctgatcttttcagatgttaatgagaatcatgccaaaattgggaagaaactataatttatttccaaccaatccctcttttagcccttggcaaaactggtgtaaaattaactgctatgcaattaaatgatgtgaaattatatccaagcccagtattacagtgtcttacaaaggtttcagtgcatgggcagcatgctttttaaactgccgccagtgactcaaagattttttttttctttttttcttttcttctcccaacccccattctgaagttacccacaggccactagccataagttcagtcaataattagcaaacacaagacatcacttccaagtttctaagtgttttaagagttgtatgccaggaaagggggttgaagaccaaatatatatttcataatatcacaagtcataaaattgaataatactcagcaacaaaaagaaataaagtactgattcatccatcagtatggataaattttaaaacattattctaaaagaaataaactggagacaataatacctgccatataattttatgcatatgaaattttagaaaaaagcaaatctggtatgtggtgacaaaagtcagatcagtagtttccagggattgggaatttccaaatttcaagcatagcagtcaaaaaaattaactgttatgcttgaaatgtgacattatttaatgcacttttgatataataaaattaatctaaaaataaggttaataaaaggatttgggttttagatctcatgataatctctaacacttcttttaattcttgtttttttctttctctttcttttttttttttattttgacccttgttacccagactagagtgcaatggtgcaatctcggcttactgcaacctctgcctcctagatttaagtgattctccttgcctcagtctcccaagtaggtgggattacaggtgcctgccaccaggcctggctaattttttgtatttttagtagagatagggtcttaccatgttggcctggctggtctcaaactcctaacctcaggtgatccatccacctctcctcaaagcatttcttaaaactttctcctcttacttttatatcagtttttgttaaacatcttgagttttggcaaagctaagctgaagcagataagactggtttggatggtttatcatgactgtaaattatgtaagttttcagtaggacaaaatttttgctcttttgtcctttatattctcttggaaactttacaggtttttcctaattaacttaattgacaaatgtttctatattatctttaattgcttgttaatctagcaatgttcttagggtttaaattattccaaacactggaataatgtcatggataatccttggtatttttctaaaacagtaagtggtttgggtcagcttaagcaacttaggatgtaagtctgggccaggtgcagtggctcacgcctgtaatcctagcactttgggaagccaacgtggaagggtctgtgaaaacttgtccagtatggtctggtctgctcctgtcctgccagtttggtagggtccagtcctgaccagtcttatcatatttggcctggtcttgtccagtttggtctggtcttattctgtccagttctgtctggtcttgaccagtcttatctcgtcttgtccagtttggtccagtcttgtctggcccagcctggtcttgtccagtttggtccagtcttgtctggcccagcctggtcttgtccagtttggtccattcctgaccagtcttatccagttcggcccagtcttgtctggtttggtctggtctgatcctgaccagtcttatccagattggcccattcttgtctggtttggtccaggcttgtccagtcctgtctggtcttatctgttctgacccagtcttgtcctatcggatttgatctggtctggtctggttctgtccagtcctgacaggtctggtccagtcttctctggtttggtccagtcctgaccagtcttatccagatctgcatggtcttgtccagtttggtctggtcctgtccagtcctgtccagtcttacctggtttggtccattctggtctgattcggtccagtcctgaccagtcttatccagtttggcctggtcttgtctggtttggtccagtcttgttgagtcctgtccggtcttatccagtctggcccagtcttgtcctatctggttcggtctggactggtctggttcagtccaatcctgactggtctggtccaggcttgtccagtttcatccggtcctgaccagtcttatccagttcagcacagtcttgtccggtttggtccagtcttgtccagtccttctggtcttaactggtttggtctgctctggtctggttcagtccagtcctgaccagtcttatccagtattgtcaagtctggtccagtatgtctgttttggtccagtcctgaccagtcttatccagttcagcccagtcttgtctggtttgatctggtcttgtccagtcctgtccagtcgtatgcagtttggtccagttcagtccagtctggtctggttcactccaggcctgaccagttttacaggtttcagccaggtctggtccagtcttgtccattttcatctggtcctgaccagtcttatccattttggcccagtcttgtccggtcctgactggtcttgtccagtttggtctggtcttggccggttcagcctggtccttgccagtcttgtccagttcggcccagtcttgtctggtttgttctggtccagtctggttcagtccagtcctgactggtcttgtctggtttggcctagtccagtcctgacccagtcttatgcagtctggcccggtcttgtccgctttggtccagtctggtccagtgcatttcagtgtagtccagttttgttgggtctggtctggtttggtatggtcctgtctgggcttttcaggcctggtcctgtcttgtccacttcagcccaggtttgtcttcttttttattgaagtttcactcttcagcccaggctagagtgaagttgctgcatctcagctcactgtaccctctgctgcagaattcaagggattctcctgcctcagcctatgagtagctgggattgtaggtgcctgccaccacacctggctaatttttgtattttttgtagcgacactattttgccatgttgtccaggctggactcgaactcctgacctcaggttatctgcctgccttggcctcccaatgtgctgggatttacaggtgtgagccaccttgcccagcctgcagaaacttttcatgttctctttcaagataaatcttaccttgttctgtcaccttacatagaaaacccaagtgtacttatagaccaatactacaaataatagaacttaacagtatggctggataaaaggttaatataaaaaaggcagtagctttttttatacttataagaatagctagaaaaaataaaaagaaaatagacttcagcagtcaaagtattcagtacctaagaataaacaacaaaaacaggcaagatctttacaagataaataaattttattacaaaacactgaaaaagagcagacaatgtttatatatagtaggatttaataacatcaattattttcaagttgatccacattttgaatgcaattctaattaaaataccggcaaggttttccatacaacttgatgaggtgattgtaaatacttaataagatagatttatggccccaagtagccagtatttctaaagaagaacagaatggagaatcttgccttacagataacaagacctgttttgaagctaaaataatcgagacagtgaggtacatgggttgatagatgggataagacagggcacaaaaacacattgtatgttgtatgttacatgcaacgttgttatgagataatggtggcatgccatatcagcgagctagggaatgagcatttaagtaaatggaactggaaactaattgttatttcaatgtatttgaaataacttccctacctcataactaagtacaaaaatcatctccatatagattgagaactttaaatgtgttgacacatgaaagagtttttcaaacactgaagtagaaaatataaaaatataaataagcatcttctagacagtgctgtccaaaagaaatacgtaagccacataatttaaatttttctaataatgcatttgaaaaggtgaaaatgtgaaattaaacatatttaacccagaatatctaaagtatttacaacacacagttaattttaaaagttatgtttgagatatttttcattattttttctcatacgatgtcttcaacatttggtttgaacaaatgtgttttacatttaaagtacatctcaattcagattaatgctactgtattgggcagcatagttttagaccttctgaaaggattgctgaacacatgaaatgcactaaacttgaaataaaagatcactgtactcttccatattaaaattaaggtcatttgtttagtcaaaaggaactttaaggaaaacctcaagctagaagattccaacatgttagtacaggaatatataagcaacgtccacaaatcagtaagaaaagtttaaacaatgtagtagaaaaatgagcaaaaatacaggcattttatagaagaggaaacatttggttaataaacatggagatattcaatctcactgggactaatgggaaagtataggtctagaccacaagaagacactgcattatatccatttatttaataaaaagcgacattgtaaaaatgtggagagtatgtggatcagcaggatcgcttattcactgctcatggggatatacaaataatggaaccacttaggaaaattgttaagtgttatcttctgaagttcagcagttacataccctatagcttggcaattctatacccacacttaacctccagaaacttggatatgtttagcactgctctttagacttaacaaggatgctcatagtagtaaatgttcacattagtaaatcttgaaaacaagccagatatatgtaagagtaagtgaattaactgataaatacatacacaggaacagtaaactgtcatcagaaaggatgactatagtaatgagtggatgaatcttagcaatgttgtggtatgtaaaaaaggaaatcccaagacaacataaaatatgcatttccacaaagtaagtaaaatttaaaaatatagccaaggcaggtggatcatttgaggccaggaatttgagaccagcctgagcaacatggctcggcttaccacaacctctccctcctggttccagtgattgtcctgcctcagcctcctgagtacttgggattataggcatgtgccaccacactgggctaatattgtatttttagtagagacagggtttctccattgttgctcaggttggtctcgaactcccaacctcagatgatccacccaccttgacctcccaaaatgctgagattacaggcatgagccactgagcccggccattagcactcattcctaatctccaacaactattaggctacaactgttcttaaaaattgttattgttatcttaaaaattgataaaggacccactgtggtcctttatcttgcacttctatgagccatctaagaaagtgaatttaaatgatatcttgtggctgtataactcctttaggcatagtttgttgtataaagttaatgtaatttcaaaaattttgtgtttgtgttttaatagactgacttccttttgatagtactgcgtgatgtgtttcaggcttatcctgaagttcacattgttcttatgtctgctactattgataccaacatgttctgtgaatatttcttcaattgccccatcattgaagtttatgggaggacttaaccaattgaaggtaatattgtgggggtgggataggaacatcttttgtgcagtagggtttggattttcttaatcctggaaattggagttataatttaaagaatacttaaaatacaggaaaaattacagtatcagatgtatcatagcatttttgaggagcttcttgtctgtgattttatacagtagtgagtacagtctgagaagtgagaccaggtttcatttactacttgagtagtttgcatatccagtaagtttccaggcgtttacttataaagccaaacttttaaaaattataatgaatagtcaaagggaaataactgtggtatatatgtaattatgggaattactcttaagagtttaagcagccaggatcaaattaagaatactttttagagcctgagcaactagattttgaattaagattaagggaagtatgtcaaggttatatatttctgataagtgagtgttctttagtatcttttttttttttctgagacagggtctcactctgttgcccagactggagtgtagtggtgcaatcttggctcactgcaacctctggctcccaggcccaatcagtcctcccatctcagcttcctcaktacctgggactacaggtgcacaccaccgtgcctggytaatttttgtattttttgtagmgacaaggtctcatcatgttgcccaagctagtctcaaactcatggacccaagcagtcagcttgcctcagcctcccaaagtgctgggataacagtctagagccactgtggccagccttctttactgtctttaggagttgttatcacagtttcctaggatagtcatctggtagctttggggaaaaaaaatgaattatggcacattcaattgagggcatgaaaataagagagaaacagtgtagatagatatgacgttatggctatrccagcatgctaagccagtgtaattcacaggggtacaggttaattctaaaactgctgtacatgtgtactggaattgacatacaagtaaatggatggcaagtggtgggagctcagtttctttctttcttttyttttttagatgaagtctagctctgttgcccaggctggagtgcagtggtgcagtctcagctcactgcaatctcgtcctcccaggttcatgtgattttcctgcctcagcctcctgagcagctaggattacagacacacaccaccacacccagctagtttttgtatttttagtagagatgggctttcaccatgttggtcacggtggtcttgagctgctgaccttgtgatctgcccatatcagcctcccaaagtgctgggattacaggcgtttaccaccgygcctggccttgggagctcagtttcttactactagaaagagaagttaaacctaagtgggattgccagaacaaagcatagggtaccggattatactcaaagagatcagcatgaacttgtgttcagctaaatggagatacaaatgggtaggtatagaaatatagatacatgtggatacatgtgttagtatacatacacatttttttctagctctgtgtgctgagtgggagtagaagcagtgacacccaatagatagggatatgccccacatccagattttgtttttaatgccattctccaattaaaggaaccagatatttctggagaaatggctgcttctaggatgaaacagaatatacaaaaatgagcctggaacatcttgtgttttaaagtaaggtagtgcctaaaagaagcccatagcaatggggataaatggctacaggagccaatctgaaagagttcccaatggccaaggctggaacagtttaatgaaataaaaacatkgcattagattaccaaaatgtaaaatatttatgtgtctatactgatatgtaaataagtggtttaataaaaataatagtgacaagtctstcttacaaaataatttcaaataatttatgtaaatggtctccccatttttcaaacaagtgggtctgaactacctaacccctgagtgagctgtgtttaataactcctaaagagtacagcgtgggaagaagggaaaatgagtaactttacagtggagaaacttggcagacactaccacaggtgatcaagttttaacatcatgaagagtaggtcatattgataagatgtgcccttaatatgatgcgatgagaatggcacttayrgartctttggatatagagggtgtttcaattataaagacattctggggccatctgagaatcttgggcataattgatcaacagatcttccagtccttgcattgagatccttcttcagattaactagaagccattttatgtgtgcatactgatagaggaaggatagactgcggtatattgttttatttaagttactactttccatgtacaactccaacacaatggaagtgtacagataagtgtttggttgaatgttatacacagaggataccccaactggctctgtgggaacatgtgtaaaagatacttcaccttccttcaaggtctaagagagggaaacactgagtttggttaggaaaataaggttattrctactggaattttttggcatttgtgaggaatcagactagagaggtattaaagtagttttgaactatgaattagcaaatgaatttgagtctgctccattgtgaaagttgatagtacttacctgactggatcgtccctggcagaatattttctggaagactgcattcggatgacccactttgttcctccaccaaaagacaagaagaagaaggataaggatgatgatggtggtgaggatgattatgtaagtgaatttcatgaagaatttccattgtgggcaaattgtcaatgcagagaaaaaaggagttaatataacatgcaacttattagcattacagaagatttttaaaaaactgactataatgtctgcctttggattaattgatgtattttactgcaaaaaattacaggttcagtgrcaagctgttttctatcacgagttaaattatttctggcataaaagtcaaaagaaaaaaaagaaagaatacaatgtttaaaggccaggcatggttacagacaacaccattgcataaagttttgctactcagtattttcagtaggctgcagaacccggcaaactggtagaaaggcagaatcctgtgccccaccctagatctactgaatcagaatttatgttttaacaagatacccaggtgatctgtatgtacaataaagtttataaacagcagctatagcttcagctacaggagactrgagatgacattatcaggtggacggagtattaaatcagggagcaaagagggatttcctaggagaaacaggaaagaaaagacctatattgtagtgcttgagagttggacaaacggtagtataaaaatggatggtttatctggaaatagacagccagcaatgcagaatttgcttgaaaacttaagattgtatctttttaatcaaaagatctgaagatgtaagtgaacagcagattagaaaatttagcaggaaaaagaccatttgtaacaactgtttctcaacttgttttatcattgattctaatgtaaactttttggaaaaatgctacattatttcactaatattaagaaagaagtatactccttagaaggctccatgagaggtttgagtcaaatttaaaatttgtgcttgagttttagtcctatcctgtgagaaatactagttagtagaaaagttcagtatattaatgtaagctctacatttttggaaattaaatttctctgtattctgtagtgtatgaccagtcaactagaataaataacgacattacaagtcattagagtcactagaagaaatctagaagacttacctcatgagctgtagtaactgtcatgagctgtagtaactgtcatgagctgtagtaacagacagtccaaaatatgtctccctgttttttacaggaaaattgcaacttgatctgtggtgatgaatatggtccagaaacaaggttgagcaggtctcaattgaacgaaaaggaaactcccttttaaytcatcaaagctctacttaagtacattgaaactcttaacgtttccggagctgttgttttgttttgttttgttttgttttgtttttttgcctgtctggaatttgatttatactgtgaagaagcatttggaaatgaatccacattttggtatgagtctttaaattctcacatatttgagagtgaaaatgaatgtttttgctagtgccttagccagtatgtgaaaacaaaattttgtgttgtcaatactttcgaagaaaaaaaatatgtacaacggagagctgtttgaaaccagttcctatttttagtccctgattgttctgtactgttatatatgggaagccatcagtaccagattctacttctgcattctcagattcctccagagcaacagcgcaaagtgttggatccagtaccagttggagtaaccaaggtaaatattaaacattacaatgatgggattggaagtgatgttgatattaaacaaatgttacaggtcttcaaagagctacccaaaaaatygtaacccatctaaattgaggaagaaaaaaggagtcttctctttctgagcttagtagattgttcattaattggttattgggtgattttcttaggacttctgtaattttcttgtcatttgttacatacataagcaaaccagtcgtttcaagtacataataagaatattatctggagtgtaatttttctttcttcacaggttattttttccacaaatattgctgaaacaagcattaccataaatgatgttgtttatgtcattggctcctgccagttagttactgggaaacctatttacctgttccagtattaccaactggaaacttcttaccagttaacagaatgaaaaacatcttatttttaaactcctgtgttcttatatctccaaaactattgtgcatctacatagaattataggtaattgataattaagagtaattatttgtgttgattactgcaaataagttatggtagaaagtgacaaagcttgaaatggtaactgatgattacttctcattgttcttggctgctggtatttcacttatttcccattgggtgtttccattgatcactgccatactatagcatgctgtttgatgaataaagatgaccagtgtttaacacataacaaatatcctactttgaaggacactcctttaaggattaaaggtcttcattttggtatgagatgagcctggaaaatataccaggaggcattatgtgtagatacatagatgtgtagatacatagattagatggtaattgataaattgaaaggacaaaaaagttgaaacttggttatatctggccaacttgtgccccaagatatctctatataatcccttagtctgtcctgacaatgaaaacaatttgctgccaacatctattttaggaaatggtgaatagcattctgtgtcaatcccagtagtttagtggcaactgtctctgtatgtaacattgaaggaatctgaggttgcttgggaattcaaaaggaccacgtaggcatcactaaatatagatatcctaaaatttacactgaacttttgaatagagatgacttaaataattattttcttttgtgtatgtgccatattccatttaaatgctttgcatttgttaatttacttaatgtttacaaaaaaaactctataaggtagctaatggcatggaaagtttgaccaaggcagttcagctggtaagtggcaggtggatgttacattgccttttagtaggttgacaaataggagtgtgcagtcaaattgctgattcttattgtgtcattcatgaatagtcaccacatgtaggtatggctttaactacatagtggaaagcattcactacttagtggattagtggatatatcatagttattgataatacacacgagtcttagaattaaccactctttcctatgtaggcagaaagtaaaactcttcactgctcacaacaatatgaccaactatgctagagtacagacatcataaacaaaccttgagcagcggaaagggtgagctggccgagtacgtcccggattctgctttcacctctgcagccaagctcgttttgacaggtaagtccaattcttgacatttagtaagggattttcttctgttccattttttgtcgttctgttctctgtaagaacagacatgtgcagttatgtaaacctgccaatttaagctgatctaagtcttgccagtcatgttggaatcaggtgtaaatgtttcttaagaatcttcatcacaaatcattttagagaataagccagaattagaaacatagagacctagattttaatattatatgtgcctaatacattgtataacactaaatggttactgtttaggcttgaatttccctcattctataaaatagtaagttacttaacttctcttctttcctcagttgtaaaaagaatatggtaaataatgcctaaaccacagggttgcccaagaattaaatgagttaataatgtaaaatactttgaacatactctggcacatcatgatctcccaataaatgtttgctattgttaatttatagaggtcaaatatctcctttaaaactgaaatgcttgggagcaggagtgcttttttattttttattttttattgtaatatttgaattgtatttacaagtcaggcatccctaatctgaaaatatgaaatctaaaatgctctaatgaacatttcctttaagtgtcatgtcagaagtcaaaaagttttggattttaaagagttacatctgtaacagtgattctagtggcaataaaattacatgaactagaaaggtggggacgttgtagagaaatcttagtatgagttatcatcctgcaaaaagtcttgctgttgttttcaacccatgtttgtcaacaggcaaggcctgaagagaccatggatggagctaataaattcgggattttggatatttttttcacttttcttctcagcttaaaaggtcaacaagttgtgaggataagtcagaaatcgctatgcaaccagattaaattttgtccacagtgtgtatagtgaatgaaaaaaggtttgatggtaattgtaaaataaaaggatgaggaaagggaagctctgtatccctgattaccatgctgcaaaaactttattggaaacaatgtttttgtagaatctgcaaaaggacattagggggcgcatagagatctatgctcaaaaagaaaatattttcagatataaactagaaagaagctttctgcaaaactgctttgtgatgtttgcgttcatctcacagtgttaaaaatttcttttcattcagcagtttggaaaaactgtttttgtccattctgcaaatggacgtttgggagctctgtgaggccaaaggtgaaaaaatgaatatcctaggatgaaaaatggaaggaagctatctgagaaactgctgtttgatgtgtgcattcatctcactaagttaaacttgtcttttcattcagcagtttggaaacattgttttggtagtatctgagaagggttgtttgggaggactttaaggcctagtgtgaagaagaaaacatcttcagatagaaactcgaaagtacctttctgagaaaatgctttgtgatgtgtgcattcatctaactgagttaacctttccctgaattcagcagtttggaatcaatgtttttgtagaatctgtgaatggatacttgagtgctccttaacacaaatgatgaaaaagtgaatatcccgggataaaaactagaaggaagctatccgagaaatcactttgtgatgtgtgtattcatctcacagagttaaactttccttttattcagcagtttagaaacactgttttggtagtatctgaggagggttatttgggagcactttgaggcccagtgtgaagaaggaaatatcttcagataaaacctagaaagtacctttctgagaaactgctttgtgatgggtgcattcatctgagagagttaaacttttctttggattcagcagtttggaaacactgtttttgtctattctgcaaatggagactgctgagttcattgaggccaatggcaaaaaagtgaatagcccaggataaaaactagaaggaagctatttgagaaactgcattgtgatgtgtgcattcatctcacagagttaaagttttctttcaattcagctgtttggaaatactgttttggtagatttctcaaagggatatttgggagcacattgaggcctatggtgaaaaggaaatatcttcagatgaaattagaaagaagcttttgaagaaactgctttgtgatgtgtgcattcacctaacagagttaaactttttttggattcagcagtttggaaaccctggttttatccatcctgcaaatgaaagttttttagctcattcatgccaaaggtgaaaaagtgaatatagcagaataaaaactagaaggaagctatctgagaagccgctttgtgatgtgtgcatccatctcacagtgttaaagctttctttccattcagcagtttggaaacactttttttgtagaatctgtggagggatatttgggagcacattatggcctacattgaaaaaggaaatatcttcaaataaaaactagaaagaatatttctgaaaaactgcctcatgatgtatgcattcatctcacagagataaacctttctttggattcagcagtttggaaacactgtttttgtccattctgcaaatggacatttgggagctcattttggtcaatggcaaaaagtgaatattccaggataaaaaccagaagaaaactatctgagaaactgctttgtgatgtgtgcattcatctagcagagttaaacttttcttttcattcagcagtttgtaaatactgtttggtagaatctgtgaagggatatttgggagcacctcgagggctatggtgaaaaggaaaatatattcagataaaaattagaaagaagctttctgagaaacagctttgtgatgtgtgaattcatctcacagagttaaacctgtttttggattcagtagtttaaagacactgtttttgtagaatctgtgtagggatattttggagtcactgaggccaaaggcgaaaaagataatatcccagggtaaaaactggaaggaaggtatctgagaaactgctttgtgatctgtgcattcatctctctgagtagaagtcttcttttcattcagcagtctggaaatactgttttggcagaatctgtgaaggaatatttgggagtgtattgaggccaaaggtgaaaaagtgaacataccaggataaaagctagacgatacctatctgataaacggctttgtgatgtgtgcattcaacttgcagagttaaacttgtctttttattcagcagtttggacaaactcctttttagaatctacgaggggttatttttgagggctttgaggactatcatgaaaaaggaaatatcttcaaataaaaactagaaagaagcattctgagaaactgctttgtgatgtgtgaattcatctcacatagttaaacctttctttggattcagcagtttggaaactctatttttgttcactctgggaatggacattagggagctccttgaggccaaagacaaaagartgaatatcccaggataaaacatagaaggaagctatctgagtaactgctttatgctctgtgaattcatctcactgagttaaacctttcttttcattcagcagtttggaaacactgttttggtagaatctgttaaaagatattagagagcgcttagaggccaatggtgaaaaaggaaataacttcaaagagtagaaagaagctttctgagaaactgctttgtgatgtgtccattcaactcacagagttcaacctttctctggattcagcagtttggaaatactgtttttttccattctgtgaatggagattcctgagctcattgaggccaaatgtgaaaaggcaaatatccaaggatgaacactggatggaagctatctgagaaactgctttgtgatgtgtgcattcatctcggagagttaaatctttcctttcattcagcagcctgaaaacactgtttttgtagattctgcaaagacatatttgtgagcacaatggggcctatcgttaaaaacgaaatatcttcagataaaaactagaaggaagctttttgagaaactgctttgtgatgtgtgcatttgtctcacagagttaaacctttctttggattcagcaatttggaaacactgtttttgtagaatctacaaagggaagtttgggaactcattgaggtcaaagatgaaaagttgaatatccctagataaaaactagatggaagctatctgagaaaccactttgttatgtgtgcattcatctcgcatatttaatcctctcctttcattcagaagtttggaaacactgtttttgttgaatctggaagggatatttgagaatgcattcaggcctgtggtgaaaaaggaaatatcttcagataaaaaattgaaagaagctttctgagaaactactttattatatgtacattcatctgacagatgtcaatctttctttggattcagcaatttggaaacactgtttttgtagaatctatgaagggatgtttgggtactcattgaggccaaagatgaaaaatcgaatatcccaggataaaaactagatggaagctatctgagaaacagctttgttatgtgtgcattcatctcacagagttaaacatttcttttccttcagcagtttggaaacattgtttttgtagaatctgaagggatatttgagagcactttcaggcctgtggtgaaaaaggaaatatcttcatataaaacattgaaagaagctttctgagaaactgctttgtgatgt

SEQ ID NO: 96542 - DNA, 96519 bp, Homo sapiens
  misc_feature (1)...(96519): n = A,T,C or G
ccatgaagagtaggaagataacccaacctacctctcgctgggtctatggggaaaatattgattaaggcagagcaggtcttcagagagagactaggtttggtgagtaagagattcgaaaagctagaagggaatgaggatatttaagttactcttattgcataatatataaccccaaaactttgggtgcttaaaatcatcttttttttttcatggttctgggagttgactgggttcaggtaggtgattttcactcggggtgtctcatgctgttgcagtggctggggctggagtcttcacaaagccttcttcagtcccatgtctggcaactgatgttggctgtcatctgaaacctgtgctgggactgttgattggaacatcaaaatgtggcctctccctgtgatctgggcttcctcacagcatggtggctgggttcaaagagcaagcatcccaggaagaccatggagaaaaggtgtccccttttatgagctaccttgaatcacttctgccagtcacagaccttcttgaattcaagggggaggagcacagacctgacctcaccatgggagcaatgttaaagttatgttgaagaagagcacatgctattattattattatgtcttgctctgtcacccaggctggagtccagttgtgcaatctcgactcactgcaacttccacctcccagattcaagtgattctcctgcctcagcctcccgagtagctggcattacaggcacatgccaccatgcccagctaatttttgcacttttagtagagatagggtttccccatgttggccaggctggtctcaaactcctgacctcaggtgattcacctgcctaggcctcccaaagtgctgggattacaggtgtcagccaccacacctagcacatgctattagtaaaaagtcagaaaacagtcaggtgagatggctcgcacctgtaaccttgcactttgagaggctgaggtgggcagataactggaggtcaggagttcgagaccagcctcggcaacataatgagacccccatctctatacaaataaaaaattgaaagtcagaaaaaaaaagatgttggtgaggattcagagaaaaaaggaacgcttatacaccgttggtgggaatgtaaattagtacaaccattacagaaaacagtagggagatttctcaaaaaactaaaaatagaactgcaatccaaccagcaatctcactactagatatctacccaaagggaaagaaatcaatatatcaaaaagtacctgtactcatatgtttatcacagcactattcatagtagcaaagatatggaatcaacctaagtgtccatcaacagatgattggataaagaaaatatggtacatgtacaccacggaacatgacctagccacataaagaatgaaatcgtgtcttttgcatcactgtggatagaactggaggccattctcctcagtgaaataattcagaaacaaagtcaaatactgaatgttctcatacatgggagttaaacaataggtacacatgaggagcaacagatattggagactccaaaagatgggaggatgggaggagggtgaggggtgaaaatttcctattgagtacaatgttcactatttgaatcatggctacacacaaagcccagacctcagcactccacaatatatgcatatagcactccacaatatttgcccctggtccagttgtgaagtctcatacagagtatcaatcagtcaatgttctcccttggttttgaatgtatttcttttacttcaagagtaagttgtcaagtgtggtggctcacacctgtaatcccagcactttgggaggccgaggcgggcagatcacttgaggtcaggagatcaagaccagcctggccaacatgatgaaaacctgtctttactaaaaatacaaaaattagccaggcatggtggcaggcacctgtagtctcagctactcaaaggctgaggcaggagaatctcttcaacctggctgatggaggttgcagtgagtcaagatcacaccactgcactccagcctgcgtgacagagctaaaaaaaaaatttataaaaataaaactaaataaataaaaattgtaaaaaaagcacacgggatggcagaacttgttgcagccaccttggaatatagaatttgccacagagggcaagtagaaaagtatgtcagagtttaagatttcagaaatctagccatccaaaaggatcataagagccattcctgtggcggctttggggagtggatgcaaaggtcatcagagctgagaaagacgtgggatgatgagtcaggcgaattgcatgctcatccacatggatgctgacatcctcaggaaagcagaaggacttcagataacagagggcaaaacacgatttcattctttttttttttttttttttttttttttagagacagggtctttctctgtcacccaggctggagtgcagtggcatgatcatagctcactgtagccttgaactcctgggctcaagtaatccttctgccttggcctcctgaatagttagggctacagtgtgtgccaccacgcctggctaatgttgtatttttattttttgtagagatggggtcttgctatgttgcccaggctggttgataactcctggcctcaagcgattctcccacattggcctcccaaagcattgggattacaagcgtgagccactgtgctctgcctcaaaacactcttttaaaagcttttgtttttttttttctgtagtggtgaaataattaacctctgtggtgaggacttcctttttatttgggaaaagatatttgctgtgggcctattgtttctgcaaaaatactagtagctaacattttttgagtgtccattcattcattcattcattcaaaatatatatatgggggccagacatggtggctcacacctgtaatcccaaggccaaagcgggtggatcacctgaggtcaggagttcgagaccagcctgaccaatatggtgaaaccccatctctactaagtacagaaaaaaaaaaaaaaaaaagccaggcgtggtggtgcatgcctgtaatcccagctacttgggaggctgaggcaggagaatcacttgaacatgggaggtggaggttgcagtgagtcgagattgcatcattgccctccagcctgggcaacaagagcaaaactctgtctcaaatttaaaaataaaaataaaaataagtgagggcttatgaggcatcaaaggtcatttatagaatgttgttagcaatttaattcatgatagctaaaaatgggccagatgtccatccgtagtagaatggacacgtaaaattgtggatatctaatataatggactattatacagtaatgaaaaataacaatcactattcacaatagcatgggtaaacctcccagacctattgatgaaagaagccagatgatcaagagatctcatcaactgagtaaaggaatctataagaagggaagttgcaggagtctacttagatttattaaaatcattagggatgtagagtgaggtttttgttttttgtttttgtttcttaatcagtgtgtcattctgtcatccaggctggagtgcagtggggcaacgttggctcattgcagcctcaatccacacccctgccccaagccctctgggctcagtcagtcctcccaagtagctggaacaacaggcatgcaccacaccttgctaattttgtatatatttttgcagagaccagggctccctatgttgctcaggctggtcttgaactgctggcctcaagcaatcctcctgcctcagcctctcaaagtgttgtgagccaccccacctgggcagagcaaggatgtttttgaggactgtggtagatagcttcctcatattcatgtcctgtgtaatcctctccctctgagcatgggctggacctagggactattttctttttctttctttctttcttttttttcttctttttttgagatggagtttttccttgtaagccaggctggagtgcaatggtgtgagcttggctcactgcaacctccacctcccaggttcaagtgattctcatgcctcagcttcccaagtagctgggtttacaggcatgtgccaccgcatccggctaatttttgtatttttagtagagacggggtttcaccatgttggtcagctggtctcgaactcctgacctcaggtgctctacccacctcggcctcccaaaattctgggattacaggtgtgagccaccatgactggctggacctagagactattttctaagtagcaatagacttcgtaaaagtgatgggatgtcacttctgggattaggtttcaaaaaaggactgtgatctcactctcattttctttttctgtctcttcctctttctcctccctctccctggggtaagcctgccgcttcttaccaagaggtgcaagtggacaggaaatgatgtctccagccaacagccagagaggacctcaggcctgccagcagcagtggaagtgagtttgaaagaggattctgaagccttgagagagctgcagccctggctgacagcttgattgtatcctcatgagagcctgagccagaggacacagctaacctcacccagattcctagcccgtggaaactgtgagggaaaaaaaagtttattgtttattaactgctaaatttggggtgatttttacccaacaatagataacgaatacaaggatattgcttattattcaaaatcactatataaagcccctgaaaaattgaaagctgcaaccagggaaacactgaaaatctccaagaaccctgtgtttcttcttaaagacagtgagaaaaagcacatacatctgttttccttttagttttggccaccaggaagctcagagccaaatttatgatgcaattttaataactatgtaagcccctatggcctgcttatctgtgttcttattcctggcctttcattttattctgacttttctttttcttcgtcctgattgtattagctcatctttatttttctatattatatgagttatggtaagcaacttcaaattcagcttacggaaaagcaaggcattcgtaaatctctctttttttttttgagactcttactctatcgcccaggctggagtgcagtggcacgatcttggctcactgcaacctccacctcccgggttccggcaattctcatgcctcagtctcccgagtagctgggattacaggcgcccaccacgacaccgggctaatttgtttttgtttgttttttgtatttttagtagagacgcggttacgccatgtaggccaggctggtctcgaactcctgacctcaagtgatccacctgcctcggcctcccaaagtgttgggattacgggtgtaagccactgtacccggtccataaatcattttttaaaaatagtttttaaatttaaaacatagttttgcacattaaaaaaaaagttttgcacaggtctaaccgaaggtggtggtgggaagatcaggtcataggtgtgggtctctggagctccaagcattggccagggttgatttggattgggtcagaaatatacaacgaaaaagggaaaaaggatggcaattgattgccatccccagagggaggggccgagggttcgcccagtcacccacagtggcatccttgcaatgtgctagttagaccgctcctttaagtccctcccgcactggcccgctcggccccgcccctctctggctccgcccctccccacccctgccccgcccatccccacccctgccccacccctttctcccccgggctccacccctcgcgcgcgaccggccgcgcggcgcagcgccacgccgcctcagtctccgcccgccgatccggcctcttcggccgttgcgcactccaccccctccctccgcgcccgcgcgcgccttccccgccccgtccgcctcactccttttggggcggttgggccgcgcgcctgtgggggcggggcccggagcaggccaccgagccaatggggcgcggcggcggcggcggcggtggtggcggcggcggcggaggcggcggtggcggcggtggcggctgggtcgggccccgacgggcggcggcggctgaggtggaggcggagggaggcggcggcggcggcggcgggaagatggcggctcccgtcctgctaagagtgtcggtgccgcggtgggagcgggtggcccggtatgcagtgtgcgctgccggaatcctgctctccatctacgcctaccacgtggagcgggagaaggagcgggaccccgagcaccgggccctctgcgacctggggccctgggtgaagtgctccgccgcccttgcctccaggtagccggcttgggggagtgggccaggagcggccgagcggggcgagggtggagtctcggggtggggagcgcgcggcgggagctcaggcctgggggcggcggggaccgggccgctggggaactgacggggtcgggtcggggccaggcggggggcggcggcggggcgctcctgcccggggggcggcctgagcccaggccgcggggcggaggtggcggggccgcgaggcagccggggagggatgaggtggcagagtgcagccgggaggccggggcggacgcggagcggtcgggcgggctggggcccggctgtgcaggagcgcgagggggctgcggagggtgggtccaggctggcttgacaggtttcctggttctcgggaggcgggccgggggtgtgggaccttgtccaccgcacccttgagaccagcggcaacctcttgtccccccgatcgctgcagccgaggctttggggccggcgcggagacaggggggttgcctttcccactgtcttcctggtgctaggacaggtgtttccgtggtcaggcctctttgtactccagcgctagtgagaatttgcagacttaactgggacggtgacatttgctggcaaacacgaatttgaccctactgtggaagaagatacccgcacttaacatatctgatttcttggattccctctcgtatgtttcagtgtgccaggagaaggaaatggtctgagtttgggtctagtttaagcttcattggagtaaaggacaagtatgttatgtatatggtggtgttttaggcattggaatgacttttaaacgttgttgcctattagcatattcgagaccagcatattggtcaggctggtctcgaactcctgacctcaggtaatccacccacctctgccttccaaagtgctgggaatcaagcatgagccaccgcgcctggcctgcttaagtgcttaaaattgacttttcttggccgggcacagtggctcacgcctgtaatcccagcactttgggaggccgaggcgggtggatcatgaggtcaggagttcaagaccagcctggccaacatggtgaaaccccgtctctaccaaaaatacaaaaattagctgggtgtggtggcatgtgcctatagtcccagctactcgggaggctgaggcaggagaattgcttgaacctgggaggcagaggttgcagtgagccaagaccacaccattgcaccccagcctgggcaacagaatgagactccatctcaaataaataaataaaatataaataaataatttttaaaaattgacttgtctttaaaaaagtgtatttagcatacactctaaatattctcatagttatatcctgcaagagctgcatgtttgtgcataaaacatcaagtagtatattaaaagtatgtataagtacatgtaagactaaaggtaactggatctctttatagttttaaatgtgaatttaatatgttgtgactgaaagtgatgtttcattgtgtagctgtggacataaaatagtttaacttagatgcttgccaaaggagggtaggtaaaaataagatttgctaataagaagagtagataacttatttgccatgtatacagtgaaattaagaaatttgttcaatttgatcagcctgtttataaactacttgcaaaaatcaagtagcttataaactacccatttaataaatgaatttacaaatcaacttgttttgcaggtagtttatatgcaggctgatcaaaatcacatatgtatatatacatatataatcacatatatgtacatatatagactcattttcttttggaagtgtgtagacaaaacatcattgaaagtttttattttgtcaagctgaaagacacttttctttttttttctgagacggagtcttgctctgtcacacaggctggagtgcagtggtgcgatctcgactcactgcaacctccacctcccgggttcactccattctcctgcctcagcctcctgagtagctgggactacaggcgcccgccacaacgccctgctaattttttgtatttttggtagagacggggtttcaccatgttagccaggatggtctcgatctcctgacctcgtgatccgccctcctcggcctcccaaagtgctgggattacagacgtgagccaccgcgcctagcctgaaacagactttaaatgaaagctgattattggacacctcaagttagttttttttgagtggtgattgccatgtagcagtagtactcaaatatgtgactcttttaggaaaagaaagtttgagcccagaggaaagttaacagacaaagattctgaagaaaatcatcttccaggatccagagtcagcacgtggttttggattgctcaaactcactttattctcatttcgcaagccctgtgtcttaatccaaacacggtaaggtagagattaatgagagaatcttgagaggcaggtgttatctgtgtgtaaagtcctctattattttggggaggcataatgatggaaagttccagattttatatttctaaagaaatatttcaccgaaattagtaggctacaatagaaatgctgatttttcaattctaccatgtacagccagtaaaaacaataacacaccactatctcctgtcaccatcatttcatttaacaaaaggatatttccattcaaacaatttgaaagaacagaatctctcagaataaaatatttttaaatggaatcatttagctatatggaaaagtttactttcagaccagcctggccaacatgctgaaaccccgtctctactaaaaatacaaaacaagctgggcgtggtagcatgcacctgtaatcccagctactcgggaggctgaggcaggagaatcacttgaacctgggatgcagaggttgcagtaagccaagatcgcgccattgcactccagcctgtgtgacagaacgagactctgtctttaaaaaaaaaaaaaaaaagtttactttcgtgtccttactttttcccattttcccataaatcggtgaaaactctgctgcaaacctgcaccagcctgccagctaacattcagttagcagtccctgcccccttggtttggtacactgagctcaaatctaagggatctgggtgggcttccacctctcccagttcttaggcttgtggccttatcttcatggtgcctcagtttcttatgttaaatagggcttttaacacctacttagggcctggtgcagtggctcacacctgtaatcccagcagtttgggacgctgacacctggcagacctcttgagctcaggagtttcagaccagcctgggcaacagggcaaaaccgtgtctttacaaaaaatacaaacgttaaccgggcatggtggcgcatgcctgtatttccagcttcttgggaggctgaggtgtgaggatcacttgagcctgagaggctgaggtctgcagtgagccatgatggtgccactgcactccagcctgggtggtagagagagaccctgtctcaaaaaaagaaaaacaaaaaaacctactttgccagattagtgttacgatgaaaagtgatacatgtatgttcctgaaataaagcctgtcctcagttatagctgttaccattgattggagatgttcttttttttccagtgtttgataataaatgcctttaagtataagtttcttgtacatacttgtttatatgtttaaacattaattgttttaatgtagtttattgctgactttatagcatagtataaagatgtgttcatttaaaacaattttgaagttgtgcaagagaaactaatgcagaatattcttttttttttttttgatggagtctcgctgctctgtcacccggactggagtgcagtggcatgatctcagctcactgcaacctccacctcccgggttcaagcgattctcctacctcagcctcccaaggagctgggattacaggtgcccaccaccatgcccggctaatttttgtatttttagtagagacagggtcttgccatgttggccaggctggtcttaaactcctgacctcaggtgatctgcctgcctcagcctccgaaagtgctgagattataggcatcagccaccgtgtccagctgtaatatgcagaatattctatgtaggtattttctatatataagaccccctctaagaagggtttctatgtaagaatagtacaaatgatctggaaaggttaataggcttgacaaatctatgtttcttaaaactgtaaaaatagtctggttgtcctatggtctatgtatagaacatataccataggggattggtttcaggacccctgtttttactgagatcctggcatactcaagtccccactgtgggccctgcagaacctgaatgtgaaaatttgggcctccatatatgcaggtttcggtctgcatttggttgaaaaagatccacgtataagtgagcacacacagcttaaacccgtgttgttcaagggtccactgcatttgaaaatcaagtccataaaaaagttgccttattttacaaaatgtcggattactacctctcccatatcttaaaaaaaaagtaccatctatttactaccccattgagataataaaacttttagaattagaatagaacctagggctgggcatagtggttcacgcctgtaatcccagcactttgggaggctgaggtgggtggatcacctgagttcaggagtttgagaccagcctggccaatatggtgaaaccccttgtctactaaaaatacaaaaaattagccgggcatggtggtgggcacctgtaattccagctactcgggaggctgaggcaggagaatcacttgaacccgggaggtggaggtagcagtaagccgagattgtgccactgccctcctgcctgggcaataagagggaaactctgtcttacaaaaaaaaaaaagaacctagaagtatttactgctctttgctttgtctgagactcagaggttaagtgacttgcccaagatagcacaggtagtagcaaattgagacttgacacctggcttccagagtacttatttaaagtcccctttgcacccccattttaaaaattaaattcttggctggacgcagtggctcacgcctgtaatctcagcactttgggaggccgaggtgggcggatcacgaggtcgggagatcaagaccatcctggctaacatggtgaaaccccgtctctactaaaaatacaaaaaaaattagccagacatggtggcacacgcctgtagtcccagctacttgagaggggctgaggcaggagaatcacttgaacccgggaggtggaggttgtggtgagctgaggtcgtgccactgcactccagactgggtgacagagtgagactctgtctcaaaaaaaaagaaaaattaaattcttgtctaggtaaggcattcgctgcttcggatttgaaagataacaaagcatgtacagtgaaaagtctccttcatatcccttccaccagacagttctcccgctcagtagaccgctgtgaaacttttcagagccgtttgacacatagacaaacatccacgtgaccatatgattcctccctttttttaacatggaagtatcacgtatgcatccttattgatagcctgctttttgcttggcattcgttccattgctcccatactttaaatgcttatgttcatatttagtgaaatgttaataactgctagtacgtaaaagagaatttgttctagtagttttgactaaccaagataaatttcagaaataaaattcttaacattatcattgtttcttggtatggaaatttcagaagcaggttgaactgaaaagagtccaagaggaatagagaaatatcacaaggaagtgaatctggactgtagtagagataaatgttaatacttacagataatgcttactatgtgctaggcagtgttctaaatgttttgcatacattattgaagtctctcaagagtcccatgaggcaggtagcttttatcaccattttacacatgagaaaactgagcaacgcagactaacacttgatccaggtagtacagtggcagaggcctgattctaacccaggcagtctggctcaagagtccaagctctttaccactactctttctgtcttcctttcttcctttccctcccaccctccttcttcctttcctttcttttctctctttcttttccttccttcttttctttctttttccttccttccttccttttctttatttttccttcttccttcctccttcgttccttgcttccttctttccttttctttttctttcctttcctttttttttctttcctttcttttctttcttctttaactttttgagacattgtctcactctgtctccccaggctgagtgcagtggtgcagtcatggctcactgcagcctcaacctccctgggtcaagtgatcctccaacctcagcttcctgagtagctgggtctacagttgcacaccccaccatgcctagctaattttttctatttttcatagtgacgaggtctcactttgttgcctgagttggtctcaaactcctggcctcaagcagtcttcccacttggcctcccaaagtgctgagattacaggtgtgagccaccacgcccagccttttaccactactttaaattccatttagatctaatattgatagagtgataaccatatcaaccagattttttaaatatgcaaacaatggtgccagtttctgtatctatgtgacaaaaatatatagagtttgtggtatcacttttacctgtttagagcactctttggaaaggcagggaaattactgtgaaggtattggtattccagaagtaagttcctggagtgtttgccttctaaggtgtgaggacgtggtttgtcacacccagttaactaacagatagacggtgtagtgagctgtccggaagacttagcaggttagcctagggaggaaggagaaaggggttctgggcacatggagkgagggggagggaaaagagtttgtttgaatctgtcctagattggggtagctttttcggagggaggccttgtcgtgtggacctgctgcatataaagacaggagaattggacctgaggtgtggtgctagctaaagcgccacacagatctgggaatttaagaggagttcatttcctcaatcattaggaagaacttgaaagggtagcaaactgtggtcatttgagaagaacagcaagtggtcatatttgaatgtaacatattcaactgggttgggaaagaaccagaatctagatcttgcccatagcaagtgcaaaaccaggcgttcttataaaccatgtactcttgtaaacactgataagacatagcactgagtcctgagcttttcttctataaagttattgtacaggttgaggatccctaatccgaaaatccaaaatctgaaatgcccctgtgagcatttccgttgagtgtcattggcactcaaagttttggattttggaccatttcagattttgaactttcagatttgggatgctcaaccggtatataatgcacatattcccaaatctgaaaaaatcccaaatccaaagcatttcagctccaaagtgtttcagataaggaatattcaacctgtactacattgtactaggcttgtattagattcccagttttcaaaatttgtatctcagaatccctgttctctgtcaatgaaacagggatttcatacacctttgattcacattttaatgttttaagtttaaaatattataaatgtttatacacagtcaaatgaatctcatgctaaattttaatatattagagacaactgatttgtctgccaggttatctcaagagagttaatactgagtgaaaacaagtgagaaccctaaaagattacatactgtatgattgcatttatgtaacattattgaaataacaaacctgcagagatggagaacagatttagtggttgctaggagttaggaatgggaggtgaggggtggtgtggttataaagtggtagcatgagggagctgtgtagggatggaacagttcaatgtctcaggtgtgattatacaaagctgcaaatgtgataaaaacttcatacaaccacacacacacatactgcatataaatcctagcgtactcaagtcccattttgcatacaaaactggtgaaacctgaataaactcaggattggaggaatttgggcgagggtacttgggacctccctgtgtacttttttgtaaattcctgtgatttataattatagtaattttaaaataaaaagttggccaggcacagtggctcatgcctgtaatcccagcactttgggaggctgaggcggatgtatcacgtgaggtcaggagttcaagaccagcttggccaacatggtgaaaccccatctctactaaaaatacaaaaattagccgggcatggtagtgggtgcctgtagtctgagctacctgggaggctgaggcaggagaatcacttgaacctgggaggcagaggttgcagtgagctgagatcatgccactgcactccagcctgagcgacagagcaaactctgtctcaagaaaataaaataaaatagactgggtgtagtggctcacgcctgtaaccccagcactttgggagactgaggcgggtggatcacctgaggtcgggagttggagaccagcctgaccaacatggtgaaaccccatctctactaaaaatacaaaattagtcgggcatggtggtgcatgcctgtaatctcagctactcgggaggctgagacaggagagttgcttgaacccaggaggcagaggttgcagtgagccaagatcacgccattgcactccagcctgggcaacaagagtgaaactccgtctgaaaaataaaataaaataaaataaaaagtaaaaaagcaaaaaaaaaaaaaaagtgcatttagaatatttgagagaaaataagcaaaaggaagaaaatgtaaattatctataatgcttacacccaggacaataatccttggaatagagtgtctcactttgtgtatagaaatgaaacttttaaaatgccattttattttttaattaaaattttttctttccttttttttcctcctcagagttagaaaggataaaaatgttattgattagtaagactgtagctttatgttgatattttgaaattttaggctagtgcttgtttgttcatgtaacatataagcacattcagtactattagaactgttgcattatgcaataacatgactgcctaatgcatatatcaggattagtacatattgtaaagtttttattttttaccaaaatgtttacgactaccaagtattcattccttaacactattacataattaatttagaaatgttttacttttaaaacttctggacaggtgtaattaaatccttagatagcgttaatgtactatttaaaaaacacacacaaaacattatcattggcaaaacatgctttatcatctattcatctttgtgaatccggtttttcttgataccatgccatcaaaacaaaacaaatttgacataagactgcccaatcatccataatttaaagttggtgttcgtcagaagaattttattgttctcattatacatgttatacatttgagcttttttttttttttttttttttggagatggagtctcactctgtcacccaggctggaatgcagtggtgccatctcggctcactgcaacctccacctcccagcttcaagcgattttcctgcttcagcctcctgagtagctggaactacaggcatgtgccaccatgcctggctgattttttgtgtgtgtatatttttagtagagacggggtttcaccatgttggtcaggctcgtctcgaactcctgacctcaaatgatccacccccacttggcctcccaaagtgctgcaattacaggcatgagccaccacacccggccacatttgagctttaaaatacattgatagaataaaatactgctttaatctttttttgtttgttttttgagacggagtttcactctttcacccaggctggagtgcagtggcgggttctcggctcactgcaacctctgccttccagtttcaagtgattctcctgcctcaggctcccgagtagctgggattacaggcacctgccaccaaacccggctaatttttgtatttttaatagagatggggtttcaccatgttggccaggctggtctcgacctcctgacctcgtaatctgcccgcctcggcctcccaaagtgctgggattacaggtgcaagccaccacacccagcctaatctgtttatgttatagatgcacataaaatttcatttagaaaaatgttcttgtagtgcaatatttaaagctattgaattacgattcataagttttattttgtagttagcatctctaactaggggaatttcagggacactgttggctgtcttgtgattaccgatccttttaaaaactcatcgtatttgagaagtaaagtagtagaaaatctatgacaaaatcaggaattaaagtagacagtatactcaactccactgtgtttaaagtgtttgattaatttctatacattgtgccagtggttaagatctgggactctagagtcaacctgagttgaaatcttggctctgtcacttgatctcttgtctcagcttcttcctccataaaatgagggtagtaatagtgttaactcataggattattgtgactatgaagtgtaccagtacatgtaaatagtcctggtgtctggcataaaggtactcataaaacatagttactgttattttagaacatggtttagatcttgctgtatgtttaatttgtcttttcctcacttaacatgtcacagcagggcacggtggccataatcccagcactttgggaggctgaggcaggtggatcatctgaggtcaggagtttgagaccagcctggccaacgtggtgaaaccccgtctctactaaaaatacaaaaattagctaggcatggtaattcacactgatggtcccagctacttgggaagctgaggcaggagaattgcttgcactggggaggcagaagttgcagtgagccgagatcatgccattgtacttcagcctgggcgacagagtgagactgtctcaaaaaaaagaaaatattaccactattttcccatgttgttaaaaattccaccagtaatggaatagaatattaggtgccctgtgcccttgccaaattgggcattctcattttttagatatttgccaatatgatatatgaaaattgtcatgttattgttttgatttgcattttccccaagcatcagcaagatttaatggtttcacatttaaaaaatttattttttaatttataatcaccttgtttgataatgaggttttcatgtttttattaactgtgtttcttctcctgcctggataaattttagaatttttcacattgatttagacgaatgctagtacaaaggttttttcaagtctatgataattttaatgatttttcttggtaatttttgtctgtagattcaagttcagacaggcatttcccattctgatattgtgtaaatatatgtaatttgttagttctgaaaaacatgacttcttaaatctcctagcatgtagtttactgggtgttacatgagtctacaacataatttttgtacagacaaaaattttgcatttcttctggatattgcctgttcatacctttgcccattttttccctttctgggttgtttatcttttcttcttattgctttataggagttctttagatgtcacaatggttaatcttttgttatatgtgttacacattttctcttcatttgttatttgtcttttaattttgtttatgatgtctttacatagaagtgttaacttaggtggtcagatctttcacttaaaaaaattcttcattattcaactggaaaatctttcacatatttatagttgttttttttttctggtttagcaaaatctctaccatcccaagattatctttaaaatattttcatatattttatgtgaaaaaatttttttcacactgagctcttttagtttgtatggaatttccttttgtgtctagtgtaagggtagggatctaaatttttcctaaatggataggcttttgcctctctcagttcattgacttgttcatatttcaaatgccacaaggcttttctgcatacataaggcctctttctggattctcagttctgttccagtgacaggtcggtctgtgtttattccattaccacccctcccccgtggctttttatagaagtttgatatctgatagggcaaatatgctcatttccaaatttttctttgctattgtcatgaatttactgtttccggtgaattctagaataattttgatgagttctaagacaaatcccactgagattttgattagaattgtgctaaatttatagacgaatatgggaaggagtcagttctcactagcaggtctttccatcaaggagcatatcgtatctgtttattctggagttgcctctctgataatggttttaacctagatgcttattgtggcattgttttgttctaaacacatgtattacaaagatagtattagagtaaattagttgagggaaaagccttatatcatctatccctgttttcatttctcttttcacctttacttttggtctaaagagactttatcatgatatatggtatatgtatactctggttcttgtaataatcggcagtatattatgatctctttttcttgtagtcattaatttaatgattaaggaccatttaatcaagttgataactgtacttaactcttattgttagatatgaaggatgtttccagtttctgagggtacacattaagatagtgcctttacttttgttttatttgaaaaatgtttcaggaggggttgttttattttttcaaaaaacctctttgaggtaatacgcaattgttgtgaaaatgtcgtacaatattgcagcatataaagaagaaggtgccttttgagaaggtgagagttttttttttattattttatttatttttttgagacggagtctcactctgtcgcccaggctggagtgcagtggtgcaatctcggctcactgcaacctccgcctcccgagttcacgccgttctcctgcctcagcatcctgagtagctgggactacaggcgcctgccaccatgcccggctaattttttatatttttagtagagacggggtttcaccgtgttagccaggatggtctcaatctcctgaccttgtgatccacccaccttggcctcccagagtgctgggattacaggcgtgagccactgcgcctgtccgagttttttttttttttttttttttttttctgagacagattgttactctgtcgcccaagctgaagtgcagtggtgcaatcttggctcactgaaacctctgcctcctgggttcaagctattctcctgcctcagcctcccaagtagctgggattacaggcgcacgccaccaaccctggctgattttacatgtttttagtagagatgaggtttcaccgtgttagccaggatggtctcaatctcctgacctcatgatctgcccacctcagcctcccaaagtgctgggattacaggcatgagccaccatgcctggccgggaaggtaagagttttgttctccaaactttcagtcattagagtgcctccttgttacttttgccatatgcttgtatcatctgtactgttaattcataacagttttcttaaaatttactaaagaaacccagaaatccttagtgataagagctgtgaactcatacattgatctatattagataaatacataacgttgatattatgtacattgctgtatattaaagaaatataacattgatccatattaaatgagtttttcaaaagtatgtatactttatgacacactggcacagtgagtggaagtgtaggttctgaaatcaaggtttggtgcttttagatcctaattgtgctatggcctccctcagtgatactagataataaacttaagcctccacttccattttatttgttaaatgaggttagtatgccacctgccttgtaaggttattgtaaaattaaacagcaagtgtacaagcagtcagcacagccctagtacataggtgttgcccaaatactagctatcattcagtagaataatttgtaaataccttgctcctccttcaaagttagttctcacacaagtgtctcatttttaaagtgtttacatagtattcattgtaagaatgtattgtgatttatgaaacatagccttttttaattttgttttttttcctgtcatttaaaaaaaaagcaacaaataacaggattgcttcgcaatatgtatcaccatatttccctcccaaaggactgtactaatttgctgttctgtcagtttagactttatcacttagtgatagtgggtttaaaaataaaaattgtttttgttttagttaacattttattattattcaccagccattaaggaacacattaattactatttattctttctcgttgaatctgtgcaattttctgagaagtaggtaaacccgcccctgtgtgtgtatgtgtctgtgtgtgtgagatgcaatttgtgtggtgctagaaattgagaaattacagtaatttcttattattctggtcagagatccctggaatatcaaaattgtctgcaatctatagtcactgttttcaagtctatagggtccctgggagaaatacttatattaaatatttgcactgacaaatggacaacaaaaggactctacgttttattcttaactaggacttgggcaccaaactccagggtaaaagactggaatgaacccagctggttcaggtggaaatgttgtttttttggaatctagttaagcttaaattgtttcaaactaaagcaggccatgagatgaacccttttcatcttcccagttctcaaacacactgagatcttccccacatttcactcctttctgtcagttgctcgaggtcatgtaaccagagtgagcccatttgccctggctgactgctgatctggccttggacacctgccttggcctcttctaccgaagctgcaggtttggccctgtctctcccttactgcggtggtgaggggggtgcaggggggagttgacaaccttcttaaccacttcagtcacatgaaagaagcagacaagtgagcttgcatctgtgtgctgaccttttaacagtgatgctgcccagtacactcagacccaatcagtgttctcacatctgccttcctccttcctgagaattaggagaaagaagagctcagccttgatttcttacctcaaaagacagcacaaacaaacttgcagccattctcagaagtattggttttctgttgggttgttgcttgtgtcaagtcagctagaaagaggtggagtaaaaactggcctgctgagtagtacccataatccatgtcctccccaaccccccaactacacatcaacctgcagggagtgacttcttactcttgagacgctctttcctcttgcttaatggttcgtgacagttcttcattttcctcctaccactctcaatttttttttttttttggctggcttattctcctgtatctggccattaaatgttgatgtcccaccaagcagccttaggcccttctgtcattcttctttcccttaacagtcacagccatgtccatggtctcactcatgggtgaatccaacatttttatctctaccccaacctctgctgttgagtacttcatttgctaatatctaattgcctactagacatctctacttggatgtcccaaaactaataaattcagtatgtccaagatttatttcatactcttcctccaaaaatgctgttggctatctcagtgaaaggcatcaccacctaagcagttgtgcaagtcagaaacctgggacttgtccatgattctcttcctcccctcccccaccaaattcaatcaatcaccaggccccattgattgtttttcacgttcttttattgtgaactataacttacagaaaaatcattgagcggtgcatctttttgttgttgtaatcaccaaagtataaccctgtaaccaacattccggtcattaaatagaccaatgccagcactccagaaagccctcccttaactttcccctagtcaactatatgcgtcccccttctcaaaagttacctctgtcctgacttttatgagaatcattttcttacttttctaagatcgcacctaaacttagtagtttagttttgctatttgaactttatataaatggaaccatttagtttgttttctttacttggctgctttcactcagtgtcattttgtgagattcacctgtgttttatggagctgtagtttgtgcattagtcattgctgaataatactctattatgaatataacacaattgatatattcattctctctctttttttgtttttgtttttggagactgagtttcactcttgtcacccgggctggagtacaatggcatgatctcagctcactgcaacctctgcttcctgggctcaagcaattctcctgcctcagcctgccaagtagctgggactacaggtgcacaccaccacacctgggtaattttttttttttttttttttttttgagacagagtctcgctctgtttcccaggctggagtgcagtggtgtgatctcggcttactgcagcctccacctcctgggttcacaccgttctcctgcctcagcctcccgagtaactgggacgacaggctcctgccaccacgcccggctaatttttttgtatttttagtaaagacagggtttcaccttgttagccaggatggtctctatctcctgacctcgtgatccgcctgcctcggcctcccaaaatgctgggattacaggcgtgagccaccacacccagcccctaattattgtctttttagtagagatggcatttcaccatgttggccaggctggtctcaaactcctcacctcaggttatccacctgccttggcctcccagagtgctgggattacagacgtgagccaccacatccagccttcactctctttttgattgatatttgtctccagtttgcagcaattatgaatactgcagctataaacatttttgcatatcttcagttttacttggtaatgccagactattttccaaagtggttgcactagtttagattcctaccaacaatgtgtgagaattcctgtttatccacctctttgccaaggcttagaattgtcagtctgttaaattatattaaccattctggtaggtacataatgggtttttgtgtgtaactgaggtatatgtcatacacaataaaaacaaaaatgtacagcctgaagagtattttacctataaatgtatctataaccactacccagatgaagatatagaatatttccgtcacccagaaagttctttcatggtaatttccagaaagaagctgctattctaaccacactgttttgactttggccactatacatgcgtttggcctgtttttgaacttcatataaatgggctcagacagtaaggactctgctgtgtctggcttcttttgcccagcataattttttttttttttttttgcaatttatccaacttggtggtggtatgagttactctttttttcttgctgagttctgttgtatgattatattaccctttgtttattcattttcttattgattgtttctaggttttggctattgtgaattaagctgctatgaacattctcatatatactaatttctcttgtgtatatatctaggagtggatttctgggtcatgggataggtgagtgtttaactttattagaaacaacagaacagtttcccaaagtggttgtactaattaacactccactttggttttaatttgcatttccctgattactaatgaggttgaccagccttttatatgtttttcggccatttggatatcttctctgtgaagagctcattgaagtcttttggctaattttctggttggtttgtataagggataaatgtattgatcccctcccctccctgccccatacctgtgttgcatgtatctattactagctagtggctggcctttcctttttattctcttaaaggtgtctcttcactaacagaattttttttatttttgtttttaattattatggatacataatagccatacatatttatagggtagatgtggtattttgatgcaagcatagaatgcatggttatcaaattagggtagagtaccccatcacctgaatcatttatcatttcttcatgttaggaatattccaattctagtcttttagtcattttgaaatataaaataaatcattgttaactgtagttgccctattgtggtactgaacactagacttactcattctttttaactgtatttttgtgcccagtcaccaatccctctttatttcccacttcccttcctgtcctttactctgtctacatgggttcaattttttttctttaactcccacatatgggtgagaacatgcaatgttcatctttctgtgcctggcttatttctcttaacataatgtcctccagttttatccatattgttgaaaatgacgggattgcattcattctcatggctgaacagtactgcattgtgtgtaagtgccacattttctttatccattcgtctgttgatggacacttaggttaatcccatattttggctattgtgaatagtgctgcagtaaacatgggagtacagaaatctcttcgatacaccaatttcctttcttttgggtgtatacccagtagcaggattgctggatcacacggtagttctatttttagtttttttgaggaacgtccacatagtgattgtactaatttacattaccaacaacagtgtacaagggttcccctttttccacatcctcaccatcatctcatccatttaaactggagtgagacgatatctcattgtagttttgatttgcatttctctgattaatggaaattcttaattttaatgtagttgaatatttctgccttttcctttgtaattgggggtttttgtatcctggtgtgaagataatctacattattttctgttactgttttgcctttctcatttagatcaacaatctctggaatttttgtctgtgtggtgtgagatggggtcagtttgttattctagatgacatgaagatgatgatgatgatgtttagttccatttattgaaaaggccatctcctcctgctttgtagagctaccttggtcataaatcaggtagttatgtataccaggatttgcctgcctcttctattcctgtttgtcctctcccagtgacccattgtcttaagtactgtatttcagcaattctcaaagtgtggtcccaggactatgcaggtttcctgagaccctttcagaggccaggtcaaaactattttgatagtaacacttggttgttttttgcctcacactcattctcccacaagtgtacaatagggttttccagaggccgcatgaaatgcagtgttgcaacagattgaatgcagaagcagataagagaatccagctgtctcccatcaagccaaacattaaggagatttccaaaacatatccaacagtgccactcttctcactcatttttttaatctgttttggaaaacagttatttttcattaaagtgttatttatgttagcatataatagatttcttgttatttttaaatgaatgaattgatatttaaaactttcctgtttggacctggtgtggtggctcatacctgtaatccatcagtttgggaggctgaggcgggcagataacctgaggttaggagttcgagaccagcctgagcaacatggtgaaaccctgtttctactaaaaatacaaaattagctggatgtgatagcacatgcatttaatcccagctacttgggaggctgaggcaggagaatcacttgaacctgagaagtggagaggttacagtgagccgagatcatgccactgcactccagcctgggtgacagagggagactctatctcaaaaaagtaaaaataaataaataaatttcctgttttaatttctaatgtgataaatataataggtatgtgccactgcactccagcctgggtgacagagggagattccatctcaaaaaaagtaaaaataaataaatttcctgttgtaatttctaatgtgataaatataataggtataatgcatgttaactaaagcattttagagtctcagtagtttgcaggaatgtcaaaccaaaaagtttgagaatcactcgtctagttttatgtcttgatatccagtggataataaatcttggttatgtgtggccctgggccctgtgcatttccacatacattttagaatcagctgtgatgttccacaagaatacctgttaggattttgattggaattgtgttgaatcagtttgggaataattgactttttttttttttgagacggagtttcgctcctgttgcccaggctggagtgcaatggtgcgatctcggctcactgcaacctccgcctcccaggttcaagcaattctcctgcctcagcttcctgagtagctgggattacaggcacctactagcacgcccgactaatttttgtatttttagtagagatggggtttcactatgttggccaggctggtctcgaactcctgacctcaggcgatccacctgcctcaacctcccaaaatgttaggattacaggcatgagccactgcgcccagccaaaattttttttttttaatctacacctgctgtaatgggaatttgaaatctttatactattgaatcctctgattcatagacataatttctccatgtgttttgaactttaatttttttctcaattttgttacacaattttgtgtataaaggtttgcacattttccaaacagaatttttgaaggaaaaaattctacttagaaataaattggggccgggcacggtggcagcactttgggaggccaaggcaggtggatcacgaggtcagaagatcgagaccatcctggctaacacggtgaaaccccatctctactaaaaatacaaaaaattaactgggcatggtggtgggcacctgtagtcccagctactcgggaggctgaggcaggagaatggtgtgaacccgggaggtggaggttgcagtgagccgagatcgcaccactgcactccagcctgggcgacagagcgagactccgtctcaaaaaggaaaaagaaagaaaagaaaagaagtaaattggccaggcatagtgtcttgtgcctgtaatcccagcactttgggagggcaaggcaggaggatcacttgagcccaggagtttgagaccagcttgggcaacacagtgagaccctatctttacaaagaaaaagtaagagaaacttaagaattaacaagaaaatgaaagatatttctgaaaaacattgcaaaactttactgaagctcataaaagaattgaataaatgctaaaacatattttgttcttgaacaggatagctctcacatttgtaagatgtcagtatctgctgtaagttgctgtattttatattgttagaaagatccttttttactttttatgatttctaaagttaagatacgccttaaagctgatgacatcttccaggtacttctggccatatggtaattatgaagttaggttaggagcatcttaaccaacttaccttacataactttactttcattataagcacaagttagatgggatatgaaaacagaaacatttaagtctaaagaagctatttcaattggcataaaataactgtgcatcttaaattgaaaatgtattaaatttagtgaaataggccaggcacagtggctcatgcctataatccagcactttgggaggctgaggatcacttgaggccaggagttggagaccagcctgggccatatagtgaaatgccatctgtgagaaaaaaaaaaaaaaaaaaaaaaaaaaaatatatatatatatatatatatatatatatatatatacacacacacacacacacacacatataatttgtgaatttaaagtaatcccaattaatatctcaataggcttttcaaaacttgattctaaagtttatatgaaagaacgaaaatgaaacttttcacaaaaattatgaaaatctgttcatgagggaggtattagtgctgtgaaatattaaagtgtatgttgaagccaaaccaatttgagcatcagatcactggcacagagctgacagcactgaagtagcctcatctatagaaatgttttatgtggtcaacagtggtatatgtgatgaaaatagtgaattccttagtaaatggtattgggtgaactgagtagccattgggaaaaaaagagaactatcttgctatctcacttcttttttttttttttttttttttgagacagagtctccctctgtccaggctggagtgcagtggcgtgatctcggctcactgcaacctccgcctcccgggttcaagcgattctcctgcctcagcttcccaagtagctgggattacaggtgcccgctaccacactcggccaactttttttttttttttttgtagtagagccgggggtttcaccatgttggccaggctcgttttgaactcctgacctcaagtgattcactcgcctcagcctcccaaagtgctaggattttaggtgtgagccaccgcgcccagccattatctcacttcttttgtttaacatgtctatgagatttatttatgttgtatattgcagttcttctttaggatatcacattttatctgttttactattgatgaaaattttggttgtttctatattttggctaaagtgaataaaactgctaagaacatttatacatgtttggtggacataaatactcattttctgttggaattgagtgggactgctgggtcataggatgtatgtttgtttagttttggtatatattgccagttttccagaataattgcaacagcttaccctcctaccagcaatgtaataggttccgctcctatcttcccctccctccctcccttcctccctccttccttccttccttctttccctccctccctccctccttcccttttcctcttccttttcttcttcctctttctcttcctgcctctcttatgattcttcatcattcaacttgagcccttgcatacagaaaaaaaagttgatgaatttgcgtaaaaacagacacgctgctgggcctggtggctcatgcctataatcccagcactttgagaggctgaggcaggctgatcacttgaagccaagagttcgagaccagcctggccaacaaggtgaaactgtctctattaaaaatacaaaaattagccaggtgtagtggcacatgcctgtaatcccagctacttgggatgctgaggcaagaggattgcttgaacctgggaggtggaggttgcagtgagccgagatcgcaccattgcactgcactccagctggggcaacagagcaagactcctcatctcataaataaataaataaacagacaacctagacatggcaaaaactagtataaacaaaattgggactccagtgataagctgggaagaaatagttgccatgcagcatgttcaaagggctaatttcctttaaaaagcaggatcgcttgctgatagaaaagaccaacaactcagtagacaggtgggcacattcagagacagttcaaaggaaagacaagtggctcctaaatgtatgaaatgatcctcagttgcagtcagtgtaagagttaagcaaattgaaactatactgaaagcattttaaaaatacccgattaacatgattaagaagtttgattagctattgactaaggtgtaggaagatagctacttccgtatattaatggtaagtttctaaactctatggagagcagttgaataatatccattaaagtttaagaatgcacataccttgtgtagtatagtatagtttagatcaattgtgatgtatttacacaatgggatattatagagcaataagaatgaatgaattacagttcacccaacatgaatgactcacaatcataatgttgggtgaaagagccaaacacaaatataaattcaaaaaaagacaaaattgtggtgttagaagtcagggtagtattactcttgcggagctcactggatggagacatgaggggattttggaggcttataatcttttttttttttttttaatctctgtgttatgtggaattacactgagaaaattcatcaagctatgaacttaagaattatgtactgttctgaatgtatgctatacttcaatacacattttaatataaataaaaatagtgtgtatacatcaagtcacacatcacacaatcacacataaagaatgcacataacttttgttttagcagtttcatcctaggcatgtaacatatatttacacacactcttgtatatgtggggcttaaaaatagcatgaaggtattcattgctgtgtttataagcacaaaaacttgtgcaaaacctaattacccataactagggaactggtaaaataattgatacagtcatacagtaaatttgtagcaggtttttttttttttttttttttttttttttgagacagagtctcactttgtcacccaggctggagtatagtggcacgatctcggctcactgcaacctctgcctcctgggttcaagcaattctctgccttagcctcccgagtgtatgggttacaggcgcctgccatcacgcccggctaatttttgtatttttagtagagacggggtttcaccatcttgccaggctggtcttgaactcctgacttcatgatccacccacctcggcctcccaaagtgttgggattacaggtgtgagccactacgcccggccaggtagcagctcctaaaaggagtaaggcagttgtatatgaagtaatttagaaaagtctctgagatacattaaatgaaaagaccaaagtgcatgaacagtatgtgtagtatgccaccgtttgtgtatgggtgtgttttatctctataggcatatatttgcaagcatatataattggaatatatttggaaagatgggaagatatgctaacactggctgtctctgaggagtggaaccgagtggccagaaggcagaattgggtgacactttctatactaatttgtgacttaacattttttaaaatttttaattgtgataaaatacatgtagcaaaacttactatcttaaacatttttaagggtactgctcagtagtgtaaagtatattcatattgttgtacaaccagtctccaaaactttttcctagccattaaacaagtacttaatacttcccctacccttggcagtcaccattctactttctgtttctatgaatttgactactctagatagctcatgcaagtggaatcatatagtgtttgcccttttgtaactggtttgtttcacttagcacaatgttctcaaggtccatactattttgtgacttttgaatactttactttgtttattatccatttttaaaagagcactaaagtaaaaagacatgaccttattcagagctgattaattacatggtaaaaagttgaaggctggcgtgtcttattcatttcaaccaatattaaatgccagtttgggcagcaaaacaactttctgccaaagtgccatttgaagcctggtttatgacatgtttctccttttgtcatctttgggtgccacccaaaatgcaggctcaaggccgcagcctcttgactctgttcaacagtttccccccttggcttattgtccaacattggcctactcttccaaatccacctctttatcccaggaacaagctgcttctatgccaagggcatggcttcctctttgcasattgtctcatatctctgacctggaaaaaagggggtttttcattctgctagctttttagtgctgctttgagatcattattctagagccctctgcagtaatgttttttctcatggattgaaattcattgtttccagtaggatttttgactagacgtggaaacagaaggacaaattgaaatgactctgaagcttatgggaggactgagtatcattaactggcacagagggagaaaggcaggctctaggtggaaggtatgtgacttgcttttgaaaacagtggtgtgagattctggcctgtgaaaacagctggagttacgagatagaaatggggacttaaaaaatagcttcataccagacgtggtggctcacgcctgtaatcccagcactttgggaggctgagacaggcggatcatcttaggtcaggagtttgagaccagcctgaccaacatggagaaaccccgtctctactaaaaatacaaaaattagccaggcgtggtggtacatgcctgtaatcccagctactcgggaggctgaggcaggagaatcgcttgaactcaggcggcagaggttgcagtgacccaagatcacgccattgcactccagccaggacaacaagagtgaaactgtcacacacacacaaaaatagctttgtgcgtgtgtgcatgtgcacgcacgtgtgtgtgtgtgtgtgtgtgtgtgtgtgtgtgtgtgtgtgtgtgtattgaaaatacagaaaaatagccaggtgtggtggctcatgcctgtaatcccagcattttgggaggctgaggtgggcagatcacaaggtcaggagatcgagacaatcctggctaacacggtgaaacctcatctctactaaaaatacaaaaaaattagccaggcgtggtggcgggcacctgtagtctcagctactcgggaggctgaggcaggagaatggcatgaacccgggaggggaggcggagcttgcagtgagctgagatcatgccactgcactccagcctgggtgacagagcgaggctctatctcaaaaaaaaaaaaagaaaatatagaaaaataaaatgttacacacaaaacagatcatcattcttaataccttaagtgaattaactgctgtttgttcctctggttgtatacgtataaaactacatacatagctgggcatggtggctcacgcctgtaatcccagcactttgggaggctgaggctggtggatcacttaaggccaggagttcgagaccagcctggccaacgaggtgaaaccccatctctactaaaaatacaaatattagaactgggtgttgtggcacatgcctgtagtcccagctactcgggaggctaaggcatgagaatcgcttgaaccccagaggcagaggttgccgtgagccaagattgcgccattgaactcctgcctgggtgacagagcaagactctgctaaaaataataataaaaataataataatagaagtacatacataaactttaaaatgtaatagaaattatattttgtattcacccttttcccctctgtgaatgaagaagtccaaggccagtcacgtagtacttctgcaaaagaggttatgaatgaatttgtgggacttgttgaaatttcacaggtgagatcctacacagatggagaagaaaatgaggcaagaataggattttggaaacttgcctagaactttcaagattcaagaatcagaaatgataatcaaagagataggagaattaagagtttagtgtcaaactaagaagagtgaattccaagaaaaaaaggaggaaaaattttgttcggtgttataaagaggtagagctggatgaagactaagcatttaaatactaagttgagggcatagtagctggcatgtgcctataatcccagtgttttgggaggcctaggcgggaggatgccttgagcccaggagattgaagctgcagtgaattatgagccaatgcactccagcctgggtgagagtgagaccctatctcaaaacagcaacaacaacaagatacaaattgagaaactgttacttgatttgcgatatgtattctgtccagcagtgatagaataacaaggactgggtttaccttgctattttaagcaacaatatatgaaatagcaatttgtaggcattgggtaacaggcaaagcaagactgtggtcactgaaagctgggaaacaaacctactgagctctatggttgccccaatttattatctggaggtagttttcaggctgcagagcagggatggggaagtcaaacagagcatggtgtcttagaattgggaggacaagatgggggttggcggggagggaaggttgtcatcattcgtggggcagagtaccagagaggtgggagttgtacacagaactccagtgataggtggaggagtctcctgaaatctggttgagtcctgatctacaggtgcatgagaggagaacacctgaggccagagaaagaaccccactggaaagcagcaggccaaacaattcctgggactcaacacagagctgggaatagtctgtgttcccattagccagagtatatacaagggcatcaaaagggcattgtaaagaggctaaattcgccctaatttaaaggctactctggatctactctaacaatgaaaaagcaagtcttggaagatacagccgatttaaagaatcttacctgtktgtgagaacaaagtccagccctatttaaagaaaaacacaaaatccaacacccaaaacacaaaactcatagtgtttggcattcagtaaaatgaccaggcatgcaaagaaccaggaaaatgtgatgtaatcaggagaacaatcagcagaactagatccagaaatgacagagatgatggaattaacagacaaagacatgaaaacagcaattacaaatatgctgtcagttcaaaaaagtagaggaaatggttaacataatggaaagagaagtggaaggtgtattttaaaaagacccaaacagaacatcttgagttggaaataaaatttaaaatacagtgatggcattaacagaagttgaggcactgcagatcagtggacttgaagacagcaatagaaactgtccaaaatgagaacagaaagaaaaatggaaacattgatagagcatcaatgactgtaacaaggacaattgttagagatagaaatagtctaacatatgtgtaattggagccccagaaaagagggaaaggggagaacagaaaaaaaagattgtaaaaaataatgacaagaaaattctcaaatttgatgaaaacagtaagcccacatatttaagaatcccaaggagaataactataaaggaaaccacaccaaggcacatcatcatcaaactgttggcaacccattataaagagaaaatcttgaaagcaggcagagaaaaaatacacatcatgtacagagtaacagagataaggatgatagcagacttctcatcagaaatttagcaaatcaaaatacaattgagagacatctttaattttatttatttatttatttatttatttattttgagatggagttttgctcttattgctcaggttagagtgcaatggcgtgatcttggctcaccgtgacctccgcctcccgggttcaagtgattctcctgcctcagcctactgagtagctgggattacaggcatgtaccaccatgactggctaattttgtatttttagtagagacggggtttctccatgttggtcaggctgatctcgaactcccgacctcaggtgatctgcccacctcggcctcccaaagtgctgggattacaggtgtaagccaccacgcttggccttcattttttttttttttttcaagacagagtctcactcttgcccaggctggagtgcagtggcatgaactcagctcactgcaacctctgcctcctaggatcaagtgattctcctgcctcagcctcccaagtagctgtgattacaggcgcatgccaccacgcctggctaatttttttatttttagtagagacaaggtttcaccatgttggccagactggtctcaaactcctgaccttgtgatctgcctgcctcagcctcccaaagtgctgggattacaggtatgagccactgtgcccagcctggagagacacctttaaagtgctttttaaaaaagactactggggctgggtgcagtgaccaacacctgtaatcccagcacttggggaggcaaggtaggaggattttgagatcagcctgggtgacatggcgaaagcctatctctacaaagaatgcaaaaatcagccaggcatggtggcgcgcgcctgtggttccagctccttgggagactgaggttagaggattgcttgagcctgggaggcagaggctgcagtgagctataattgagccacactgcactttagcctgggtgatagagcgagaccgtgtctcaaaaaaaaaaaaaaaaaggcctactggaacttgttgccagcagacctgcacaagaagtgttgaagttattcaggcagaaggcaaatggtttaaaatggaaatttagatcttcacaaaggattgaaaagtgctagaaatggtaactgggagtaaacataagaattttttttccattttattctctttaaaagatgactgcattgaaggtgattgctaacaggtacaggatttccctttttgcacgatggaaatgttctgcagttagtggtgatggttgcacaacattgtgaattaaagaaatagtagctttaaaaagatagttgcttaaagcaaaaataataatgcattataggttttataacacatgggagtaaaagttatgacaatagcccaaagaatggaaggggacgggaagggtataagaaaccttagtcaggttatttatttatttgagacagagtatcactttgttgcccagggtggagtacagtagtgcaatcccagctcactgcaacccctgcctcctgggttcaacaaggttcaacaagcctcccgagtaggtgggatttcaggggtgtgcctccacacccagctaatttttgtatttttagtagagatggggtttcaccatgttggccaggctggtctcaaactcctgacctcaagtcatctgcctgcctcagcctcccaaagtgctgggattacaggcgtgagctaccgtgcctggcagaaaccttactaaggttcttaagctgtacatggagtggtatacttcacctggaaggcagactgatagttaacaatgtataatttaaaacctagaacaactaccataaaaattaaagaggtatagctaataaactgatagtggaaataaatagaattctaaaaagtaattaacctaaaagaatgcaagacatatggggaaagaaacaaagcacagatgggatgaatagaaaaagacagcaaaatggtagatttaaacagtcttggatccattatcacattaaatgtaaatggtcttgaaaaattcattcaggttaaaaatacaagagaagataaaaatctccattttcaccatcattaagtgtacttctttccagttgatttttgtctgtgtatatatatgtgtgtatacatttcttcctgtgtatgtatgtatatatgtatgttatacacatcgtatacatattatgtatatatacatgcacgtgtatatacatacacatgcctgtatgtatatgtatatgtatacatataggtatgtatatatatacacctacatacatacacacacatatgcatacaaatgcaggtgtatacacataaataatgtgcagttttttagaaacaaaattggaatcatgctttttgtttcctttaacttttaatcgtgaacatttggacctgtaataaaatatttgaaaacagcttttaatgtctgtatagtattccactgagtgccacattataacttgtttcagtctagataatttgtcacataagttgttttaaattggcgtggttattttttttatttttttattttttttgagatggagtctcgctctgtcatccaggctggagtgcagtggcgcgatctcagctcactacaacctctgccttctgggttcatgccatttcctgcctcagcctcccacatagctgggactacaggtgcccgccaccacactcggctaattttttgtatttttagtagagacagggtttcaccatgttagccaggatggtctcaatctcctgacctcgtgatccaccctcctcggcctcccaaagtgctgggattacaggtgtgagccactgtgcccagccaaatttgccattttaaataatatgagtattcttgtatacttccgtgtaaatctttacatcattgatttttttggctgtattcctacaagtagaattgtcaaatttacatctagaaaatttaaacaatttgtgtttccactacagatgtatggaagtgccaatttaaccttatgcttggtccacgtgtggtattagtataaaaacatcgccacccagatttttcaaaaacttgattaccccagacacccaatcctcaccgtgcttgtaggatacttactttatctctgaaatctttgaaattctatcaaaatctctttgccttaaatttggctaaaacataaaacgtatacatttattttttccttttcttctcttcctgccccttttcttcatcaacctagttttcttcattcacttctttggttactgcttcagcttcattggttctagaatgtgagcgttttgaagacacattccgtatctcccatattctctgttgtatcatggccatagtatactagatgctcaataaatttgtcaaaaaggccaggcacggtggctcatgcctgtaatcccagcactttgggaggccaaggtgggcggatcacctgaggtcaggagttcgagaccagcctggtgccagtggtctcaactactcgggaggctgaggtgggaggattgcttgagctcaggaggatgaggctgcagtgagctgtagtaccactccactccagcttgggtgacagagcaagacattgtctcaaaaagaaaaaaaaaaggagtatggtgaaatttttagtagtataaagttaggtctaagagttttatttgcaaagattaccatgtgggagtaatctctagacatttttgacttactggcctattttgtaagacccccaaaggtggagaactggatcagggaaacaagcagatcttgaatacacactgcctatttttgagaggaccacaaattcagaatttgaaagaattggagttattcctttccttaattacactttggccctagggacccagaaatgaatgtgagttcctcttctctaggagtccagtttaatgctagacatacatggtaataagcagagtccgtgcaacagaaatcagtggcgtgaaagtaaaggggaagagatccataattcatggttgacttgacgttttccactgaggggccagcatgggttttatgcagaatgaaggacatttgagatttcattttggggccataggaggctataacctgggatgggtaaaaaaattataaagcagtgcttacgctcaggttggggaccttgaacttgtactggtgctaattatgggttttttcctagtagtatttacagcccctatacaagggtggaaagtgaaactagtgtatttactcaaaataggtgacttgaaggaaaatgggatggagcaaagtagtgctttataatcagccccagttttaaggataagactgctagagactcattacttttcacattataatgtgaaattaatcattaaaacttaagtaaaaatggaggtttttggccaggctcggtggctcatgcctgtaatcccaagcactttgggaggccgaggcaggcacaccatctgaagtcaggagttcgagaccagcctggccaacatggtgaaaccccgtctctactaaaaatacaaaaattaggcatggtggcgtgtgcctataatcccagctacaacagaggctgaggcatgagaatcgcttagaacccgggagtcggaggttgcagtgagccgagatcatgccattgcactccagccagggtgagactctgtctcaataaataaataaataaaataaataaatggaggatttaaatatctttcctcatacaaaaaactattcatggtagcaatatttctgacggcctctggcatccttttgttactagctagaaagagaaatgtagattgctttcacagtccagaatgaccctccctaggcctcccgctgttcagttgtgattactgtcaataaacaccactgtgaatactactgttttgtttcattttgttttaatcagagagaaaaggttttaatactttctctgtgactaggtaggctaatgatctacagatctttgagcaggtgtttatttttcaagttcaagttcacttgaacttcagggagtctgagattacaatcagaacatttggttatttccaatgacagttttactcagctggttaacctaagcaagataggttttgttttcaagatcttccctcatcagtttttttttttcccgtatcaaagacaacagtttcaatggagcgaacactggattaagtatgaaaatgtgctctggtcccagctttgattacttactgggaaaacaagcaagcagtgtgtcagatctgttaactcctttgatacacagaggccacaactgctctgctcatgaatattgacagttaagacattttcctatacccttcaaatttgtattagtagaatctcagttaatagaaatttatttggctgggtgctgtggctcatgcctgtaatcccagcactttggaaggccgaggcgggcagatcacctgaggtcagaagttcgagaccaacctggccaataaggtgaaaccgccgtccctactaaaaatagaaaaattagccgagcatggtggcgcatgcctgtaatcccagctacttgggagctgaggcaggagaatcgcttgaacccgggaggcagaggttgcagtgagccgagatcgcgccactgcactccagcttgggtgacagagcaagactccatctcaaaagaagaagaacagagatttattcaagattatttatctggatttaatctgttgacacaaattcaaaatgcaagtaactacttaaggctagcctggtatttctcaaaccactgaaggcagagtttttaaaatttcaaatccaggccggccatggtggctcatgcctgtaatcccggcactttgggaggtcaaggcaggtggatcacgaagtcaggagatggagaccatcctggctaatatggtgaaaccccatctctactaaaaatacaaaaaattagctgggtgtggtggcatgcacctatcttcccagctactcaggaggctgaggcaggagaattgctcgaacctcagaagcagaggttgcagtgagccaagatcgtgccagtgcactctagcctgggtgacaaagcaagactccatctcaaaaaaaaaaaaaaaaaaattccaatccattgtagactgatatgtttgcaagatgaagtattaaaaaataaataaaaacatcagacatgtaaaatacaagctcatgtaatttattcagctgaattacgttttaataatatcaatacaatacaggctgggcacggccannnnnnnnnnnnnnnnnnnnnnnnnnnnnnnnnnnnnnnnnnnnnnnnnnnnnnnnnnnnnnnnnnnnnnnnnnnnnnnnnnnnnnnnnnnnnnnnnnnnnnnnnnnnnnnnnnnnnnnnnnnnnnnnnnnnttgccatgttagccaggctggtctcaaactcctcacctcaagcgatccacccacctcggcctcccaaattgctgggattgcagatgagccaccgtgcccgggcacagcatcactttcaagtgacaatataaagctaagctttgctatgttttgatttaataatactcttaagtagagaaaccattgttaccgagatgtcgtgatgggaatggaagaagagatcttaaaaacaatttcaccaagttcaggatatggacttccaattgtatccacaataaagcaagtctctttaatcctttatctttcagcattagccaattgtaacagtttatgccatgaagagttaaattatctttaggtgaaggaaatagatttggttctattacatttcctgtgtgtggatctcattggttgaaaaattaaatttcagaatgttctgtttcatttataaggtatttggtgatcatctgtcgaaactgttctttgaagcttctaacttttgttttagcctttgtgtgtgtgtgtgtgtgtgtgtgtgtgtgtgtgtgtgtgtgtgtgtgacggaggcttgctctgtcgcccaggctggagtgcagtggtgcaatctcagctcactgcaacctctgccacccaggttcaagcgattctcttgtctcaacctcctgagtagctgggattacaggcatgtgccaccatgcccggctaatttttgtatttttaatagagacagggtttcaggatcttggccaggctggtcttgaactcctgacctcgtgatccacccacctcggcctcccaaagtgctgggattacaggcatgaaccaccgtgcctggccttgtttttgccttttaatcttacctgttgttaaaaagcctgttgctttccttcctcgtaaggaagtattaagataattaaaagtaacaagttggctaacragttcacatcttttaaaagttggaaacaaacttgtttcttaccttgcagaagcactgagtctgttctgtaattcaaatttctcctcagtaccattgttttaatatgaacattattttaacattaattcactaacagtatccttttctattagcacataataaagacaataatcattaatatgtatttgcawtctcatgattcttattatgacactacacacatactgtttagttcaactgacattttttgtaccgagatcacacaccaagcagtgtgtgattttctttctggtgcaagctgcttaatctggggaactactccagaatgttttcttgtcattgcagctgtgctatcagaacattcttgtatrcaaaattccagaccagttttgttgccaacataattctcatcrttttacccagttcagaactagttgtgtttgttggatgtaaaactgagaaaaagagttagttcttccttcacatcaccatcatctttggatagcacattagcaatatctgtgcgcttgtcaaggtacaatgaaaagcactttgcaagttttttttttttgtaaattggtcttctgtatcattagtttccaaaggtagcaagctgtgctttcattggaaagtgcagatttaccctttcatgtaagtgatattcacttgttcttgacaatagcattttcattttagcaatccaaagtgctgggacaggaagcatgtaaaacatttatggataaaatactgatcatctgcttctattagcctttaaaatgtagtatctttcaaagaattctctctgttttgagcttatgtctgtacatttggtttataaatgccccttaaattttgatgattttgttgctccattaaccagtatatctcttcagttaacacactgtgatgttacacttcaccattaattatggctacaatcctgaactcagtatatgagggctcagccccactcctgagtgaaagtggtgtggcatcttttggtcttcatctctttggattcacttccttcactgtcctgtggtttactatattcagaggcatgtcttttccactgaaaagatgctgcaaaatcaactgaagcttgtttatccatatgtaaatttggttaaaaagaatgtaaacttcatttctctagtttaactcatgttaaattacaaatttaaatacaggcttaaaatgaaaatgtttgcaaaattaagtagttataaaaatgaataaacccatgcattttctcagatttttgtatacatttaggtagttggtaaaataggcatagcatttcccacataacttgattctgccatacctgcctagtacatgtcatgccatatayacctccccatgtgagcttgacagcacctagataggttattactctctgttcagcaagacaaatcactggtcgtgcacttgcatgtcatggcattgttgaatgtgtataaaagttttgtttgtttgtttgtttgtttgtttttaagcagagacagcatcttgctattttgcccaggttagtcttgaactcctgggctcaagcagtcctcccacctcagtgtcccaaagtgttgggatcacaggcatgagccaccatgcctggcctatacaactttctaaacacttattctcaatttctgaactgaccctgtcgtggattcataacaaataattcatagaccagcactggtttgtggttttgctctgataggcattttgctctgactggatgattgtatcattcttagaaagttataggctttacatgcattaagtccatagaaaatagctagtttcactgcatctttttaaaggatttatttgatacctattatatcacacaacagggcacattacccactattgacatataatcccataatataatatcaaggtaaaagggggaggactgattgagcctgggaaacagaggttgcagtgagccgctattgcaccattgtactccagcctgagtgacagagcaagaccccatctcagggaaaaaacaagaaatgctgtaactttatatttcatcgtattgcactctaattttcaaaagcttgacaatgcattcatttataggcgtctactattttaactagaatttcagaacatttaaagtaggcatgagctgtgcgtaaatgtttctgaggtgtgaatttacaaaagtagcttatattagtggagctgtagaatattgttttttctccaggaagccaccaggaaccatatattgtgtgctggagcttgtggctctttccgagctcacagtgttgacagctgatgcatttcagtgcgtgtaacatcccgtgtttctcagctggctcaatcgcatgtcagtttcttctgatttgtgtaatggattagtgagaataacctcatgaagcatctgcatgttgaatcttaatgcacaaaggcccatgtagcaggcagtatgttcctcaacagctgactgagggctccaaggaagctttactgacaccatgactaggtttgtcgtggctcgtaccctttgaaactgggcacttaaggcctagtgtgtaagaatctagtacatcagtgcttctcacattgtgatgaggaaatactcctcccacccatcaggtggggatctatactttgtaaaatacaattgaaacaaagtactagaaaaattcattttaaaagataaaaatataaaatataaaacatatgccacatttttattaatagattcaatcataaaattacattttagtaaatttacaacatgggaaagtttttcttttccatttctgtatgtatttcatcatggactagtaaacagttccaggagcagcaccggtccgtggaacccactctgagtagcactgtggtagttactgagccttgtgtgccaatctgtctgcgttactggcaagattaggtagggaggtgtgggtatctcagagagctggtaatgctgtcagcagcaaaactgcaaatgaaagagcatcctgtggggctgctccctccacagatctgaaatgtrtatgtcagagcccatcttggctgctataactatgaaaaattgaatttttatgaaatatatatcatattcttaattctgatagtgaattttctgtagaggaagattgcttctctgagttctgggaacgttcctggttcccttctttagcactgttgcatagaccctttgtttttttcatgtaacgtccttatggaaggagatctgggcctgctattcattgtactacagcagtcaaataggagttggggtgttctccacccagatcttcacacacatataatattctgtgccattagaagggaaaaaagaggcaggcgcggtgactctcacctgtaatccatactttgggaggtcgaggcaggtggatcacttgaggtcaggagtttgagaccagcctggccaatgtggtgaaaccccatctctactaaaaatacaaaaattagccgggtgtggtggtgggtgcctgtaatcccagctactcagaaggctgaggcaggagaattgcttaaacctgggaggttggaggttgtggtgagccgagatcgggccactgcactccagcctgagcgacagagtgagactctgtctcaaaaaaaaaaaaaaaagggaggggggtgggggtgagatgtggtggaatgagaatattcagttaccaggatgaacattcagaggtctgattgaaattatatggatgaaatcactaaggaaaatttctgagtagttcttttggtgtggctttttgtgccaaaataaacttttagggcctccctccagtactaggtatatgggagagtttccaaagctgccaaaacacagagctggaatgactacaagtgggaattggaatggcctcttgacacaccttagactccaacccttatttcttgagtttagaggcattataaaaaaataaaaatgtgtcttgaatttggtacagtgtattaatatagagacagtaaatcttcagtgcctttattttatttttaatttaattttttgaggcagggtctcactctgtcacccagactggagtgcagtggtgcaatcctgggctcaagcgatcctcccacctcagcctcctgagtagccaaagctacaggtgtgcaccatcataccaccatgcccaactaattttgaaaatttttgtagaggtgaagtctcactttgttgcccaggctggtctccaactcctggactcaagtggtcctcccgccttggcctcccaaagtgctgggattacaggcgtgagtcactgcacccaacccaggcacttcttttttgccactgtctctcctatcccttccctctatatcttctgtaaataaattgtcctgcatccttaacctccccatctttccctttgcaatcttacctcaatgaaactcacctcttccagcactgctttttaatggcaattactcattctctcacagcccatataccatggagtccaagagagtggtaacagcattctttctgcttccccttgctgttttcaagctaattcttttccacccctatattgktttattattttcattcttagaattctcttgtttgcatctacttactctccctctggctgggtgttgtgtctcaaccctgtaagtccaggactttgagaggttgaagcgggaggatagcttgagaccgaccaggagattgagaccagcccgggtaacatggcaagactctgtcactacaaaaaataacaaaaattagctggatgtggtggcacatgccttgtggtcccaggtacatgggaagctgaggtgagaaactcacttgagcctaggagttcgaggctgcaatgagccatgattgtgctactgcactccagcctgggtaacagagcaagaccgtgtctcaaaaaacaaaaaaacccgcaaatacttaactctccctcttcggtttgtaatttgtgattgtgagcttattttttttcttttttttttctttttttttttttttgagacaagagtctcactstgttgcccaggctggagtgcagtggctcgatctcggctcactgcaagctccgcctcctgggttcacatcattctcctgcctcagcctcccgagtagctgggactacaggcctctgccgccatgcctggctaattttttgtagttttagtagagacggggtttcaccgtgttagccaggatagtctcgatctcctgacctcgtgatccacccacctcagcctcccaaagtgctggaattacaggcatgagccaccgcgcccagcctttgtgagcttattttctgaactctttttttttttttttagatggagtcttgctctgccaccgaggctggagtgcagtgctgcgatctctcctcactgcaacctccgcctcctgggttcaagtgattctcctgcctcagtctcccaagtagctgggactacaggcgtgcccagcctgatggtacctttaatctgtaattctcccttcgtctctccatcccttgcagtttattaaagaaaccagtttttttttttttttggtttagtagagtttcctaccatctgggaaattgggagttagatagtagaggcatgattgggggtgaggctatttatattcaatgcctaaatcaacacctaatttattaggtgttgcaaaatggtgctattccatcattcattcttcatgtgttagctgcaatacttgtataagaggaaacctcctggctgggtgcagtggctcacacctgtaatcccagcacttgctgaggcgggcagatcacttgaggtcaggagttcaagaccagcctagacaaaatggtgaaaccccgtctctactaaaaatacaaaaatgagctgggcatggtggtgtatgtctgtaatcccagctacttgggaggctgaggcgggagaatcgcttgaacccaggaggcggaggttgcagtgagccaagatcacgctactctactccagcctgggcagcagaccgtgactctgtctaaaattaaaaaaaaaaaaaaaaaagaggaaacatcctttttgtctactgcttgattacccagtgatacagtttgtatagagaaggcaggttatgtgcctggtttttttctctttatttgccagttttgaaaataatgagttggttccctagcatttcccatgttgaccaattagtttgtattattagaaagtcatagaatttaaatgtgtttgatgtgcttcaatccattgtggttattattcttattgacacccagacttctctgccttcttctaagtccttttctcctgacttccatcgccttcgatagcttccttgtttggtatgaccagatgttcttggttcatcttgtgcatttcctgtcccctacctgaaactagccatttctctgagctcagagtcctagattcttttagggggaaatggaattagaagatcacaacctagatcttattgctatagattggtcattgtttgatataggaaacatcttttttttttttttgagatggagttttgctcttgttgcccaggctggagtgcaatggtgtaatctcagcccactgcaacctccacctcccaggttcaagtgattctcctgcctcagcctcctgagtagctgggattacaggcctgcgccaccatgcctggctaattttgtatttttagtagaaacggggtttctccatgttggtcaggctggtctcgaactcctgacctcaggtgatccacccaccttggcctcccaacgtgctgggattataggcatgagctaccaagcctggcctgaaatatctttttttaggataacagttcatggttatctttaaaacattcccaattcaaattcaggacttcagagtgtttattttatctcctatatcttatcccttttcttctacaccaggagttttaggtctcaaggatgttagatgatagtattagcatatcacgtaattagtcatttacttaattcctcattttacaaagtgagactttctcccgtgcaccaagagccccaacgagacaaaaaagtgtcctggttactttctcacaactcttttttctttatcttcacattcctaatccaattggtgattaagtcctattgattttactttaatgtttctcatctccaccccttccctccaccttttctctgtgcgttgatttaggccttcattgttcttctaggtttcctatccttccattctgctgtgcatgtggctatgagggtatagtgtaaagtgctttttgcctgcataggacagtcagaattcctgtaagtctctccatgatttgtcttctgtctacctctccttccttgatacactatactccaggcattggaagtaacctgcagtttgccagacttttcatgttcctctgcctttgctcagctacttactcattgggtctcatatgccctttcctctcccatgataaatttttcccaacattttattatgaaaatwtgaaacatacagaaaactttaaagaattttctagagaatgcctgtatatccaccactcagattctaccattaacatttcacttgtacttgcatttttatttgctatacaattatctacccctgtatccatcactaaaaactttctcctaagtactttagcatgcatatcattagttcattatttgacacattttcttttgagccaaaatacacatacaatgaaatacacagatttgaaatgtatattctctgaattttaatgaacatgtacgcctaagtaagccaaaactctgtcaagttatatagggtggtggctttgcctaccagggaacatttgacaatggtctggaaatagtcttggtgtcacaactgggcagggtcgcgataggttagtagtgacatctagcaggtagagtccagggacagctacagtgacagttctgtctcgatagtgccactgttgatgagctttgatactttgctactacattactacaaccctaaaggtttcatcatgcctcttgccaatcagttccctaccccgcaacctcctagagataaccattgtgattcttttgttctactacagttttccttgttctagaagatcatataaatggaatcaarcattgtatacttcatggcagtattgcctaaaaagggaaacattgcctgtaactcttcagggaatgcaaagtttttccatggattataaaagaaatcccttggagggtttcacataaaggacacagagatatgtagataatattttcagcaacattgccagagcaaattaagcaaaggcattcgtatgaccatttccttttgaaattactaagacataatgctgacatgaaactcactgcaagcgcttttacataggagagacatactgtccaaagacatagctttctggtggtctgggttgatttaagagtcaaacctagagaaatgaatggttgggatgatcttcactttccacaaagggcacttttctcagccaggtgtcagtaacacatgcacagcatccatttcaaggtgctttcttgcttcagtgcaggtaacctatggtgtcagttaaggcgaaagccaccaaatttggagatcaaataagaggtaactgagaaaatatatgtcgtgttaatgttagctgtgcaattttttctcaaaggtggtataagagaatatctgaaggcaaaggaagattctttaaaaaccaacaaaacaggcgggacgcggtggctcccatctgtaatcccagcactttgggaggctgaggcaggcagatcacttgaggccaagagttcaagaccagcctggccaacatggtgaaaccccatctctactaaaaatacaaaagtaatccaggtgtgatggtacgtgattgtaatcccagctactccggaggctgaggcacaagaattgcttgaatccaggagatgaaggttgcagtgatcgcgccactgcactccagcttgggtgacagagcgagaccctttctcaaaaaataaataagtaaaaataaataataaactaaaacaacagcatagctgtggttccactccaagagaagctcaggtccccatagtcctacactacctgttcatccttaacggctctgatggctaatagtcatatgtttattagtcattgattaatggattgatggatttatcaaaggttacttgttgatgtcattcagtctcttgactttaaataccaagctatatgctgaccactccaaaatttttatttctaacttaacttgcaaattcatatatccatttgcctctctgacatttccacttaaaaggtagttcaacttgtgtccaaaactgaattcctgatcctgaattcctggtctctgaagccttttctttcctaactcagaaaatagcaacttttcttcccagctagtaaagtcagaaacctctgtgtcatcttagaccattttcttgcctcatgctgcacatccagtctgcgagcaagtcttggtggctctaccttcaaaatatatcctgggcctaaccagttttcaccacctccactgcggtcatcttgttctaagctaccatgctctctgctgggatcattgcagtagcagactgagtttatttccatccttcttcctcatagtctattttcaatactacagccagagtgaccttttaaaaatataaacagtggccaggccgggcgcggtggctcatgcctgtaatcccagcactttgggaagtagaggcgggcagatcacaaggtcaggagatcgagaccatcctggctgacacagtgaaactctgtctctactaaaactacaaaaaaattagccaggtggccaaaaccaccccttggatgcccattttgttcagagtcaaagtcatcatcatggcctaaagaccccatgatctactgctacccttgccctggtgttttttttcttgtggctcctgttactcttcccttcttacatttgcttgctctgttccatgcatcctggcttcctggctgtacctcacacccgccgggcatgcatgacttgctttctcacctcagcgaggcctcctcacctcaccacccgacttcaaattttgaatataagtttagattgcagttccttcaaccctgtactcatctttccctgctttgtttctgtttgcttttctgctcgtctctctctccatgagagggtagacaccatgaggacatacaatgttgtctattttgtttattgtgttcccatcacctgataccatgcccgacaaatgctgggcactcaataagtattttttaaataaatgtttgggtctctcccacctgctggaccctgctacacactggggactcactgctgaatgatccttctcctcctggagcatagactggtataggagacaccgttattgattaacatatagattcgtgtacataatttgagatagaagctcttgagaaaggagctttggttgtaggagaggataaaatagaaagctaacaggaggagtggggaggctccttcttggccaggtgtcaaaagctgggatctgaaagatgagaattaagtagcttctgtggtgtcgtgtcctttctctttcctacactgtttttctctcttttaaaaattaaagatgggccaggcacggtggtatgcgcctgyagtcccagcttcttgggaggctgaggtgagaggattgcttgagcccaggggttcaaggccagcctgggcaacatagtccctgtttttagaaaaaaaaaaagacagaaaggaagagagggagggaggaagaaaagaagggagagaaggaagaaaggagaaaggaaagagaaagagaaaaaggagaaggaaagaaagaagaaagaaagaaagttaaatatgggtctttctacacattgaccacttttattaatctttgatttgtactatttttgtttcctttttcatagactgcttctcttacatttattagtatcttttactttggggggggtttaactggctgttatttttgtaactttttgagattgatacttagagcactaatgcatgaagttatggttataatttctctctaaacacagtgttagctacatcctacaggtgttgatagtagtatttttagtaggcattttatagaccttttatatgttcaatttaattatgaatatatttggatttaaagctaacgtcttaggattcctatttcccctaccagtgccatgttcatttttctctttccttgccttcttttggattaatcaaacatcttattccatttccccccactgtattatcttattcatatacattaatttaccttttagagacaaggtcttgctgtgtcacccaggttggagtgcagtggcgagatcatagctcactgcagccttgaactcctggcctcaagcaatcttcccacttcaccttctcaagtagttgagattacaggtgcgtgccaccatgctcaactaattaaaaaaatttttggccgggcacgatggctcacgcctgcaatcccaacactttgggaggccaagataagtggatcatgaggtcaggaactcaagaccatcctggccaaaatggtgaaaccccgtctctactaaaaatacaaaaaattagccgggcgtggtggcgggcgcctgtagtcccagctactctggaggctgaggcaggagaatggcatgaacccgggaggcggagcttgcagtgagcggagatcatgccactgcactccagcctgggcgacagagcgagactccatctcaaaaaaaaaaaaaaaattttttttagagacgggtctcacggtgttacccaggctggtttcaaactcctggcctcggggattcttcaaccttggcctcccaacgtgctgtgattacaggcatgagccacctcatttcttttaaatcattaccctgcaggttataccatgcatccttggtttattgaactctaatataaattaatagttgtatcacttttctgtcagtgcgtggacctttggatatttaggcttcatttaccaatcacgtaccttttttgtcattattgtcatttattttaattctgcatatttttgactccacaagacattttgtttgacatagtattcatttagtctccctcgtatttctcctttcaatcgttatttccccctctatctttgcagtgcttctgtctaggatcatgttccttttttttttttttcttgagacagagtcttgctctgtcacccaggctagagtgcagtgcagtcgcgcaatcttggctgaccgcaacctctgcctcctgggttcaagtgattctcctgcctcagcctcccgagtagctgggattacagatgtgctgcaccaccacttctggctaatttttgtatttttactagagacggggctttgccacattggccaggctggactctaactcttggcctcaggtgatctgcccgcctcagcctcccaaagtgctgggattacaggcgtgagccactgcgcctggccagatcatgtttcttttgcctgaagaacttcctttggcgtgaacaaattcagtttttattcatctggagaagaaattgtttttaaccttcattttcagccgaaatgtacacttgcacctggaattgtggattggcagttgattgtcttttggctttctttccttctgttggtattagctgtcagtcttagttttgctgctttaagagtgctgtgttcttccctgccttctctggcagcttttaaagatggctaattttctttcgttttcagaaagtttactgtgatgtgcttgcaaaagtatttacgtgtcctgcttggggttcaactcttcttgaatctgtggcttagtgtgtctttcttcagttttggaaaaattttaaccattatctctctctctctccaaattttgcttttgtcctattcttcccctgtttttgctgatgataaagtagagcatttgatcataggaaaggtaactgagttggagttattaaggacataattgatgtgcttgttcgtctgtgtgaggctgacatctcttaaaaagatgataggagcagggtgcaatggcactttgggaggccaaggcaggtgaatcgcttgagccctgacgttcaagaccagcctgggcaacatagcaagaccctgtctctcaacaaatcacaaaaattagccgggtgttgtggtgcatgcctgtaattccagctacttgggaggctgaggcaggaggatcacacttgagcctggggaggtcgaggctgcagtgagttgtgattgcaccactgcactccagcctaggcgatagagaccctgtctcaaaaagaaaaaaaaaaagatgatagtaattggggaggagagaaagactgataagcaaggagtgaaacagcttccttgaatgagagcgtgtgagggagtgactmcaagtgtgattatgaggttggcaggtggcaacagagagcagtggctggagcatatgtagttatatggaaacacacctccaagaagcaggaagatttgcaagagggaaagagaagcaaactcctgacagcaaaaatgaaaaggaaggacggtattttccttcctggccttgacaaattaagagtgtgagaccaaaaagtgtttccagctgaatgggctgcaagagaattcatattgtcagggaagagcgaaagaaggcagaaatatttttctaaagttaatagcttattgatcaatgagcagggatttcagaggacagagctgagaggttttggacaggaaaggaatgagacattagattttaatgaaaagtacagagcagtgtgggttcatgtgatgatcggtgacttaggaagcctcaccttctggcagtgacaggtagaagggatgcttcgaagctaatgggatcggtcttgctagtttctgagatatgggtgggtagttggatttctactctgattacaaagtcttccccttccagtatagcagtgcatgaggtggtaccaccctaaggttttaatgtgttgagacttaaagcctgtagcagagggtgatctagccggggtaggcttcccagtaaggaatgtgagatcagtatgttctaatatcttcatacatggcttactgaggctgggcatatcagcttcccaaggtttttcaaggttttgagattgtaaaacccaaagctagaccctggaccaggttcaatgcaccaagttaaacacccattgtgaggcctttagtggccaatcagccacttagcagcaaactcgtctttgccttctgttaatctggacgctgacttttcatcctagaatggcacactctattgatagtgacattatactgcagttagccagctttttctgttaagagccagaaagcaaatactttaggcttcacgggccataggatcgttgccaaactaactacatgactattctataatattatagtttgaaagcagccagagtaatacaaatgtaaatggctgttttctgattaaactttatttacaaaaacaagcagtgggctagatttggccatgagttgtagtttgccaacctctagccaagtaaaacctccagggtattcctcactggaaccactgttagactttgacagtacacttcatggtaaactttttatgtgacacgtggtcttcaaattgggtgaaaatctatctagtaatttttgcagatgtggtaacaaatgatgaagtgcttagtttttatttatatggaatataaatatttgttactctgtattctatgaatctttttctcagcatttgatacagaatattgtgttcttccttagattctcctgtaccttcctgttaccgttctctctcctggttctcccccgcttccagctgttttccatcaccttcatgggtgctttccctcctggttggtcctttgcttaacttgtggtgttccctagtactccatccgtaatcttccctttccctcatattctccctgaacactcttcttcatggctatcatgtttagaaccatacttctaaatctgcatttcagatccatctagaaaccttcaggtttttattttgggctgcttattggatggagttatctgtgtgacttggaggtatgtgaaaagtcaacatgtcaaaactcaactcagtcatctgttcttcctcctgtgttctttgtcccttgaatggcctcactatctattcagtcatcctggaaacccgggagtcagtcattcttcctcaattcagccagttgtcagatcctgtcagtcttacttcttcaatcttcggatccatcttcagtgctctaaactgttacagtctccgagttggtctcactctttccagttctgaccccttcaatctgtgttgtataccaatgccacagtgactgttaacccctcaggcagaattcagcctcttcatttgagtccataggtacttggtgtatttagtacattatattatgtttcagagtatgatgtttttccctgttctttaagcttctkgagggtaggggctgtcattcagtcacaagaaataggtgttggaagcagtaagggctttgaggttctctatatgttaggttggtgcaaaacttcaaagcctttactgcttgtaacacctattgcttattatataggatttgataaaatttgagtaagtgcattttagattccaagataaacataatagatttaatgcacgtgcttatttctatacccttaggaaaccccaaggaaatgagagtaaaggaatacaagaaattgtataaaaccacaggacaaaaagaatgagaaaataggcagagtccaagaacactggcagccaagcgtcttcattccaatctgtaccctagaagtaggaggctggtgraaatgatttttctgagagaaatatttttttctagaaaaaaatatgtacagatattgacctttggggaccactaatgatataattaactctgcttaattattcacctatggtaacatctgtaattattcacctatggtaacatatgttgggtgttgacaaagccacactcaataagaattctattctgcctttaaattttaatgaattattattattattattattattattatttgagacagagtctcactctgttgcccaggctggagtgaagtggcaccatcttggctcactgcaacctccgcctcctgggttcaggcgattctcctgcctctgcctccagggtagctgggactacaggcacccgccaccacgcccagctaatttttgtagttttagtagagacggggtttcaccatattgrccaggctggtcttgaactcctgaccttgtgatctgcccgcctcagcctcccaaagtgctgggattatatgcatgagccaccacacttagcctaattaatttttaagcttcaagggaacacttacatactgctggtgagaatgtaaattaatacaacctctttggaaaacagtatggagatttcttaaagaactaaaagtagaactaactaccatttgatccagcagtcccactcctgggtatctacccagaggaaaagaagtcattctatgaaaaagacacctgcacatgcatgtttatagcagcacaattcacaattgcaaagacatggcacaagcctaagtgcccactggaccaatgagtgaatamagaaaatgtggtatatatacatcagggaatactactcagccataaaaaggaataaagtaatggcttttgcagcaacttggatggagctggaggccattatcctcagtgaagtaactcaggaagggaaaaccaaaaacaatatgttctcacttataagtgggagctaagctatgagtactcaaaggcaaacagtatatatactagatatactagactgtggagattcagaagtgggaggttggaagaaaggtgagggataatacacatatagtgtggccaggcatggtggctcacgcctgtaatccttgcaccttggggggctgagaagggcagatcacttgaggccaggagttcaagaccagcctggccaacatggtgaaaccccatctctactaaaagtacgaaaaattgctgggcatagtagtgggtgcctgtagtcccagctacttgggaggctgaggcaggagaatcatttgaacctggaagacaaaggttgcagtgagccaagatcgtgccactgcactccagcctgggcaacaagagtgagatggtgtctcaaaaaaaggaaaaaaaaaaatcataatgggtacartgtacactaattgggtgacaagtgtactaaaatcccagaattcactatatgtaggatggatatggattcactatatatagtggattctgggattttatatattgtataattcatccatgtcaaccaataacctcttgtacctgtgagaaacaaactcatctgtccaaacccaaagaatggactcagagaccaggagaacagcgaaaagtgagactttgaatggcagccttgcaagataaggtgtctggtggacaggcacacccagcacagtcacaacaagccatttatcccctcgtgtgcaggtccctcccccagttgctcattggctgagtactgcaggtttacaatcttcccagacttcgcctattggtagttggattaagatttcaagtatgttctttaggatctttctgctgcattttattgtagcccaccatgcattgcaacagtctcagcactctccaaacatttgtcttttggccctagtggctgcacttagctgataagaaagggtacaattatttatgttgcaagatagcctaaactaaattatttggtggggtggggagagggtagttaagggggccccaactgataggcgcctggctgctgggtgaaaggggaggcaggaaggaggagggagcggtgttggctcagtacactctgcttctttatctctttatttccgtgaaggctgtttaaacctatastaaggcacttagaattgaaagtggactgccacatataggttattttctacatgccccaagaactattgaatttttttttaatgggaagaarattttaagcttctatacagtgatattcactatttggtttatagtttgttgagtttagagaaacrtgtatagtcatgtagccactattagcatcaacatcaaaacaatccctacccctaccttttttccttcttttttttttttttttttttcagatggggtctcactgtgatacccaggctggtcttgaactcctgggatcaagagatcctctcacctcagcttccctgatagctgggattacaggcatgtgctcctggcatagaacaattcccttttgtagtcaggctttccccatccctaactcctggcatgtgtttattctctaccctcatagttttaccttttccagaatatcacttaaatggaattttatactgtctagtctttgagtctcactttgttcacatgtatttgagatttatccgtgttgtttcatgtatcaccaaatgaaacaattcctttttattgctgagtgatagtccatggtatgtaccagtgtattcatccattcacccattgaaggacaattgtgttgcttacgtgtgggacaattataaataaagctactctacgtttccaaacaggtttttgggtgagcataaatttttgcttctcttgagtaaatggggtggagagggtgaggattgctgggtcatatgataagtatatgtttaacttcataggaaactcccaatttgatttccatactattttgtgtgaccaccagcaatgtgtgagagtttcagttgctccacatcctcaccagtacttgggtatttattttgttatgtttatttgctcttctggtaggtgtgtagtggtgtatcattgggattctcatttgtatttctctaataactaaagataatgggcatctttccatgtgcttatatgccatctatatatatttggtgacttgtttgtttaaatcttttgcctttaaacaaattagattgtttgtttccttatggttcagtttttaagagtttttgaaaaaagagggctgggcatggtagctcacgcctgtaatcccagcactttggaaggctgaggcagacgcatcacctgaggtcaggagttcaagaccagcctggccaacatggtgaaacctcatctctactagaaataccaaaaaaaattagctgggtgtggtgggaggcacctgtaatccacctattcaggagggtgaggtgggagaatagcttgaaccctggaggcagaggttgcagtgagccgagatcgcgccactgcactgtagcctgggtgacagggagactctgtctcaaaaaataaaataaaaatcagttgtgtctgtttctgagctctgtattcttctctgctgatcattgtgtctgtcctttcaccactaccacactgtcttgattacagtagctttacaacatcttgaagttagtatgtgttcaccaactttatttttcaaaactgtttcggcttttctagtttcttcacttttctgtgtaacatttgtcactatccacaaaaaaatgctactgatatatatatatatgtatgtgtgtgtgtgtatgtgtgtgtgtgtatatatatatatatatatatatggttttttttaactttacttttaaaaatttttttttgtagagacaggttctcctgggctcaagtgatcctcctgccttggcctcccaaagtgctgggattgtagttgtgagccaccatgcctgacccctactgatattttggttagcttgcattgagtgcagagatcaatctgaggataattaatatcctaaaaatatttagtcttccaatccacaaacataatatctctatgtatataggttgtctttatttttatcagttttataattttcagcttataaatactacacgtattttgttagatatgtgcctatgtatttgtctgtgtgtgctattataaatkatattacaaatatttttatttctaatagttcattactagaataaagaaacataattttgatttttgtatattggtcttgtgccgggtaaccttataaacttcttaattctagaagctcttttgcattttccttatgtggaaatgagaccactcaaatgaggatgagtaaagctattattcagagcttgctataggaaggtcatcagtcactactatttgcatttggcatagactcaaatgggattcttaaagaggagtgtaaaagctttagagtggaagaaagaaaagacttcaggtgtgccctgactggaagttgttggcgtggaggagctggaagcaaggctcgctagaagtgagtcctcctgagtgagtggttaggggagcgtatttggcttgctgtgcttgttcctaaattggaaacagcaaaaattagggaagcatgcagttattgatcaagcattggctgtttggaactgattgctacagcggttgtagtttggcttccttggttggtggctgcagaaattgtgggtcagagttctgtatgtatatatggtttaggcatcgtccatttttgtattcagtctcacttgggattttctatatagacaattgtgccatctacaaattgagttttattccttcttttctgatctgtatgcctttgatttttttttcttcctttattttactggctaaggtctttcagtacaatgttgagtaggagtggtgagagcagacatccttgccttcttcctatcttagggagaaagaatttcgtctttccccattgaatgtgatgttaactgtaggagtattttagatgacctttatcaaatcaaggaaaattgcctctcttcctagcttgcagagaaatttaatcatgaatagattttgtattttgtcaaatatattatctgcatctattgagatgatcatatggtttttcttcagtctgttaacatgatgaattacgctgattggtttttaaatgtcagacctgccttgcatttccaaaattaatcccacttggtcatgatatattatcctttctgtatattgctggatttgatttaccatattttgttgaggggttttaagagtctattttcatgaatgatattggtctgtggtggttttttttttcctttttttcttttaatgcttttrtatggttttgatgtcagggtaaagctagccttacaaaatgagttaagaagtgttccctcctcttctgttttctggaagagattgtgtacaattggtattacttcgtatatatttggtagaatttgccagtgaaaccatctggacctgcagtttttgttttctttcaagatttttaactagtaataggaatattcagattctgtatttcttgagtgagttttgatatttgtgaatttcaaagtattggtccttttcatctaagttgtcaaatttatgggcatagagttcctttattatcctcttaatgtatataactgtgtctagtgatatcccttctttcatttctgatattaatactttgtatcttgtttttttattcttttgtcagaggtttatcaataaaggttagctagaggtttattgattttctttttctttttttgagatgcagtctcgctctgtgtcccaagctggagtgccgtggggtgatctcggctcactgcaacctctgcctcccaggttcaaggaattctcatgccttgacctgcagaatagctgggattacagacatccaccaccatgcccggctactttttatatttttagtagagacagggtttcaccatgttggccaggctggtctcaaactcctgacctcaggtgatccctggcctcagcctcctaaagagctggaattgcaggcatgagccaccatgcccagcccatttattgattttcttgatcatttcaaagaaccagcctttggtttcatttattttctctattgtttttctgttttaaatttcattaatttctgctctaagttttgttttgctttccttcgttctgcttgctttagatctaaattgttctttgggtttgttgttgttgttgttttgaggcagggtatcatgctgttgcccaggctggagtgcagtggcacgaactcagctcatggcaacctctgcctcccgggttccagtaattctcctgcctcagcctcccaaccagctgacattacaggcacccgccaccacctccagctaatttttgtatttttggtagagacagggtttcaccatgttggccaggctggtctcgaacatctgagctcaagtgatccatccaccttggcctcccagagtgctgagattacagggtgagccactacacctggcctgttctttttgtcattttttaaggtggtagcttggagtaataattttaaactttcctttctaatataagcattttaatgctataaatttctctctcagcactactttagctgcataacaccaattttaatttgttatatttttattcagttcaaaatttgttatttccttgagacttcctctttgatccatgaatctattgttcagttttcaaagagttgaacattttgaagatatctttctgtatgagttctagtttaattctattatggtcagaggacatactttgtacaatttcagttattttaaacttgaagtttgtttatgatatgtttatgttttgtttacgatgtggtctatcttgatgaaacttccatgtgtatttgtaaggaatgtgtgtgcagctgggcgcagtggctcatgcctgtaatcccagcactttgggaggccaaggcgggtggatcacgaggtcaggagttcaagaccagcctggccaagatgatgaaaccccatgtctactaaaaatacaaaaattagccaggcacaatggcaggtgcctgtaatcccagctactcgggaggctgaggcaggagaattgcttgaacccaagggatggaggttgcagtgagccgagatcgcgccactgcactccagcctgggcaacagaataagacttcgtctcaaaaaaaaaaaaaaaaaaaaaaagtgtgtcggctgttgttgggcagaatattttgtaaatgtcagatcaggttgcttgatggttctcttcagacctgtatcctttctgatcttctgcccacctgttctgtccattactgagagagagagagattgaagtctttaagtataattgtggatttattctttctttcagttttgttagtttttgtttcatttatttgggagttctcttattagatttctgtatatttaggattgttttatccttttggttaattgatccttttaccgttatatgtctctttcttctctggtaagttcccttgtcctggagactacattttctggtattaatacaagcacggtaccttttgttttttttcttgtgcaaagtttatacaacataaagtttacattttaaccattttctggatttcttttgattagtgtttgtatgatgtaacttgtttcatctttttactcttaacctatgttattatatttaaagtgagttttttgtaaatagcatatacttgggtcttttttgcttttcagttcagtttgacaatgtatgtcttttattggtatattcagaccatttacttttaatgtaattgttagtatgtttagatttaggtcaacctctctgttttggtttgtcctttcccctatttcatgccttttagatattggtattttttggtattttatctattgactttttatttttatctctgtgaattcttatgtggtagctctagagattacagtatgcacacatagcctttcgtattctagttagattttatatttagcaactttaaggagaatatagaaatcttacaactattaatataaagattccttaatcctcccccgccttatgttataattgtcatttgtgttatatctacatatattgaaaaccccactccacaatgttacatttgcttccaacaatcttaagtttttaaactgaaaaaaaatcttttgatgcatctttagtcagttttctaaaaattttaatgtaaattagctgcgtgtggtggctcatgcctgtaatcccagcactttgggaggctgaggtgagaggatcacttgaggccagaagttcaagaccagcctgggcaacatagtgagacccccatctctttaaaaaaaaatcattttattgtaaattgacagtcaataattgtatatatttatggagtacaacatgatgttataatttaccaatataatatagaataattaaatcaagctacttaacatatccatcacctcaaatacttattttttgtggttgagaacattcgaaatttattctcttggcagttttgaaatgcagaacacactattatttactatgttcactatgctgtgcaatagatctcaaaataaaacttattcctcctgtctgagatttttgtatcctttgaccaccatctcttcattcctcccactcccccagcctctataaccaccattctactctctgcttatatgagttcaattgtcttagtttccacatgtaagtgaaaacatgcagtatttgctttctgtgccaggcttatttcatccagcataatgttctccaattccatccacgtcaccaatgacagaatttctctcgttttaaaggctgaagaatcttacaaatgttaaagcactttagatattaaaaaaaagtctaggctgggctcagtggctcatgcctgtggtctcagcattttaggaggccaaggcgggcagatcacgaggtcaggagttcgagaccagccttgccaacatagtgaaaccccgtctctactaaaaatacaaaaaattagccgggcgtggtggtgggtgcctgtaatcccagccactcaggaggctgaggcaggagaatcacttgaacccgggaggtggatgttgcagtgagtggagatcgcaccactgcactccagcctgggtgacagtgtgagattacatctcaaaaaaaaaaaaaaaaagggggtctatttcagatatttaccatttctgaaatttcatatttccctctggtgtcattctccttcaatgtgaagaacttccttcagcatttctcatagtgccagtctgctggtagtaagttctctttattttcttgcttctggaagtgtctgattgttcttgatccctcaaagagatcttgagggatgtagaattctcagttgacagttcttttcagtactttaaagatttcggcctccatggtttcttttttttttgagatggaggcttggtctgtcaccaggctggagtgcagtggcgtgatcttggctcactgcaacctctgcctcccaagttcaagcgattctcctgcctcagcctcccgagtagctggaattacagacgcacgccaccacgctcatctaatttttgtatttttagtagagacgggttttcaccatgttggccaggatgatcttcgatctcctgacctcgtgatccayccgcctcagcctcccaaagtgctgggattacaggcatgagccactgcacctggcccccttcatggtttctgatgcaaaattggtaggcatttgaattcttgtctacttatataatgtgtcatttttctctggatgctttcaagggcttttctgtctttggtttttagtagtttggttatgatgtgtctgggtgtggcattcttcgagtttaatcaactctcatgttaactgagtttttgaatctataaatttttatatttggctaaatttgggaagttattagctactattttttcatacctttttgtgcatcaatctctttctttctccttccagaagtccagtgaaataaatgttagaccttttgatactgtcctatatttcagattgatatttaagattgttctttaagtctctattcttttttttttaacatgtttttcctctctgttgttcaaattggataatttctgttaatctttcagctcactgaatcttccctttggtatctccattctgctattgacctcatctagtggatttttaatttcagatcttatattttttagttctatagtttccatttttttttttaatggttactttttctctgctgagaacttccatcttcccagtcatttctctttactttcacttatggaacatagatgtaataactgttttaaatctgattctggtaattccagcatctgtgtcatctcagggttgacatctgttcatcatcgtttgtttctcttgagaactggtaacattcttctagttctttgtatgtcatataatcttggagtgcatcgtcagtgtattttgaagagtatgtttaagagtctgggtcctgttaacatctggagaataatgattttgctttgttttaacaggcaatccagtttcacaagctctgcctctccttctgtgggtgatgggttcaatgccagttttattttaaaagcgtttgctatcctgtttgagtttgccctcatgtgcgcctctcagtgatttgtctgcaatttgaatgatggtttatatcatagtttatttctgagagactttgctgtgcctttggggtctattccatgcatgtgccacttgggtgagtctggggcttgtgttagttcctacacagaattaagggattcccttctctggtcctttccttgctgggattttcttccccatctctggctcccaggcacccctttcgctgtttctcttgctagaaagatgggtttctctcagacagttttaacctccttctctgtcacacagttccatgtgactggcttcacccgaagagtgaggcagtgaaagaaaagagaagaaacaacaggattccttttacatgcttacagccacagagaccccttctctcatttcttccagggaaagagacaggctttgaggtgcctggactgctggccaacctttaggcaaggccaagagggaaaaaataatgaatgtgaaagtacgctgtcatcatgctctccagcccacatggatctcttgtcctcatcctctggccagaaagaagttttatgggttttgttttgttgttgttgttgttgttgttttgctgtctgacccctcacacaccttaccccttgggcaattctgcaaagaagaggggaaaagaacccaagaaactccagtgtactacttgatcttccagtttttactcctctcctctatcaaccagctatttttccttttcagaatcctcaattgctttttgtgttgtccaatttttaattgtaacctgtcaggaagagcagcttgtagtgggcatattccattttatccagcactggaattggcattcagattttttttgttttattttgttttgtttttgagatagtatctcattcttttaggctggagtgcagtagcacaaacacagctcactgcagccttgacctctgggctcaagtgatcctcccacctcagcctccctagtagctaggactacaggtgtgtgccactacatccagctaattttttttggtggtggtttgtttgtttgtttcggtagagtcagggttttgccatgttgcccaggctggtctcagactcctgggttcaagcaatccctccaacctcagcctcccaaagtgctggcattacaggcgtgaggcagtgtgcctggctgacactcagatttttaatgccttggtcttacaaatgaatagacggttaatggtcctcaaacatttgagaaaagtctctagtatgagagacagacacatatggatgtatgtccaaggaactcagagcaaccaaaaattgaagtagccagaaataaacttaaaataaacataaattatttgatctccttagatctaagaaaaagtgatatccttggctgggtgcagtggctcgtgtctgtaatcccagcacattgggaggctgaggtgagtggaccatttgaggtcaggagttcgagaccatccttgccaacatggtgaaaccccgtctctactgaaaatataaaaattagccaggtgtggtggtgggtgctggtaatcccagctacttgggaggctgaggcaggagaattgcttgaacccaggaggcggaggttacagtgagcagagatcaagccgctgtgcgaccgagcgagactccgtctcaaaaaaaaccatctcagaaaaaaaaartgatatccttaaaacaagatgctatttatgtaaaaggaataatcagagactaagagagaacacataaaattaaacatatgttagcaataagtttaataaatgaatttaacaggtttgggagagtatatcatggtaatctcctagaaatggagtaaaaggaaaaagagggcaaatagaaaaaaagatcaaagaaaattagagggccaacatttggctaagaaatgtatgaaaatttcctaatattgaataatgtgaatttctgcattgaaagagcccttcacagtgaatgactcaactcccacaacaaggcacatcctttgtgaaatttgagaatgcccagattaaaaagaagattcttagagcagaaacaggtcacattcgaagctcagaatagcatcagaattttcaagaaccacctctgaacgcaggatggtggaagagtatctttaaaaatgttgagggatttgtggccttcagtgctgccaaggaagcatcattcaagcctctcttcccactgtgggcatgtctaaaccagagtctcctaaagagcccgaacagctgtggaagccttgaaacagcgaagccttgaaacagccgagtccggggagcccttctgaaccatggggaatgctcatgactgtgtggtcctagacccagactccaagcactccgggggctttgggttggtcatctgccactgtggaggagatggatgcagccatgaatcagggccacaccaggtggttggaagagctgtggaacctcagagagctgtctgaagagaagattctcaaagactgggtgcccatgtgactgtggaaaagatatttgttggtggcattaaacaggacaccgaagaacatcacgtaagagattattttgwacaggataggaaaattgaagtgattgaaatcacaactgactgaggcagtggcaagaaaagggtctttgcttttataacctttgatgaccacgactccgtggataagattgtcattcagaaatactatcctgtaaatggccacggctgtgaagtaaggaaagtccaggttgcagcaagacatggctggtggctcatccagccaaagaagtaaaaggggtcctggaaactggtggtggtcgtggaggtgatttggtggaagtgacaagtttggtcatggtggctttcatgccaaccatgatggtggtggatatggtggcagtggggatggctatcatggatttggtaataatggaagcaattttggatgtggtggaagtgacagtgattttggcagttacaacagtcagtcttcaaattttggacctataaagagaaaaaactttggaggcagaagctctggcccctatggtggtggaagccaatattttgccaaaccctgaaaccaaggtggctgtggtggttgcagtagcagcagtaggtatggcagaggcagagggcattcatttctgccggaaacaaggcttagcaggagaaacaaggcttagccagagcagcgacagggaagccacaggttacaacagatttgcgaactcaaccaggcacagtggtgtcagggcctagctgcttcagggatatgcttcagacaatactcatgtgtatgggcaaaagactcgggggctgtaattgtataacagggcattttagtttctgttctctggaaactgaaaacagtccaacaaagaattttaatgtagactatttttgcacccatgctgttgattgccaaatgtaatagtctgatcatgacgctaaagaaatgtgtctttaaaacattctgagggaaaattgtctttttttttttagtttttatgtttttgtgacagggtctcactctgtcacccaggccggaatggagcgatgtgatccttgttcactgtggcctcgaactgctggactcaagcagtcaacctaccccagctgcccgagtagctggggctacaggtgtgtgccaccacacctagstaatttttttatgttttctagagatggggtctyaccatgttgcccaggctggtctggaattcctgtcctcaagcaatcctgaacctcccaaagttctgcaataacaggcataagccatcacacctagccagaaacttatttttaatgtataattacatacccaaacaatcaatcaattatgatagcagaagaaagatatttttagatgtccagcatctcagaaatttgacctccagtgtgtattttctcaaggaaagaaactattagaggattgtgccaccaagtaaagtaaaccaaggagaaatggaagacaccaaatataagaaatggaagattcagtgtggggaagagattggaagtcttaggacgacagctgcagcaggaccagagagtagccagcctgacatgtcatccagagtgctccaggaaggcaagggctccaagagagatgtcttcagagaaagatgcaaatcatagattccttcacatggttgatcttgtttaaagtattgctcagaaggggttcagaagaccaataatagtgacatagaaaactaagcaaacaaaatataaattcataactccatgaaaagcaatttgtgctcaaaaggaaatatgatgacagctaattatagatatttttgtgatggacagtataacatgtccctggaaaaatttattttctacggaattgagccctaaaaataccagagcaaggaacctatagcttaagagagtcctaaacaacatatcaagtaaaatagaatgagagtggggattaaactatatagtgtctaggaatgctcacttgtcaatccttagagaaactaaggataaaagttgggatagttagtgcttttagaggaaagaagaggtgtttaattgcattggggcacagacaggggctagcaaagttctatttcttttttttcttttcttttaagacaggctctcactctgtcacccaggctgcagtacagtggcacaatcatagctcattgcttgcagcctcaaactcctgggctcaagtgatcagccttccragtagctgggactacaggcatgtgccatcacgcccagcaattttttttctttcttctttttttaggtagcgacagagtctcataatgttgcccaggctgatcttgaactcctgggcttaagcagttctcccaccatggcctcccaaagtgctggattacaggcatgagccaccatgccctgccaaagttctatttctagatgtgggtgtggctataagggtatgtgccttgtaaaaaataatttttaaaaatacattattcaatgtatttttgtacgcttattttatatttactatactgtttggtatattatgatgttaatataatattttttagaaagaccccaggagagtggttattctgggggaggaagggtaactggaagaagggaatgggtgcctctaaggtgctgctggtattgttgtgtttctttttcttaaggtttttttttttttttttttttttttgagagttttgctctatcatccaggctggggtgcagtggcgtgatctcggctcactataacctctccctctcgggttcaagcgattatctgcctcagcctcccaagtagctgggactataaggcgagtgctaccacgtatttgagtagagatgggatttcaccatgctggccaggctagtcttgaaatcttggcctcaattgctccacctgctttggcctcccaaagtgttggaattacaggcgtgagccactgcgcctagccgtattgctgtttcttcatccggctactgattcacgcatgtgttcagctcatagaaattaactgaacttcatacacctgtactttatgatgtataatgatgctccaataaaaagtatttttaaaaagtaccagaggttatgggacaggaatggagcagaccactcaaaaccaatgtaatcttgggaccagaggatgaaagcaatgatatttctagtaaaactactgacagagtttaaagacttgttggccggatgcagtgactcacacctgtaatcccagcactttgggaggctgagacgagcggatcatgaggtcaggagattgagaccaccctggctaacacggtgaaaccccatctctactaaaaatgccaaaaaaaaaactagcctgacatggtggcgggcacctatagtcccagctacttgggaggctgaggcaggaaaatggcatgaacccgggaggcggagcttgcagtgagccaagaccacgccactgcacaccggcctgggtgacagagcgagactccatctcaaaaaaaaaaaaaaaaaaagacttgttgaatttttttcttttcttttctttttttcttttaatcgagatggagtcgtgctctttcacctaggctggagtgcagtggcgcaatctcggcttgcgtcctgggttcaagcgatttttctgcctcagtctcccaagtagctgggattacaggcgcccgccagcacatctgcataatttttgtatttttagtagagacggggtttcgccatgttggccaggctggtctcaaactcctgaccttaagtgatctgcctacctcggcctcccaaagtgctgggattccaggcatgagcacttttaacatgctggggaaaatgatgtctggaccgtgcaacttggtgttgtgttactgtcattcttctatttactgatcgcctatgacttgatttactctacagaatcttgttagaacagatcattctgggctctgtgtcagacaatatagtgataaccatataaacaatatatactgatagaaccaaaaattttgatataagtacaaattatggtataattgggagggggatagggaaatgaaagtctacgaaatcatagtctagtttagcatacagtgctagatgatccaaaaataataagtggccaggcctggtggctcatgcctgtaatcccagcactttgggaggctgaggtgggaggatcacttgagcccaggagttcgagacgagcctggccaacatggcgaaaccctctctacaaaaaaaaatgttttaaatttaaaaacaaaaataataaggaatttttgtraaaagaaatttgtgggtaaatattgagagaaaccagtaaaatgagttgcttctaaggaggatacctcaggggtcagaagaatgctgctttttgttccaagtcttgtagcactatctgatttttttaaactatatataactgtaataacattaaaaataatgaaaacagcaacttaccaaataagtttacaaatcttccactaagttcctcagagcatcttacatgtacccatctaagcctcataattgtttctcccacctttttagactttccaaggtccattcttcctttttaatggtcaggagttcgagaccagcctggccaatgtggtgaaaccccaacygtactaaaaatgcaaaaaaattaggtggggtagtggcaggcacctttaatcccagctactcaggaggctaaggcaggagaatcccttgaacctgggaggtagaggttgcagtgagtcgagattgtgccattgcactccagcctgggcaacaatagtgaaactctgtctgaaaaataaataaataaaaataaagataattttaagattattgttttaaagaataaatgttgatattcttaaggtggtaaaagcaagataatggcatatttattagtaacaaaaatttaaacaacaaagaaaaagcaaatgatttccaaaatatcaataacaaatcagtaaataaaggtaatcagaagtttaacttccttgtggctgggyacaatggcttgtgcctgtaatcccagcactttgggaggcttcagtgggcggatcacttgaggtctaaaaactacaaaaaattagccaggtgtggtggaacatgcctgtggtccagctacttgggaggctgaggcaggagaatcacttgaatctagaagatgagaccagcctgggcaacatgatgaaaccctggctctaccaaaaataaaaaaaattagccctgcgtggtggtgggagcctgtaatcccagctactttaggaggctgacacaggagtctcacttgaacccgggaggcagaggttgcagtgagccgagatagcaccactacactctggcctgggtgacagaatgagactctgtctcaaaaaataaaaataaaagaactaaaagtaattctcaagtgatgagtatgtagaggtggagatgaaacaagaaaggcgtaattattgaagctgggtgatgggtacctgggttttttttgtttttttgtatgcgttttgtttttatagtaccctttctctttaccatagcaaaataatacatgggtgtttattacactcttgtgctcactttgtgtatatgcatttgaagttttctataatttttttttttaagaaaaagcaatatttggctggccacagtaactcacacctgtaatcccagcatttgcagaggccaaaataggtggaatgcctgagctcaggagttcgagaccagcctgggcaacatgatgaaacctcatctctaccaaaaatacaaaaattagccaggcacggtggtggatgcctgtggtgccagctattcgggaggctgaggagggaaaattgcttgagactgggaggtggaggttgcaatgagtgcagattgcaccactgcactctaacattattgacagagtgagaccccgtctcaaaaaaaaaaaaaaagcaacattctggcttaccatattagcgagtcaaaagataatatttagggctgggtgcggtggctgatgcctgtaatcctagcactttgggaggccaaggcgtacggatgacctgaggtcaggtgttcaagaccagtctggccaacatggtgaaaccccatctctactgaaaatacaaaaattagctgggcgtggtggcgggtgctagtaatcccaactactcaaaaggctgaggcaggagaatcacttgaatccaagtggtgaaggttgcattgagctgagattgcgctgctacactccagcctgggcgacagagccagactgtctcaaaaagaaaaaaaaaaatagcaatgtaaacatattatttagaaatgtggaagtaaataagagtgaaaacagggccgggcgcagtggctcacgcctgtaatcccagcactttgggaggccgaggcgggcagatcacgaggtcagcagatcgagaccatcttggctaacacggtgaaaccccatctctactaaaaatacaaaaaaattagctgggcatggtggtgggcgcctgtagtcccagccacttgggaggctgaggcaggagaatggcctgaacctgggaggcggaacttgcagtgagccgagatcgcgccactgcactccagcctgggcgacacgaatgagactccgtctcaaaaaaaaaaggtgraaacagttaacagacatcaaagtggatgcctctgggatgagaactgacttggggagggctggaggagggaacatctctgtattagaaggctttgatkttattttattttgaaaccttatgcatgtataactttgataatatattcatttgtggattgccacattgttttcgaggaaaatacccatgtgatcttacatgaataatcaggcatagaccagtgctttgaatatataaaaattctgtttagccatgataattttggcagtatgccatttatttctgttgccaaaggcagtgatttaaattggaattcctgcctgggatgagtagggctaagaggtttgattacatatagtttccccatctgtactctggcctccagcagtttgttctttatgcagcagcgaagagtgatcataaataagcttatctcactctccagtttgaaagctactaaacgtctttcatagcaattagaataaaattcaaactcttcggcatggcctacacacaaggaccctaaataatgtaaatgattggactcgctcccagttctcctgtcactctcctcaatcaccatgccccagcctcagtggccttccttggcacacccacagctcattcctacctcaaggcctttgacttgccattgctcatgagaccgattgcttaccatcactcaggatctcattcaaaacttcattcctggaaaaggtccttcccgaycatcaagctagaggagcttgctgcaccccttctctgcccacagctatggatctccaagtgtgggcttcagaccagaagcgtcagtgttgcctgcaagcatttcattttgtgttgtgttttctctggaaatgcagagtcttaggccccaccacagacccactgaaggaamagctrcattttaaccagaccccaragtgattgtgctttaaaaatttcagaagcactgatctagagtttccccttctaattttcctgtgtatctgttacaaggtgtgtccattgctgcaggtaatctggcatttgtttacctgtttattatttctcttccctaaatagaatttaaggtccacaagggcagcacctcgtctggctcgttcacttctggatccccggcacgtagcgtcagtgcacacagtacatgctcaataagtatttagatgagtgaaagaataaatgaatataatggaaattattttatgttctttgaaatgtataactgaaggctgggtgtcatagctcagcctgtaatcccagcactttgggaggccaaggtgggaggattgcttgagtccagtacttcaagaccagccttggcacatggcaaagctgcaactctataaaaaaataccaaaaaaaaaatatatatatatagctgggtgtggtagtctcagctacttcgggaggctgaggcaggagaatcacttgaacctcggaggtcaaggctgcagtgagtcatgattgcaactgcactgtagcctgggcaacagaggaacatcctgtctcaaaaaaacaaaacaaaacaaaacaaacaaaaaggattgcataattctacaataaaaatcttcatggctttcacttgtttgtaaaatcggggtgatttttctctcccaacatcatcgttatacaggggtttcattctatatcttgggcatcaagtgctattaaactattgtggcctgtgaagaattacttatttatccttgctttggggcagtttgtcttcagaaccaaagtttagattttgtttagactgattctctactgacttaacaccataactggtttttttttttttttttagtatttaagaagcactctcgttcaatccagagttaacattatctttaaaggttttttattcaaaatgaatgtttgatatttgtatcaagttttatcaaataagttaacaatttaaaaaaaatcaggttttaaaaatgttaagtcaaatgcaagatttaaagttaaattgcaaataaaaactgatagggcatataatgtatccagttttttacatctgagataggattccaggaaagacctatagtttctgatattatcctgcattttttttttttgaaatggagttttgctcttgttgcccaggctggagtgcagtggtgcagtctcggcccactgcaacctctgcttccagggttcaagtgattctcctgccttagtctcccaactagctgggattacaggtrcacaccaccatgtccggctaattttttgtattttgagtagagacgggtttcaccatgctggccagcctggtctcgaactcttgaccttgtgatctgctcgcctcggcctcccaaggtgstgggattataggtgtgatccacgggcccggccctacatttaaaaaatacattcccagtatatttcttaatgcatatcctggtgaaatttgtgaagaaacaacttttcaatctatattctttgagtgaataaatagcacmmcttacattctatggttttcaactgggggcagtcgtgtcccagcggaygtttggcaatggctgtgactgcatttttggtagtcacacctgggatggaggagtactggcagcatctagttgggggagctcyggggtactgttagttatgtaatgcacagaacaccccacagcacaaagaattatctagcccaaaatgtcagtagtccactgttaagagacagtggacarctgtctccttctgcatagagaagtctccttctgcaaatactaatgccattggaaaacgaatactttgccctaccttctggagaagagaatatatagaaattggcaactgagagattcagatgggtatactggcacctttagatatgttcattttagatgattatttctaatcagaaatctagtgactggcctccctctctttggggcaaatcactctctcaacacaggacatttaagacatttcacaacttagttgattttagaattggataacgttctcaaataatgatacattttttaaaatagggaaattcaaatatagggttactggttttccttattttacagatggggtcgaggatttggtcttttgggttccatttttggaaaggatggtgtattaaaccagccaaacagtgtctttggacttatattttatatactacagttattacttggtaagtatttatcaatacaaaaataagtttgttatattccgtttagtactttgtgtctttgccctgaagtgtcttgatgttaaagcatgtgttatttatagaaccactagcgtgtacaacatttttgtgttatgaaaacttgattcactgagatttttattatattattgttgamtttatgtcaattgctgtttaatcatggagagcagtatctcatgatgtccagaaaaaccagtcccattccaggaaattatcactcccatcttccctgttaacgtttttccttattttatagactcagtggccttgaaaaatatcatatattaaggggacattaacaagaaaccatattcataatcccattacctttacatatccactatttccacagtcttctgcttttaaaaataatttttgggctgggtgcggtggtgcacacctgtaatcccagcacttagggaggccaagataggcagatcatctgaggttgggagttcgagaccagcctggccaacataaagaaaccctgtctctactaaaaatacaaaattagctgggcgaggtggtgcatgcctgtaatcccagctactcatgaggctgaggctggagagtcacttgaacccgggagacggaggttgtagtgagctgagatcgcgccattgcactccagcctgggcaacaagagcgaaactccgtctcacaaaaaagaaataaataataataataataataacttggggccaggtgcagtggctcacacctgtaatcctaggactttgggaggccgagaagggcagattacttgagcccaggagcaacatggtgagactctgtctctgtagaaaatacaaaaattagccaggtgtggtggcacacacctgtagtcccagctacttgaaaggctgaggtgagagaatcacttgagtccaagagatggaggttgcagggagccgagatcacaccactgcactccagcctgggggtcagagcaagacgctgtctcaaaaactaataatttaatgtgaactgtgtttcaacatagtgtcgtttatcctaagtgttattgttaacatctaggtttcactccttttacttccaaataatgctgcagtgatcaactttgtttaaagacctcctgctccttccttcctttgaattatctccacaaaataaatttccaagcatagtatcaaaaaacacagatattttcaattttaatcagtgttaccaatttgcttttccctcagttctttggtttccctgaagctccagcggtctttatttttaagacatgctttgtaaaatttcttttttttttaattgtaacgataatcttcacctggaaaaattgctaatagttacacattagtacctattactttaatttttactctttttaatttccttttattgcccatttagcatttagttattggatcccgatactagtacatttttatatgtgttacaaacattttatgcattctttatccttttttgttagtgttatgaatttgtattgtattaagtttttatacttttagagttaaatccatctgttgatgcctttgcattttatttttcttcttttttgtagatcttgttgcataccaatgcttttgtattttaattgttaatattccattacctgtcagctcttctgatttggttcattaaaaatacatgtaactcttctatctgaaattgatttgttatgaggcaaattataaatctaaatcatcctcagtagttctgtcgagtttgcccagttccatatctatgtatttatcttgcagaagtagaaagatgtgtgcacaaggatattcatagcagtacagtgtaaaatagcaaaaaaaaaatggaggtaggttacaaatagrtaatggttgaataaattagaaaatactatgaaatactatgtagccattaaaggaaaaaggagatctatgtttatatcctagaaagataaagacactatttagtgaaaaaagcaaattttggtataataggtataggataaacgtgtttgtatacatgcatgtaaatgcatagaaaagggtcgggtggttggggaggagggagaaatttcactaggtattctgcatgtttccattttgctggatttctagagaagaatatgaagtataagcccagatgcaagatgttttcctttaaaggcaaagaacctaagaacagcctttgactagattaactcttgaagatagaggtgtgacagccaaatttttgttttaccattaatttaatgccatggtatatacatattttaaatcatatttatcacatgtgttttttcattcgcattttttgactcgcatttagatgcttcacgtgccttttaatgttggtgtcttcatgggaggcacatttgaactaacctagcaatttccagagcacagcatctgtactcccttctaacctgtttgagacacagcatttttaatttaattttttcataggtaatccattcacgtggttcaaaagtttttaaaaaggaccgggcacagtggctcatgccaataattccagcattttgggaggccaagatgggtggatcacgaggtcaggagttcaagaccagcctggccaacatggtgaaaccccatctctactaaaaatacaaaaattagccaggtgtggtgccgcacacctgtaatcccagctacttgggaggctgaggcaggagaattgtttgaacctgggagacagaggttgcagtgagctaatgtcgcaccattgcactccagcctcggtgacagagcgagactccttcaggaaaaaaaaaatatatatatatatacatatataaaatgttacacaaagaaaaatctatcccaccccttccctttatgcctggtttccagtgctcctcagccccgactggtagcttgttattgtctctttatgcatatacgagaaagtacaaatacacaatcttaattttcctcctttttaaaatataaaaggcagatgctatacccactgttctgcagcttgcattttctttttttgcctgatgaatatatcatggtgatttttccatatcagtatattaaatgtcttcattcttttctacagctgcagaataatccattgcataattgtaccatcatttatttagagttacagcacattttaaattccactgggaatttgaccctgagccaaacgtacctagctgcattacagtagcatttaatggatatctggtatttatacactattctaagtgctttaatcctgcattatctcagctcatttaattgcccagcagtcttaagaagtaggcatgattgttatcccaattttacagttgagaaaagaaaggcatagaggaagaaataagttgcccgtatcattctgaagttaactttcttaggtaaaattgtgaccacattaatttcgaaatgttagttgtttagcataggtgaagtcagcaaactttttcagtaaagggcctggcagaaaataggctttgccagttgccgcagccactcaactcttctagtatgaaagcagtcacagacattacgtaatgaatgacattacataaatgaatgagcatggctgggtgccaataaaactttatttacaaaagcaggtagctggccagatttgctagtccctgcaacaagtaattcagcagcaccttagtcttgaagtgccctatgaaagcatctaggcccgtggctgtgcggcagccggcccacaggcgtcttcttgttgcatttttttttttgccaacagggcccaggatttcagctctttaactgacttctttatacctgctcccacctgttattttgttcctgtttctgttatccttatccatgagtcattgggtaggagggtagtttaacatgctctgccttctctgtccttgaaaataaatgcacatattctctatactgttgcctataagaaattaaaaacaatacatgtgaagatagagtccagaattcaggtgcctttttttttccttttttttttttttttttttttttgagacagagttaagactctgtcgcccaggctggagtccactggtgcaatcttatctcactgcaacctccgcctyctgggttcaagtaattctcgtgcctcarcctyccttgtagctggggttgcaagcgtgcaataccatgcccagctaattttttttttctcttgtactttttagtagagaggggctttcaccatgttggccaggctggtctcaaattcctgacctcaaatgatctgcctgccttagcctcccaaagtcctagcattacaggcatgagccactgtgcgtggcttcaggtgcctttttgtattgagagcctggatttagcacacatgtccaccatttttcttgatcaggtttgacccacatgcagccaacgggcaaaatgtggtttcccttatccaccagggtgagcccttcctgaaatgtttatcaagagtttctttttctctcttcagcagcttgttggtgtagtcacctctcattgtggatttttaatcaatttgatctaaacatggaaaagcaaattttactttccacagatgggcaggatgtagtgaaagtccagagaaggttctcaccaaatgtgtgcagctcggaagaaaaaggttgtggtcctcatgtcccgttattcatttggtgtcttggggctgttgatgttacaagtcagcttcattgcttaatgtgattgtgagattgcatgttttctttgtgtgcatattttcaactaggctagtttgtgaaattagtaatgttttacctgaaagattgagaaatcaaaaacatcacagctataaaactggcatttggctgggtatggtggcttatgcctgtaatcccggcactttgggaggctgaggcaggaggatcacctgaggttaggagttggagaccagcctggccaacaaaaaatcagccaggcgtggtggcacgtgcctgtaatcctggctacttgggaggctgaggcaggagaattgcttaaactcaggaggtagaggttgcatgagttgagattgtgccactgcactccagcctgggcggtagagtgagactccatctcaaaaaccccaaaacctggcattatyaactgcagagtcaacctgtataattttaacaaaacagagcagtatttctgttctcaattttcagagttggcaggaagatcagtattcaaacactgcagcaagtcacacagtgttattccttgtcactcagaaagcctctctccagcaccaaggcctgactgagcctgcgtctcttctcttacaggcatgacagcaagcgctgtggcggctttgatcctcatgacgtcctccatcatgtcggtcgtggggtccctgtacctggcctacattctgtactttgtgctgaaggagttctgcatcatctgcatcgtcacgtacgtgctgaacttccttcttctcattatcaactacaaacgactagtttacttgaacgaggcctggaagcggcagctgcaacccaagcaggactgacgcccgacagactccaccctaacagtctcaagcccctttccattcagtttattttgcagcaggtttttattattattattattattattatwcacaacagacactttccctaagaatctcaaactgatttttaaaaatccggtaaattagaaggggccctcgctattttctgtgtcagtcttcattttaaatatggatacaaaaaggatacgccgagccaatcaaagacaagctttaactttactttgaagtgtttctgaaatgataaaatgtagccctagccccctgccctcaattgtaaagtgagcaaccattgctagtaattctttaatgtgtataaattcaatttcaggtataacaaatgtgatcatgacatgaaaatattctagaatagatactgtattaaatattgccatgtttacaatatgtaatatgtttttagccgatggatttaaacatgtagattcaactagaatccatttgtgatatttgtaaataaaggtagaaatattagatccatttctgcagaacttactgtacagtttagttggagtgtagcactgaagaactgtcagctcagcgttgactgaggagatagtgaaaatagcctatacacagcatcttgtgaaaagtactggcagccgtggttgcagcaaataatagggcaaaaaaaataataatagggtggtcggttccctttcatctccctcttctgaaaggaaaaaattgaattggaacgttcaagtccagtttgtgttcagtcataaaactgggccagttgttaaccttacagaatgagtcatgtggccagaccttcaagtccaaggccttcagacactaaggatgggaaaatgggtatttttctttggagaaaagctggaaatataaacatggcattttyaggtaaagtttcttccactagttgaattttcatgcagatatttttccttaacgttggtgccagtcaagcaaagagtattatgatggaaaagaccagtccaagccccatcgctccggagtgggagccagtgttcttgctaattgtttctttcyrcactaaccactcagatgtctaatttaattgttttgcagtcaaatactggatttgtaaccttcagggctgacatgctgcccartttgcttcatcgggagaatagcaacaggtagacacatctcaaggctaaatctgctcatgtygccactgctctcataatgacacacatgcagtaagaagacttttgtaaggggatttgagtacacccaaatgaaattgtgacaggatgtttgtatggttaacatctgatatcagaatgttaaaagtgccttctgtcttaaatctcaaaccaaatattttgtgtgttgaccttgggcagaagaagtgtccttccctcctttcttcaccgtcaggtagaaaacctgcactctgcagaagggtcctgtgtgatcacttaatcctctggttgagaagcagcagtaatgtttttgcttccaacctgattaatcattttatgttgaaaatagtcaatgagaccagtatctcttgagtgctttatttgccttctctttgaagggaggggacgggctctgctctgtaaactcaaatgtgtagagtcagcaacaattccgtagcttccaactgactcagaattgatgcaacgtaggtcttctggcccgaggcaggtatcaagtccaaatcataatgaacttttcaccagtttcaaccagtttcttaaaagagagcttaagtcaagatttcatcaagacttgtgttttcccatgaatgtgaatctttcaatggctgttggagtatgtatgtactgttcttgcattctgaagwagttaaagaactctagaaagtactgattggccatctggtgtctatggagaaagaagtcctcacgtttgagggctgtacagtgaggccatcttgtagcagcgcatccagctctaccaaggcagtcctctggttcttttttctaagctacagtggaaatggcctaatggttaaaactgtggtatacatgacatcggttgtgctaaacaagttcctcgtgtcccaatatccaatggtttttcatcctattttgtatcaatcaacagagtatagttaaagcttgtcttgatgttgcattcttgcaaatgtcttcaactcttacctgagaaaacatggcaaaatggtcagccagacccttccagtttttcctttgcttttctaagcctcggggaaaccactgtttcagttgtataaaaacttttgccacattcctatggcccagtcgaattaataccctttttctcactgagagaggaacacgtactgcctgtcataacagcattgtaatgccagtgtctcagtaacagaatcctggtgggtgttaattgggtgttttttgccctggagaattcagattcctttctatacctccgattctgcccagaagagggggggaatcaccagtgttacaaaattagaagattgttttgcctgttttagactgaatatttgaacactgcagcattactagccaccagtgttaaaggacagatgaggggaaacatttgtttttagcagtaattccatgcctcatcttttttaagtgatttgttccaaatgaagccatttattgacttgatgttcacaaatatcatttgaagaaataacaggaattggggttagatgataaattctagggaatctaggtgatttggaggatttcatttgttttgcattacagctagttgctctcactaaaggtaaatttccggtgaaataactcaggtttaactagctgtgtgcccagaatcactgttccttcatacatgtgtcctctccttaaattcattactttcaaatgatgttcaaagcattgactattttcattcaaagaaactacattcggccgggcacggtggctcacgcctataatcccagcactttgggaggccgaggcgggtggattacctaaggtcaggagttcaagaccagcctggccagcatagtgaaaccccatctctactaaaaatacaaaaattagccaggcgcagtggcacacccctgtaatcccagctactcgggaggctgagggaggagaattgcttgagcccgggagacagaggttgcagtgagtcaagatcatgccactgcactccagcctggccaacagagcgagactgtcccccccmmaaaaaaaaaagagagagactgcattcaaagaggaccaagactacagtgaaattaaaactgtttgctggctgggcatggtggctcacacctgtaatcccagcactttgggaggccgaggcggttggatcacctgaggtcagaagttcgagatcagcctgaccgacatagtggaaccctgtctttactaaaaatacaaaaattagctgggcatggtggcggcacctgtaatgccagctcctccagaggctgaggcaggagaattgcttgaacccagtaggtggaggttgcagtgagccacagttgcgccattgcactccagcctgggcaatgagtgaaactctgtctcaaataaaaaaataaaaataaaaactatttgttgacttttgtttttcatttagttttggaaaagactatttgcaaaagtacagagttatcttcagcaattacttcacaacttagattggtaccaagagtgacaggagatcttgtcttggaagatcattattagatgccaacaaggagacccactgtgatttctggtaacctatttggggaaaaagacctaatgacctaatatgcaatttctgtcctcgtgtctttttctctaacacacagtcatgggtgaaacatttcagacacctcaggcagcacttatggtttctaattgtgagaactacccttccatcaaacaaaaagggcaagggtgggagccccggctacttggttaaacattttttactacaaattcgcccagaaaaggtgaaatattttgttataaaactgtattaagcatggcctaagtatttattaggtatatgatctgtgtagtatgttccatcagaaatatttcttactagtgctttaagctccagagtaaacagtcatttaaaatggagttcactgggcaggtttcccctttaatctagatagaaatactctttatcagagatttaaggcactgttttgctaactggtaaataaaaccaaatgtaaatatgtaagaatgtttatttgttgcacataacttttttggtataaaataaatgtagaagttacctgtggaagttgtgctcccattattcttaaactgcagggttgcattccaaaagaactgaaacgaagtctttttagactcagtaggagccttatattcttgaagtcaatactgtaacctcatttctaaggtatacagggttgattctttttctcttaaatcatatgtaacttgcagaagattcagagtcctcagacctctagttcttggaattcctgtaggtttacggtgtatgtgattgtcaagaattaatgacaaaaatgtgtcactgcctacagttctgtgaacactcagaatgtattaatgagctgtttttccatagttttactttagcttaccttgaatactccctgtataatcctctaaaaaggtagcatcggcaagaaagatgaatccgttggaaatacagctgagccatacttcacggaatagaacaagtgtgttctgtgctggagctcaagacctgtggaaagggactgcccccactgggtgcaatggctcatgcctgtaatcccagcactttgggaggtagaggcgggtggatcacttgaggtcaggagttcaagaccagcctggccaacatggtgaaacctgcctctactgaaaaatacagaaaaattagccaggattgtggtgtgcgcctgtaatcccagctattcaggaagctgaggcaggagaattgcttgaaccagggaggcggaggttgcagtgagacgagatcacgccactgcactgcagcctaggcgacagaggaagactccagctcaagaaaaaaaacaatggactgcccctaatttgtaaaccatttaaatgtgtctattacatttaacttttcttaatgtttgtcaactaaaagttttattcattatactttgacatactggaacacaaaacttgattcctttgaaaaactaaagagaagttgataaaaaaaatacagaagctctagattcctaattggaactgactacactcatttttaaaaaatggacgatgcctaataaaaccacatgaaattaactttattctttctttcatggagcttgcacaggaaagctaaaaaggagggtctgtgtggagacacggggctcaaccacaagagaggggaaaatcaagttctatagcaagaaccatattggaggccgggcacagtggctcacgcctataatcccagcacctggggaggctgaggcgagcagatcacctgaggtcaagagttcgaaaccagcctggccaacatggtgaaaccccatctctactaaaaatatttttaaaaatttagctgggaatggtggcagatgcctgtagttccacctacttgggaggatgaggcaggagaattgcttgaaccccagaggtggaggttgcagtgagccaagattgcgccactgcactccagcctgggcgacggagcaagactgtctcaaaacaaacaaaacaaactgtattggttcattgtctttcaactgactggacaccaaaaggagtatttttccaaagcgtatacttcaaatcagaattgatgcaccatccttgccttactggagcccaggaagagagggaggacagattccttaaggaaagactgtgctctgggagggggcaggtagcgtcattttggggtgtaaaggcatggaatgctgatttgtaggcaaagttgtttaaggaggtcctgtcacattcagtggcatccgttatgataaagccaataggcttttacactcatctgtccatttctgtcaagaccctatggctgaggtcaaaacaatgttctgggagaaccagttacctctaaccttccaattcagacactgccagcttaactatgtagaaactggcacacagaccctgttaagtgctgcaacaatgacagcgtttctatgaatttgttggtacatgtgggactttagctcatctgaggagtcgaacagcagctgtgaaagtcttctactcactccctgtcgaggctggcctggtttgctacacaaacacggtggccctaggaccatggggctattcctgcagacgccctcgggaaccagctgctctgaacgtggtgggggtgttggagcagcagtttctcaaaagtccacacacagttaaagctctgaaaacagcacgacgcacagaaatgatttcagatgcttttcagtagccactttcatgccaactctttatttccataatagaaaatcttttatttccacctttagtgttccctgctagaatagatgaccacaaaacccaggccagaaacgttctggtctgccgtgaacagtccaggaggcacttgttctgctgctgtggaagtcgccctgactcggggaggaagggacacgcaggtggtatcagtcttgctcaagtaaacaggctgttttccaaacattgtgacttggctactgagtggggatacctggtttcattggcaatcttccagtatctctctcgcaaaaggaacgctgcactttttggttgtctctgccgagtgaagatcccctttttattccccagcactctcgtcggtgctacaaaaaaaaaaaaaagacacaaagcgattcagatgtcttctgatgggtcaagttagaaccagtctggagctaaggtaggcactaaatagaaatgtctttttttttcttttttctccctgttgcccaggctggaatgcggtgacacaatcatagctcactgcagcctcaacctcctgggctcaggcaatcctcctgcctcagcctctccagcaccaccatgcccggtaatcttttatttttattttttagtaaagacaaggtctcattatgttgtccaggctggtctcaaactactgggctcaagcaatctgccctccttagcctccctaaagtgctgggattataagcacaagccaccatgctcagccaaatgtcctcttacagtttcaggatgcttgctctgaagtgacaatttatgggttgaaatatttaaataccactgctctgcccaaacacccaggttccctggtgtgttaatttctagttttctagtctgttaggggaaaaaaacccaaaacagtggccaggtgtggtggccaacgcctgtaatcccagtgctttgggaggctgaggcaggtggatcacctgaggtcaggagttcaagatcagcctggccaacatgaggaaacccgcctctattaaaaatacaaaaactggctgggcacattggctcatgcctgtaatcccagcactctgggaggacaaagcaggcggatcacaaggtcaggagattaagaccagcctggacaatatggtgaaacctcatctctactaaaaatacaaaaattatacaggcatggtggtgggtgcctgtggtcccagctactcaggaggctggggcaggagaatcgcttgaacccaggacgcagaggttgcagtgagctgagattgtgccactgcactccagcctgggcgacagagtgagactccatctccaaaaaaaaaaaaagcactaaaagtttatcttttatttgcaaactaaggtttacatgctgggtacccagctgtctggtaactgggtaggcagagggctaggggtatctgggacagttacccttgaaaagccttgggcctttctgaagagatagcgcctagtgggagccagggtcctgaccagccacaggtccctgcgtgggacctactcatggagttcaaagtccgccggggctgacgtccagcttggcagcacccaccactggtggtcattaggcctgagctgagcctggtggaggagcacagctggcaacgacctgtcagggctgtgctctcaggacattctctgtccccagtaagaccaccactaaatggaaatgttaaatggaaagggggctttccccaccaaaaggttcaagactgtttcttccataagtgaacacaggcatcgccaagtacttcatcaaatgcagcccttacgacaccaacaaggaggtggcattatccccactggacaggcttatgaaaagcttaggtgacttgcccaacgtgatgcagctcatttcttttttctttttaagaccgagtttcagctggccatggtggctcatgcctgtaatcccagcactttgggaggcccagatgtgcggatcacctgaggtcggtagttcaagcccagcctgaccaacatggagaaaccccgtctctactaaaaatacaaaattagccgggtgtggtggcgcatgcctgcaatcccagttaatcgggaggctgaggcaggagaattgcttgaacctgggaggtggaggttgcagtaggctgagatagcgccactgcactccagcctgggaaacgagcaaaactccgtctcaaaaaaaaaaaagagtctcactctattgctcaagctggagtacagtgctgtgatcttagctcattgcaacctccatctcccaggttcaacagattctcatgcctcagtctcccaagtggctggcattacaggcatgcgctaccacacccggctaattttgtatttttagtagagatggggtttctccatgttggccatgctggtctcaaactcctgacctcaggtgatctgtccaccttggcctcccaaagtgctgggatcacaggcttgagccactgcgcccagcctgcagctcatttcttaccgcataaagcctcgcacctctccacaaaactgccatcagggatgtccccagaaaccatttatcacaggtgccacgcagaggacagcttcctgttctccttttccctttacctcttccttctcacctcatcttgttcattcattcatccgtattccattctcactcttacgctttacctttcaaaggcctgtctttccctgtaagtaatgtattataattcccaccattaccacatgcttctccaacccaccaaactgctatcttcagtttatggtaagtccataaactaagaagaaatgggacacattcattgcgaacttggcagcccctcatccatcctcacaagacaccgcagatgttattctctttgaagaccaatcttgtgttttaaagacaagtctcactctgttgtccaggctcttgtgcagtggtgcaatcatagttcactgcagcctccaactcctgtgctcaggttatccgcctgcctcagcctcccaagcagctgagactacaggcacacaccaccacgcctagctaatctgtttattttttgtagagatggggtcttgctatgctgaacaggctggtcttgaactcctggcctcaagcgatcctcccaccctgacctcccaaagtgctg

SEQ ID NO: 96543 - DNA, 91024 bp, Homo sapiens
tggaaaggcatggccctgggccagggcatcctaagcagcccatctgccccaatcccccagcttccaggccaccagagtcctcagcaagggggatctgagtaagagatgggcagtgactccccaactcttgtagaaacctagtcctcccatttcaacaagggtaaggctgacctctcttccagcttattcagggcaaaagatggccctcccatcacaagaggggcaggagtccagtgggtcatggctcagccccctgctcctttcccagggagcaaggtaagtatggtggccttcaggacagggcaggaagaccaaagcctgaacccttgcgcagccatgggagaagacagcacattagagggtagcccctgagacccaggagaacagggactgactcacggtgtccttccagggaggagggaggcagtcatatccacagcccgcccttgaagaggggcgaagtggagctggcagggctgctggtaaaagcagcacccccgacccccacccctcaagtccattctccagttgggagaaacagcagtgaccatcacatggtaagcagtgagtggttctgtgagctgggcctcctgagagtggaccctttcagctgtggcctgtccatctgtccagcagccacagcccctgtgatgtcaccagcccactgtgttgcttggcaactttccaggattagcattctgcccctctcatccctgacatcccaccataggctgatgttgccatggcaacccggatagatgctgcagctttttggacagctgtacctagtgtgggaagtgccaggcaaaagcagggaagcaggtgcctctctacaggccaaggggggtacccaacctatacgcagacccattgagcagccagactgccctaaacagggctatggagtccttgtcccttctaagagctgtggacaccttgcctccagttcccctcacagtcctttcttccttctgcagtgatcactgagtacctgtgtgaatgccaacaagaaaaataaaaccacagtttggattcaggaaaggttgcaccaccatcaggtcttgaagggtgagtaggagtccgccagatgcaggagtggatggagacaggttctagacagaggaagcagaagcctgtgcaagggctgaaccactgtctccaggcatagattacaccctgcctctaggttcctcatggcctggcctctccatctttcccactcaatacactttatggtggggatagggtccagttcagttccagacacttagtgcccagcaacaggcctggcaccaagccagcacgactaaaatgccaagtaaaattcaacatcagggcctatgacctcccctagtactaaccgtctcagcaagtctgtttccccatctgtgaaatggggccagttttgagaaggctgtgggcaggggttctcaggtacagatggggtgatgtttttcttttggttcttttggtttgtaaaccacttctttcccttacagaaaaaattggaagactagtacatggacatctgtgaccttcagattccctaattgttatattgcagcacttttgctttatctcctctttgtctttttatctagctatgcttacctatatgtataatttttgctgaaccatttgaaaggaaattgtagcggacattctgacgtgtttcttcaaacacttcaggccacgtcaactaaggacagtctgatacaaccacagtagcattatcacatctaagaaaattaacaataattcaatattcagaatagggcaggaagatcaaaacctgaacccatgccaggtgctgagagcagatgaggggcatcagagggtgggcgcccgagccgaggggtgtcgggcgcatccgctgcccagcggaagcggcggcctgagtggagtcaccgtgcaatgggtgggtgtggctttgtgagccaagccccaggagaaccagaacccaccttttcctcagtgccctgaccagctgtcccgcagctgtggcttaaatgccaacttccagttcgtaaatttcttcaattattcctccccaaattatttacatatgtatatgtatttaaatcaggatttaatcaaagttctcacgctgcatttagctgtttcgctgcttactctaaaagggcacaggagggaagatgggtgggtaatggagcctagaagagtgacgctccctggtcggccctaatcctgccgatcggggcatatgctggaacatcccagtcccactgtcctgggcggaagtaaccgagacctggagttggtgggtaggtaagggttcaggctggggaggttcgcggacggaagctcccgccctgcggtgccggatggccccgccccttagcaacggcctagcgtccctccctagagacggggctgatgcatccccgcactgctcggtggaaccggtacgtcggtgaggcggaggggttgcggggccagcgcgggcagcgggacctcgaaaaggcgcggagggcgagtggacgagggtggggaatggggtctcccaggagtctggttgctgagccttggccagggggaaagaagggaggtgcactttattttattatttttgagacggagtctcgctctgtcgcccaggctggagtgcaatggcgcgatctcggctcactgcaacctccacctcccgggttcaagcgattctccagcctcagcctcctgaatagctgggattatacgcacccgccatcatgccggctaatttttgtgtttttgtagagacggggtttcaccctgttgaccaagctggtcttaaactcctgacctcgggtgatccgcccgcctgggcccaagtgtttggattacaggcgtgagccactgcgcccggcctggaggtgcacttcaaacagccttgcagtgaagtcctgtacttgccagaccagtttttgggccccatccccatgctgagcacgtggcagtcccatcagctacccaatccttctccagatccctaccagagttgttacagaggtcaacttcattcctttctccaccttgcccatccattagttcatttgttcacacaatcattcagcaagtactttctaggcaccagctgtgtgccaagcccatgccagcctcatgctaggtgctaggtgccaagtttccagagatcagcgttacttgaaaatgcctacacagctgacaggaaaaacagatgtgcacatgtaatacagggagaggtacactggaggggaaagacacagttgtggagggcagtttgcatcgggtgaatgcttcaaaacggtggagagaaccccaagcctgggggagcaataaccattcatggtgttgtttgcctggtcgccccaagggcagatacttcccaaatcccttaaagtcgcagatccatttgtctgcttatgcagaaccccggggtgtgaaatggataaaggtgcaggatccttgttgaatcgggtgagtggcatagaagccctcctgcttatgtggctccccacaggcacccactttgcagaatctcagcacccggttggagaaccactgttgtgatgctagaacatggatctttgggtcagccagaagtgaagacctcagtttccattctggttctgccaagtgtttggttgtgtgatctttgcaagtttctttactttcctgggccctagtttcctcagctgtaaattggcaataatagtagtatctgctgtgaggttggaatacccctattcatctgtgtctcttcagccaagtgcttggctactggttgagtcaagtggggttgagtgtcagtgaatccaaccagaagcttcctctggctcaagccaatagggctcccaggtgatctgagtggggagaaagaagaacttgggttcaaatttcaactgtggctcttgctggctctgtgaccttgggcaggtcacctaacttctctgagcttcattttcctgcctctgagaaatgaggatactctcagttcccacctcagaagtttaaatgagatgatgcataaaataagtctaagccaccaataacattcaccattcccaacactgtgcccaccagggccacccctgccatctcactggccagttcccttcaacatacagggggaactgcccagaatgaccagaggcagaagccttgctgggagccatgttcttctccctcctgccagtcacactcattcccaggcagagactgctgtcacccatgaggccgcggcaggaggcagactgggtctttctttctgtctgtctgtctagctcctgagtatactggtaatgcacaggtgcacagagttggggcagggctggaagggagccattgtgaagggctgagggatggaggggaaacaggttctgagtttgcagctcactctcacaccttctttgggacacacctcggtgcatcccccccactgccagcttgcatggagggaaacagtttaccggggcagcaagttcacccattatggattccttttgcccccagcaaccctgcagtttcctggacatttgcacatctgttatctccgaagatccttataactccttataatgcaccagtaaagcaaaccaagcatgtaagcatgttcaggcccatctgggagctgaggaagtcatggaatggaatgctctcctgtggagctgggaccctggcctctccaagccctgctctgttgggtgattttgttcaaagatgaaacagtcatctgtgggtttgcagcatgatgaagctgagccccaaggcgtcctctgttctttagggtacttcgggaagtgttggtgactgttagacaggtgggccagactcggcattgtcttcagcacctgtcctgggaggcagctggccaccagagactggattcagggagcagagtcccgctaggggaggccgggcaggcccgactggctggaggcaggtcggcctttgggctgaatgtctggggcttcctgccagagccccatctttccttctttggccctcaggcgccctgacaactcaccactcacttcttagaaatggactcagctgctgcatgctgcttcagcactgctgggtagttttgctctagacagccctggccacccaccccactcctcaagtcagtgcaggcaagggccccctgccatgatccatcaggaggcctacactagcacaaaacacccagcaaaaagagtgccctgttcttcaagctcttggctctttgtctcagtgtgcagaagggatgggaaaatgggatggggccagggaaggggggcttgcttgggctaggcctctatttcctttcattaagatgctttccttttctttctttctttccttttttttttttttttttttgacggaatctcgctctgtcgcctaggctggaatgcagtggcatgatcttggctccttgcaacctctgtctcccgggttcaagcgattctcctgcctcagcctccggagtagctaggattacaagtgtgcaccaccacacccagctaattttgtatttttagtagagatggggttttgccatgttgaccaggctggtctctaactcctgatctcaagtgatccacccacgtcagcctcccgaagtgctgggattacaggcatgagccaccaagcctggccatttctttcttttttcttttttctttttttttttgagatggagttttgctcttgtcacccaggctggggtgcaatggcgcgatctgagttcactgtaacctctgcctcccgggttcaagtgattctcctgcctcagcctcccacgtagctgggattacaggcatgtgccaccacacctggctaattttgtatttttagtagaaatggggtttcactgtgttggtcaggctggtctcaaactcctgacctcaggtgatccacccgcctcggcctcccaaagtgctgggattataggagtgagccaccgccccggcctctttttttctaattgcaatttttattgaggtaattgtagaccccctttttattttttgcactagcattatgtacaaacctcttcttcaccatacccttgtccaatttcttgtcatgttctcctgcccaaggattctccgtggtgatgaattttgaggtagccaaaagcaacagtggctttgcaagggcttgctcctcccacaataaaaactctataaacccttgtcctccaggtggtggatgtgcatgcaccctggcggcatctgctgctccctttgcataagacgggagggtatacgtttcctgagctgatctgacyctgagagccagggtgggtgaatgctattttgttgctggtagagggatctgtgggccaatggagggtcaggattggggtcctgctggggagaccatttagtcctctggctccagggtatggggggaggtcgagtgggcaaacacaggggaggcagggcatggtccagcgctcacaggtgctagggaggctcatgcaccacactgggaaaaggtagggaagtctagcagggatgggctgggggtgccagggctgctactggctgaaagtcattttagggaaatttattgggtgagcaagctctgggcctccctccccatctcctgctactgagaagtcaggccttgctctataaaatgggggagaggggtggacaagtgcagtcgcatgcatgggttgggggcatctgcagtgtttcccctcactcagcccttaactctgggtgggctcatttctcacatgcagtgtccagggcaggccccaccccatctcctggtgggactcggggtactgtatgcctgtccagattaggaggagaccactccctccttcttgctcttctgttacccatgggtcatgggctggggcttgtggcaggcaggcaatctaggcatccatgtgtctcggggctaagacagaggctggcaagggctgactgacgctgggttcttctcctaggagcttcggctggggcatctccctgagaagcagcatggagcagcctaacagtaaaggctatagcctgggaaggacccctcagggcccagagtgcagcagtgctcctgcagtccaagtggggacccacaggggcctagagtataacccggggaagattcttccaggatcagactatgggttgggaaatcctccagcccttgaccccaagctcccacatttacccctgcccccggccccacccacactctcagacttggggcagccacggaagtcacccctgacaggcactgataagaagtacccgctgatgaagcagcgtgggttctactccgacatcctcagccctggaaccttagatcaacttggggtgagtatggcagccatcccctaccaagcctcaacccttcctctgggctcygttcacccatcctttcatccttctccccatcagtcagtccatctgttcatttagctgtctatcgatctatccatctgtctttctatccatctaccccctattatcccctcatccatccttccatccatttttctcaccacccatgcatctgtccattcattcgacaactcattactgagctcctgctgtgtgccaggccctggatggagccctggagatgcagcagggatgagacgcccacgtmcctattgtcattgttgtggggcagtggctttggtagggaagaccccttcccctggctctggttgggaaggttccacagatgaggtgatgtactgctgagatctaagagacaggatgtaagagtggggcctgggagcatgttccaggcagggggagacaacaggtacaaagacctggggtccctgagagagggcacggctgtgtgaagaagaaggctagaatgcgaggggagagatcgagggaggaggctgggggcagggaaaagagaggggggaatgacgaggagagaattcagagtcctgtaggtcccaggcagccttaggctttaggccagggaggggccaagaaagacagggtgaggaccacctgatatgcattaaacctgcagtgccagtggcccttgggagaggaggtatgtacagagatacctgctggccttgcagtacctgcttcatggctcagccccgggatgcactgtggagtgttctcagatcaaggaggggagctgggctggaccagaatggggtggggccaggaagtcctgggtagccacagcttgttgcccactgtggcctttgaacggggaattgtgcatactcactggttctgcccaytcctgtgctcctggagtgctccctggtgggtctcaagggaggcgcctgggctcggggtccctcccgggtcctgcctgtccctgggaggttgacacatactcagggctccatggtttggtttcaggaggtatgtcgtggcccccgaatgagccagaacctcctgcggcaggctgaccttgacaagttcaccccaagaggtcagtgctcaggagggctgtgtgagtgggtcccggtaggtatttcaaagcaggcttttggcctcagggagacagccttttcttggctgtgggccccagcttccttaactgtggagcggggataataagaaacagggtgcttcacaattacccactcatggtgagtgctcagtcagccacagctaccgagtcattactcttagtggagccatgaccttgacgctgggctgggctgggctgccaggggtcagagccacagctttctttccctggctgaggtcagaagggcatatgggtgtattttctgcctcctgtggaatgtgggccctgaagaggccaggactgtctgagttgcttcctgctggagacccagcacctagaacaggacctggctcagatagatgcctgggagatccctgctgaaggaggaaagggggactctcctctcaggctcatggagagtctcagagcacagctagggtggcgaggactgggacaggcctgcagggtgtggggccttscccagtggcagaggggagaacaggggctccaggagaagctctgagtggtggtgaggaactgcgcaggtggcctcccacctggccagggtttgtgcctctcccctggcagacaggacgtccccttggatcaggcccagatgccctgtggctgcccctgtccgcccctcctccccacccccaggaaagacctggctccttcctgccgctgtccacaccagtcctcttggagcccacaggccttagaaaacatcacgagcatgtacatttgcgcacttatctgagggtctggcctattgtttccaacagtctcacaagtatctgtgacccagaaaatggttactaaccgcagatctcagcactgggggtattgggaatggtgctcctgccacacatggcagggtgggctgggggtgattggcagatggcagctctacccacatgagaaaaagcagcccccagcggcacagggtagtgtcaatcagggctctcagcaaccagtagtggacattcactctgctgcccgagggctggggtagcctgccccggcccgcggacgcagcagggtctggaggccaggcatgggtctcttcgccctggctccttcttggccactgagtgggtcytgggggtggagtggtgtcacgcagcctcaagagctggtgattagggctctgaaaacagccttcttggcagccctgagatctgggcatttttgatgcaaagagggaggtcccttgactactcagcagcctggtgagagcagactccagctaatggtggaggctccgctgagccttggacactgcccaggcaccacctctggtggcctctgtgggaccccagatgccactcccaaggtgggccctcctgcagcatgaccacctcttggtcccagggaggcagtaaggcccaaggaaggggtcaccagggcccctgggactctggacccttcttccaactggaaaatagaggggaccatcaggaggctgcccagagcccacccaggccctgggaaatgtggccatcccctcctaaagcaaatgcccacacccctctccccacctctgtggtctcactttgcctgggactttcttctccattgattatctggtgtcacaggcaaactgagatggatggtcaccctatcaatgggtctctccccaccaactccccttcccccaggtatggaatggaagcctctgtataccctgctcatctaagtagcggcagtcattttttgacttgagggtcctgcagggcyggagtagtggagccacccacagtatccaggatgcctcaagctggcaatggcctcagggaatgaatatcagactccaatatgctgagggggcctctgcagtaggggtgggaggagaccatcccatttcatcttcctatccagtggtaacactctcccttgttgaactcaacacctggcttgagcaatggcccctggtgctgggtggtgtggaaaggagtggtcaagcatgctggctctggacagggagagcagggctaggacagaccttctggaagccaccatccctccaggctyatagccccaggacacctggtgccatgcctgtgttctcccagccactgcccagccacaggcaagctttgagcttcccacactccaaagcatactacctggttggtaatttattttatggggtggaggctggtttttgggtgctggcctgagccctgaagcccctgcccctgcttctacctgcagtcggaagctttgaggttcctgaagacttccaggagcgcatggagcagcagtgcatcgggtccaccacccggctgctcgcccagactgacttcccactgcaggcctacgagcccaagatgcaggtgcctttccaggtgctgccaggccagcatcctcgcaagaytgagatcgagaggtacggctgggtgggctgtggggagactgtcrgggaggtggcatccacccgcctcaggggatgaggaactgcagatcaccaggtgataatcctcatggcagagcctgtgcacaagtgtttagatcgaatcttctagccctttggtgtcttaataggaacaatttacgttatggagttggggaaggtggcattgaggtcaatgaatgggactgcggggcgggacagaagggcagttggagcccaggacaccagccccagccaccacaccacttcctgatgagtctcagaggggtggagggctccagaggggtctctcrgccacacccctgtccccacaaccccgtaggcccttgtggacacccatggagccacctcacacgagccaagccatcctgaggtcccctccctgcccttgaccaggaggaaacagcagtacctgagcctggacattgagcagttgctgttcagccagggcatcgactccaacaagctcatgcccaggcacctggaccaccagcacccccaaaccatcgaacagggccatgacccaatcttccccatctacctcccactgaaggtgagccgggcttccacagatggttgagagacaggggcagaagtgcaggaccccagtggacgctcaggagtcagatctgaaaggggattcccccaccagtcaccagcacactcttgtcaaacagggcaggtcaacaatrggaacccatcccaggtactttgagcatcctagatggggcaggtggggcccccagcccccctagaatgctgagtctttgcttcttccctgggcagcctgtatgcctggcctcggcctccgtgccacccatgggcaacctagatgcggcccagctggactgtggagtatcctccctgaccagtgcccgcctcagggtaggcagctgcttctgggctcactgaaatgggaagagcagggatggaagagggaatcagtgccacccccgtggggtataaatcaggaaacgaatccagggaggagaaagagggakcatggcctggctctggctttcacccacctcccctcctctcctctctgcggccctgagtgtctctcgcctggtggtccctgtaaggaggtaaagctgagtctagctaagggctacctcctgacagccccgaatctcaccagttccaagttggagtagggtccccaggaaaacccaagggccacctcttcccttggtcctgagctaggtggccctgggcagtgggagaaagaacccaccacctgctctgggtccctggacacccctctgcctgagcctcaggtggcttggctggatggggatccagggtttcacccaaccagatgctgtgtacccctgggagcagcagtggagaggctcaacccccagtcctagcagtggagagggtcagcccccagtggagagggtcagcccccagtgccaccttgcagctctctcacctggggagggtattacttaggcaccccatcctttggcacacccagtcccacctgggccccactagaggagctgcttcttcccaatgttggcctgctttcttccaggtatttgacaatgaggactttgactgccggactcccagagagtggatcaacatgggcttggagccagggtctctggacaggaaacctgtcccgggaaaagccctcttgcccactgatgacttcctggggcatggtgagcaaggccactctggagtggggacactatctcattccagtagcagccctgtcacagactcctgggctcccctgggacctggcagccaccggaggcgaggggtctttcaagacctctcagctggtagacaggcctagaagctggcctcacagaggcaggaatgcagggaccagggaaaacatcgttgggagagctggaaaagggacagctggatggtgtctagtgttttgaaaaatctttgatttattggtagtaaaatatgtacatgctcattgggaatattgaaacatgcacgaggggcacaattccactctccatccctccacccagaagccccattgttgcagctctaaccatggcctctcagctttcacttttgtgtgcacaacacacaccatcacacacttgctcacaaacacaaatccccatcatcacacacattgacaagcacattcactgtcatacacacccccarcaacctctcttgtgtacacattttcaccacacagaaacacactctcctattgtcacccatccacaaccactrtcacacctcaccatgcccacttgatgccacacaggtttgccttgtcttggccttgtcaataatctgcccagggagtgcccttggctgctcctttggcctcaggcctgccccagcggctgtggaggctctcccatttcctgctgtggaaagcagtgccaggtgggcatccgcagctgacatctcggcctgcacggctgggtgtcgatgcaacatcctaggaaggtgtgggccatcatttgggaagttggaggtggctgttcccctgtgcagggctgaaggctgctctgctccccacctggtgggtggacaagatgctgtgagttgggagtgggcccagtaggccagctccaggtgggaagcagggttgtgatagccatgactggttttaagcctgcccagtgagtccattgagcaggctgtaaatttatgtttcattttaaaaacatcttaatgctagaatcaatttctctgaactagacaagaagcccagaatgttacctttactttggacttaattacaaaaataatttaactcaattgttcccagatcgccaattcctggtgataaaaccagaaggtttggggctgcattagccttaaatgcaccaagtagcagcctccatcraggtgctctgcttacaccccttcacatggccctggtctggggtggtggcccaggtgggaggaggggtgagcagggagaggctctgctggggacctcttgttttctgctgggagcttccagtgacatcttttcatctgagttgagccgagacaaggccagtattttcagaaaggcaacctactaggaagggaagggaaaagcaaaacagagaagcaaaataggtgagctatagaccttgtttaccatcctttactcagctagctggtgtcaacaggtggggagcatttcctgagaattccagcccttccttcctcaacctagtctgtagaactcaaacaaaacaaaaaaaaccagggggccaggcgtggtggctcatgcctgtaatcccaatactttaagaagccaaggcaggcggatcatgaggtcaggagttcaagaccagcctgaacaacagatgaaaccccgtctttactaaaaatacaaaaattagctgggcatgatggtgtgcacctgtaatcccagctactcgggaggctgaggcaggagaattgcttgaacctggaaagcggaggttggagtgagtggagctcgcgccattgcactccagcctgggcaacagagtgagactccatctggaaaaaaaaaaaaaacagaaacaaacaaaacaaaaataaacagtttttatctcggctcactgaaacctccacctcccaggtttaaataatttttgtgcctcagcctcccaagtagctgggacttcaggcacacatcattactcccagctaatttttttgtatttttgtagagacgggattttaccatgttgcccaaggtggtctcgaactcctgagctcaggcaatccgcccacctctgcctcccagagtgctgggattataggcatgagccaccgcgcctggcctcagtttgtttttaagccactatgtattgcggctgctctgctgggcaccatatgtgtgcatcttccttctgcaaaagtttatcgaacacctgcaaggtactagtttccattccaggcccagggacacagctgtgactgagatgggacaaagtcgctcctgcccttagtgagttgacactagtgtgagcaggtcagctgtgaaccaggagctgatgcataagtagtgtgactttcggcactgtgaggaacagaatggggtaacaagtcagagagtgcctgggacaggggtgctattttaggcacagaggcttctccttggagaagggaacaaccagcaatgaggcgacctgagtggagagtgttccaagccgagggcacaggcagtgcagaggctctgccgtgggaacaaggtcgaaactcacaggaatagccagacatccagtgtggctagagagaaatgagtgaggggcagcggtgggaggtaagctagagaagtgggcacaggctttcagcccaggaaaccagtgggaggccaatcctgaccaaagagcggctcctgccctgccctgccctgccgtgccctgttctcagatgaggggcccagggactgagcagccaggggcagcctgtggggagggcttcaccctggccatggtcaccttgaagggggtccaactcattcctgacctttacaactgggttctcagcaggtctcctttaacttggggctttcgtgccacctgtcccagcctcccattggcctgtgtgtctctctgccctggtggaggttgtgctgagcaccagggcagagaagcctggtctttctggctccttctgcagcacggggttcctcagaggcgagctcggctgggaggaagcagggccctggctctgctggagcagaggggggcatcccagcgggagagacgccagactggtgatctctgagacccattcccagcgatgctgccagcactcagaggccccttcctgcccccatggcggggggcactggtggagtttytcctcctgtttcagaggaccccaagagtcagaagctgaagtacaaatggtgcgaggtcggcgtcctggactacracgaggagaagaagctatacctggtacacaagacagacgagaaaggcctggtgcgagatgagatggggaggcccatcctgaatgcaggggtcaccactgaaggtatgaggtcctgccgctgccccaggcagaaccccagcttgggcctggcyggcctgtgactgargccaactccgcccagggcactgccagatcaggtctgaattctacttttctgtttgcccaatgccctgaccggtgaggaccagaggactcatcactcagagaccccagaaagggcaagtggccattatttggcatgtcagctctgagcccaagtcccatcaataagcgatgcctgccctgggtgtgggatcaagggatgggcacttgaacagccatgcctgtataactccttgtctaaatacttttctttttttttttttttttttttttgagatggagtctggctctgtcacccaggctggagtgcagtggtgcaatcttggctcattgtaacctcttcctcctgggttcaagtgattctcgtgcctcagtctcccaagtaactgggattacaggtgcccacgaccacacccagctacttttttgtaattttagtagagacagggttttaccacggtggccaggttggtctcgaactcctggcctcaagcatcctccctccttggcctcccaaagtgctgggattacaggtgtcagccaccacgccccagccttgtctaagtgctttcacatccgtccatgacaccttgtgagatgggccgggcaggaagtgtcgtcatgcccatttcacagatgcaacagggggtcagaagagrgaaacaatttgttcagggccactgggcatccacggcacagccggccggaacctagtgtttcagcccagaaagcctgattgtgtgtccccttctccctctcacccggcccccaggaaggccaccccttcaggtctgtcagtactgggtgccacggatccagcttctcttctgcgctgaggacccttgcatgttcgcacaacgtgtggtccaggccaacgccctgcgcaagaacacggaagcactgctgctctacaacttgtatgtggactgcatgccctctgacggccagcatgtcatcagtgaacagagcctgagcaagatcargcagtgggccctgagcacgcctcggatgcgcaaagkcccctcgtgagtccccrctcggccttccctattctgggcatcaccttcttcagggaaccttcccataggaagttggtgctactccagggtggagctccctcagggctcatctgtttgagactgtcctggctattgccctctggacttgttggggcctcaaacaattttttgttcatctccagatccctcattatccatatggactcctggatccttattttattcaaagggttacaattgactactttttaaaaattttgatgctcaaattgtcctagatttggccagcgggagacttttcaagctaattcctgtgtcgccttaccatgtttccatcattcttcaaaacccttagatgatgatttattagcaagatgcccctaagataactttactttctggcacagcaagaatttccaggctcattgtgtactttcccaggtccagtcctgaaaccagctgtttctccaaggaagctctttttatttattattttagtttattttttgagacaggttcttactctgtcacccaggctggagtgcctggagtgcagtggggccatcttggctcactgtagcctcagtttcctgggctcaagcaagcctcccacctcagcctcctgagtagctgggacttaggcatgtaccacaacatctggctaattttgttattttttgtagagacagatctccctatgttgcccaggctggccttgaatgcctaggctcaagtaaatctcccaccttggcttcccaaagtgctgggattataggcatgagccatcatgcccggctggaagttccttttagttgaggaattatatttagaagccaagatctgggcattagatgtgctcattgctactgggatatcattgctttgagactcccacagcagacagatctgggaaatatatatacagatggtccccaatttatgatagtttgacttaccatttttctttttcttttcttttccttttcttttctttctttctttctttttttttttttgagatggagtttgactcttgtcacccaggctggagtacagtggcttgatcttggctcactgcaacctccgcctcccaggttcaagagattctcctgcctcagcctcctgggtagctgggattaaaggcacccgccactatgcctggctaatttttgtagttttagtagagatgagatttcaccattttggccaagctggtctcgagctcccgacctcaggtaatccactcgccttggcctcccaaagggattacaggtgtgagccaccatgcccagccaacttaccatttttcaactttatgatggtgtgaaagtgatatgcattcagtagaaactgtacttcaagcatgcacacaaccaatgtttttttttcattttcagtacagtattcaatacatttcaagagattttaaacactttattataaaataggctttgtgttacataattttgcccaattgtaggctaatgtgagtgttctgagcatatttaaggtagattaggctaaactrtggtgttcagtagcttaggtgtatcaagtgcattttaaacttatgataagtttagttggaatgtagccccactgtaagtagaggagcatctgtagttttatagtcatgcatcacttaatgatagggacatgttctgagaaatgtgtcattaggtgatttcatcattgtgcaaacatcatagtgtgtactgacacagaccttgatgatatagctggctgcacacccaggatatatggtacagcctagtgctcctaggccacaaacctatacaggctgtgattactgaatactgcaggcaactgtaacacaacggcaagtattcatgtatctaaacatagaaaaggtacagtaaaaatacagtatacaagataaaacatggtacatctatgtaaggcacttaccatgaatggagcctgcagggctggaagttgcggtggttgagtcagtgagtgagyggtgactgawcgtgaagacctaggatattactatacactactgcggacttgataaatactgtatacacttaggctacactaaatttattttaaatttttctttcttcaataataaattaacccaacacaccttagggccaggcatgatggcttacatctataatcccagcactttggggggccaaggtgggtggattgattgaggccaggwgtagaagactagcctggccaacatggcaaaaccccatctctactaaaaaaaaatacaaaaattagctgagcgtggtggcacacgactataataccagttacttgggaggctgaggccctagaatcgcctgaacctgggaggcagaggttgcagtgagctgagattgcgtcactgcactccagcatgggtgacagagtgagactgtctcagaaaaatgtatgtaattaattaattaactaactttagcttactttaacttttctttctttctgttttttttttttgagacagagtctcgctctgtcgcccacgctggagtgcagtggcgtgatctctgctcactgcaagmtccgccccccggcgcccgccaccatgcccggctaatttttttgtatttttagtagagacagggtttcaccatgttcgccaggatggtctcgatctcctgacctcgtgatccacctgcctcagcctcccaaagtgctgggattacaggcatgatctataagctttttaaaaaaatgtgtgatttttttttttgctttttaaacaaaaaaagcaatgtgtgatttttttttttttttttgcttctctcccgagtagctggaattacaggtgcctgccaccacacccagctaatttttgtattttttagtagagacggggtttcaccatgttcgccaggatggtctcgatctcctgacctcgtgatccacctgcctcagcctcccaaagtgctgggattacaggcatgatctataagctttttaaaaaaatgtgtgatttttttttgctttttaaacaaaaaaagcaatgtgtgatttttttttttttttttgcttctctcccgagtagctggaattacaggtgcctgccaccacacccagctaatttttgtattttttagtagagacggggtttcaccatgttggccaggttggttttgaactcctgacctcaggtgatccacctgcctcggcctcccaaagtgctgggattataggtgtgagccaccgcacccggcccttttgctctttttcccttttgttttttgttttttgttgttttgagatggagttttgttcttgttacccatgctggagtgcaatggcgcaatctcagctcactgcaacctctgtctcctgggttcaagtgattctcctgcctcagcctcctgagtagctgggattacaggcatgtgccaccacgcccagataattttgtatttttagtagagacggggtttctccatgttggtcaggcgggtctcaaattcctgacctcaagtaatctgcccacctcggcctctgaaagtgctgggattacaggcctgagccaccgcacccggcccctttttcccattttttaaatagaattattcatttttttccttgtacagttgtttaagtttcttatagattctggatattagacctttgtcagatgcatagtttgtgaatattttctccagttctgcaggttgtctgtttactctgttgatactttcttttgctgtgcaaaagctcttgaattaggtcccactcttcaatttttgtttttgttgcaattgcttttgaggacttagtcataaattctttcccaaggccaacatccagaatggtgattcctaggttttcttctaggattcttatggtttgaggtctgacatttaaatctttaatcctggctggacaagatggctgacacctgtaatctcagcactttgggaggccgagcaaggtggatggtttgagctcaggagttcaagatcagcctggacaacatggtgaaaccccatctctaccaaagaacataaaaaaattagccaggcatggtggggcgcgcctattgtcccagctccttgggaagctgaggtaggaggatcacttgaacctaggaggtggaggttgcagtgagccgcactggtaccactgcactccaacctgggtgacagagtcagaccctttctcaggaagaaaaaaaagaacaatttaaatatgtaatccatcctgagttaatttttgtttctggtgaaaggtaagggtccggtttcaatcttctgcatatggctagccagctatcccagcaccatttattgaatagggagtcctttccccactgcatatttttgtcaattttgttgaagatcagatggctgtaggtgtgtggctttatttctgggctctctattttgttacattggactatgtgtctgtttttgtaacagtactatggtgttttggttactgtagccttgtagtacagtttgaagataaggtgatgcctccagctttgttctttttgcttaggtttgctttggctatgcgggctctttttaggtttcatatgaattttaggctaattttttcctagttctgtgaaaaatgacttggtagtttgatgggaattgtgttgaatctgtagattgctttagacagtgtggccatattaacagtattgattcttccagtccatcagcatggagtgtttttccatttgtttgtgtcatctctgatttcttttagcagtgttttgtagttcttctagagatcatttacctccttggttaaatgtattcctaggtattttgtgtgtgtgtgtggcaattgtaaatgggattgtgttcttgatttggctcttagcttgaacattattggtgtatggaaatgctcctgatttttgtacattgattttgtttcccgaaacttcactgaagttgtttatcagttccaggccttttgatggagttctaatgcttttcgatctgcattttactttgtttgatatcagcgtagcaacctgacattttattatttccgtttgcctgagaaatccctctattttgagcctttctaaactaattcattttagatcagtttcttactttcagcatatagtttgggttttatttgtgagccaaatttaaaacctttttcttgtaataagcccattcacatttattggtatggctaataggtttgacctcaactcagtcatattgcttcatattataatcattatgtgtattgtaatataatgctatgtttctttctctacattatatgttttcttagttcttctattttaaaaattccttttggcatttaggaaggtctgtaccgttattttagtggtttcttttatagtctccattatcccctgctttcctacttaaccctttagtatctgkcctgtttcattgttgttgtttgttttgttttgttttgagacagggtcttgctctgtcacccacgccacagtgcagtagcacaacaatcatagctcacttcagccttgaccttctgggctcaagctatcctcatacttcagcctcctgagtagctgggaccacaggtgtgagctaccacgcttggttaatttttgtatttttktagagacagggtgtccctatgttgcccagcctggtctcaaacatttgggctcaagcaatctgctcacctcagcctcccaaagtgctggcattataggagtgagtcaccatgctcagctctacttaattaattaattwatttatttattttcgagatggagtcttgttttgtcacccaggctggagtgcaatggtgcgatctctgctcactgcaacctctgcctcccgggctcaagctattctcctgcctcagcctcctgagtagctgggattacaggcgcctaccaccatgcctggctattttttgtatttttagtaaagaagggatttcatcatgttggccaggctgttttcgaactcctgacctcaaatgatycacccacctcggccacccgaagtgctgggattacaggcatgagccactgtgcccagcctctacttaatattttaactgttaaaatattattactattcctccacactcatctccaccttttagtcttcaacttacaataaactctattaaacgtatcaatattttttctgaagtctcccgtcatctcttggttgtataaagttccttttctagtagattcctcatgaagagctcaagggtatagagttccttgagttctcacacgtttaaaacgtgaaggacagcttgaccagatataaaattcttagttcacaacttttattctatgagttttttaaaaattctccactttggttgccttgcctgtgtgatgcttttaagaagtctgaggttggccgggcatggtggttcacgcctgtaatcccagcactttgggaggctgaggtgggtggatcgcctgaggtcaggagtttgagaccagcctggtcaacatggtgaaaccccatctctactaaaaatacaaaaaaaaaaaaaaaagccagatgtggtggcaggtgcctgtaatcccagctacttgggaggctgaggcaggagaattgcttgaacctaggaggcagagcttgcagttagctgagtttgtgccactgcactccagcctgggtgacagagccagactccgtctaaaaaaaaaaaaattcccttgaattatagttttaaatcttggttctgttccattcttttgtttttcttcatcaaggattccattatgtatctatatctctatgtatctatgtatctttttatatattgctgctgctttgcgtatcttttaattcaaccagtttccgaccctttttagttttttctaattttattttttaaaattttattttctttcttttacttcctttattttctctcatttttattctcttggttatatcctgcctttcttcaatttacttcattatgctttgatttgactctgttttctctcggtcaccttgtaatttcagcttcctccccgtgatacttttattttccattttttccttgagcttaattaagtctcttttcttaccgacatttgtccatttatatgttttatttttgaatttctgattcaaggtggtttttcagatgcccaaacactcgtttaaggctatttagctgaagtattgtgttacagttttcttctgcttggtacttgtttatttttttaggggtgatgggaattttatcagttaagatgctcttgtcttctcaaatgtgcaaacaaagctaaaagatgctctctttttcttatagaagcaaatgtagacggtgttcacctattcatttcaggatttggagtgatttgcaagctttctagttcaagggcgccctcttctgtcagtattgcacattagttttttttgtttgtttktttttagaatgtgctctgtgtgtgtgtctgtgtgtgtgtgtgtgtgtgtgtgtgkacacacgtgctggggagagggatgtgggtcctccaaggtttttgtcctcttatcttgcagaactcaacatttcacttttgcttcttttcccttatcctccagtctacaaatgacccctttccttctgcctcctgtcccataagtcatatgcctttcaaagaacactgcctttgaattgcatgcccttaagtcccttccttgtagtaagtgctctgatttaccagggctttttttcagtatttttacagttagggttactttctctttttttgagatacggtctcactttcacccaggctggagtgccgtggcataatcacagctaactgcagcctcaaactcttgggctcaagtaatcctcctgcctcagcctccctggtagctgggactacaggcatgtgccaccacacccgctatttttttattttttgtagagatgggggtctcactttgttgcccaggctggtctcgaattcctgggctcaattcatccacccacattggcctcccaaagttctgggattataggcattagccactgcgcccagcctgggttactttctctttctggtaggattttatttatttatttatttatttatttatttatatttattttttgagatgaagtcttgctctgtcactcagtctggagagcagtggtgtgakctcagcttactgcaacctctgccctctgtgttgaaatgattctcctgcctcagcctcccgagtagctgggactacaggtggttaccaccacgcctagctaatttttgtatttttagtagagacggggcttcaccatgttggccaggctggtcttgaactcctgacctcaggtgatccacccacctcggcctcccaaagtgctgggattacaggcatgagccactgtgcccggcctctggtaggattttagatctatcttagggttaccactatttcccttttctgcagtttttcttagactgcccttgttctctgtgaaaacttgcagcaagagtgtgagagacagctcactggagatagatttttttttttwaatttacagataatttgaagtctaggcattctgctgattctagttgtgctaaaggtgtgggttttggtagtgttagttttttcttccttccttccttcctccctcccttccttccttccttccttccttcctaggatgtgttgggaaatttgaatcgatatagccaccttaccttggctgtccagaagtctgtttcttgaattttattcaatttataatgtttttggctttaagtatcaaagatgctggtctcagattgtcttagacagcagggaagtgcattcctgtacctgtagcaggaaaaccaatgcaggacgccccagggttggtgcatcagggccctgtctgcagtgtatgctggcttcatcttcaggcgagatggcagcagcagtttcatgaccacaacaaaggttgtcttagattgggttccgtagaagcagaccctgatgtggggactcttgtgcaagcgatttatgaaatcctctcaggagaaatctataaggaagtgaaggaagcagggtataatagaagaagcagctggtaaaatatggttttagaagtctagtctcagcctgatcctgtgggaaactctagagcaagcatggcaccaccgtatttgtcctggagggagccagaacaagagggcttgactttgacttttttttttttttttttttttttgagacagggtcttgctctgtcccccaggctagagtgcagtggagcaatcttagctcactgcaaagggcttgacttttatatatctgcatcagtggttgatcataactgggacgtgttcccacacctaaaccaactgcagtyggggcaagctccaccacgactggcttggactagctgagatgtacccctgtagctggggctgtagtcatcttcccctgagtcaagtgaggaaggatggaattctggaacaaaactgaggaagaagggagggagtggatgtcaggccagcaagcagccatgtgtggaagtacccatcttgtgccagacactgggtacagaggagtgaacatttccaacaaagagcctgcaccctggggactctcagcctggccagaaagacagacaatgaaaaatctgggtttttagggttctgataagtgctgtgaagaccaagcgagagaagggaatagagatgtctcagaagggcttctttatattaggcggtcagggaaagcctttctcacagtggtgataacatttgagttgaggtctaaagtaagggaagaagaggattctggcagaaggagcagcagtgcagaggctgaggtagggacaagtttgtggtacttgaggagcagggcagggttactgtggttgggatgcagagagagatgttggtctgggaggctggaccacatgcaggggcagagacgcggccacaggccgacagtctgtgcaggccatgggtggtggtgagcagaggagtggcttgatcgtttacatgtttaaaatatattttttccaactcaagtagagaatgagttgtaagggggcaagagtggaagcagggagatcaatgaggagactaatgccataatcagggccagagatcatgatggtggcttgaaccagaatagtagctgagcagcacgggagaaagagatatatttgaggtttcctcagcggtggagccaatgagagctgctaatggactaaatgcaagctcaccccaggtctggggatttccaatctcaaagcccagtttcaggatcaggtgcaggggtcacccaccctcaggcccagtcatggtgttgcacatccagtagcaggaagagaccagggacccctccgtagggctttggtcagtagggtgtgtgcaatgctgttcagagacaaggaggctagtggggatagggggcaagcgaggaacaggggatggagagaaatgaagagcttgccttctgacatgctggttctgacacgttgtaaggcatccagtgtcagtgttgagtgggctggtggataaatgaagggagagaactgcagataggtgtgagggttctggctgaatagaacaggtggtgttcagagtccgaggctggaggagctcacctggtgggaggtrtagctggggaagacgaggggtctcaggacccctggcacaggccaacgtttagaagtcagggaggtgaggaagatccaggggaagggtgtcccagaagctccgtgaggacagcggtgcagcagaataggagggagccactgtgccaagtctctgagagtccagtgagatgaggcagagcctggagtggcctcaggggtagcgagggaagagatgaggatgggaagaagtgagcacaccagtttttcataaagaaacacaaagagataaagtcaaaggagggaaggaagtcaaggggcggcttctaatgtgggacataccrgagtgtgtggggacccctgggagggcgtgggagggaaggcaaagagactgaggtggctgagcttgctgggcttttcctgagagcagggcatgccttctaccctggcagaaggcagggagattccggggtgtgaagatggggtcatttctgtccaatggcttctgagttccggatgaaattcgagggacttcacccagtgagggagggtgtgtctgtgagttggcagagaaggtgagagagagtcttttccaggttccgagggagtgagtagatttctaggccaggttgagggtgtgttgaaggtgagaccagtcccctgcctacgaagttctccaacatcccgcagctctggtgcaagtgtgggctgcaggaaactgagattcccttgtggtgccattaccagggctaaagggactattcagatgtggcagaggtgggagggagggagagatcgatggcagagaccaactcaaggaacagaaaggcctgtccgcaaaggacagagatgccagctggctcagatgaggcctgagcaagccaggtgccggaacacagcggcataggcaacgtgtgctgaggagtgagtgagcgagtgagtgagtgagtgaaatggcctccaaggggtctgcctatgtgaggacgggggagatggtgtgcacgctcaccccaggtctgctgatttccgatctcggagcccagtttcaaagtgaagtgcaggggtcacccaccctcaggcccagtcatgggcacatcctgagttctcagcaccttccaggcgctgccatgattgcccagtgaaagcaaaggagctcagtggcaggcatcttccactgcaccatggggcagcaggcgggggtgctgcaggggaggtgcaggctgtgagtggcagctctctgaggcttccaggcccaggacttcctgcaccccgtcccactgctctggggcctgccttggctcccagagactggcaacagaaaatggggacaaggggcagaaaatgggggacagaaaatggggacaagggggaaagaagcagaggaggtgcacttggaggttagtggctcagggccgggtgggggtgtgcccatgaatccagaagggaagccctaaatgcgtgtccccaggtccatgccagagcagagcttgggccccggctggggttcacagggtgtggagcccctgattmccccatctcccatctctatgggcagggttctagagcacctcagcagtcttgccagagaastgagcctggactatgagcgcagcatgaacaagatcaactttgaccacgttgtctcttccaagcccgagaccttctcctacgtcaccctccccaagaaggaggaggagcaggtgcctgagcgaggtgagggtcactggaccaagatgggctccatggccatccacctggccagagccccctcccaccttcccctccaggattgtctgccctgccattgtgggcgtcatcagcccaacactccctgcacctcccctgtctccagcacttgtcccacttctccctgctgcctggagggctctggaccaggggaagggaagaaggctctttttgaacttattagtgagaatagcacagaagttgcaaggtgaatgtgtactaggaaacaatgcttcagcagtaggtggaaggggctctgctgatcagacctagaggatagtccttcttcctccagtagcaagagaggagaccgagtctcagagcaggaccccggggcccaagaaccctccttgctttcagctcacctgccagccttcctagactcagcttcctgcatgtcatgtactccggatrcaggctggggtgtggacagtgggcattccaagaggttctggtacctaccctttccttccttggtgccccagggcaggctgtggacagaccttaagcttgtgtgcagcacgggcaggagtggatgaggagagggttcttggttctcatctacttctcagaggagcctgtgactagggggtcctggaaggaattcctttacccatctcagagtaggcacctcactgaagagcttcagtgccactccggcaaactatggaaaggcggggctctgggaacgccagtcactcttcagggagaaggcaggagtcayggccctccttcaagcaccctgtggatctgtcctgtcccctggtttggccaggcagggtctgatactggcccttggcccctatccctgcagggctggtgagtgtccccaagtaccacttctgggagcagaaggaggacttcactttcgtgtccctgctcacacggccagaggtcatcacggccctcagcaaggtgagggccgagtgcaacaaggtgaccgccatgtccctgttccactcgagcctctccaagtacagccacctggaggaatttgagcagatccagtcacagaccttctcccaggtttgtgggcatcaagggcacagggggcaaacgcagggcagacccttggaactggcaggcacaggtcggggctgcagcggaaggccagggtcagtgggccacatggtgaggctgtgagcccctgcttttctcaaaacctggcctcagcctcttcctagaccttattggaggctggggtggggaccaagggtaatgactcatcttggagagaaagggaaaaccagggcaggctctctttccaatccctttccatcccaactctggttgcctctgaagcagatcccttgtcttagaagggggagcaggaacctcaggcacccccatgttgacctgtggattggggtatgagggaggtgggggtgcaccccctctgcactcaactctgtctctgtctgtctctccaccttattctctatctttccctctcagcccatttttgtcttgttctctgtctctctgcttctctcatctcaatctctgggtctctgtctctcgctcacggctggagggaaagtcctgcttctgctgtcctgtcctccctccctcctttcttccctccttccctgcccagcagctctgggcccccagggtcacatgaggctgttggttggcagggcttggcagtaagttggggtaggggacatccctccacagtcagatgagccctgagccgccccaagcaccctggtgcatagagtccctgagtgcagctataggtcgtgggtccccagggtggccatatgatgatgcctgtggccactctaggtgcagatgttcctcaaggacagctggatcagctcgctaaaggtggccatgcgcagcagcctgcgcgacatgagcaagggctggtacaacctctacgagaccaactgggaggtgtacctcatgtccaagctgygcaagctgatggagctggtgaagtacatgctgcaggacacactgcgcttcctggtgcaggactcacttgccagcttctcacagttcatcagcgacacctgttgcagcgtgctcaactgcaccgatgacatggtctggggtgacgacttaattaacagcccctacaggtggggcccggcggggcggaggcacctgttgacaccaggtgatgtgtcacctgctggggatggagcagggtcagggaccagggccagggtgcccatccatgccaggtcccaggcagtaaggagagccgagctccctgcaggctgctgggcaatgtcctgccagccctggcttgcattgcttctggtgaccttcattcactcaatyattgagttactcagtggagaaatattctttgaacacttgccatgaaccaggcatggttctaggggaacaagagaggcccagtccctggtctcatgggaaagacaggcagcaagcagataaatacatacacacagtcattgccggttttggcaggggccatgatagacactgggggtgggtcagggaggaggtggcatctgtgccaagacctgagatgtaagaagaaacaagttatgaggcgatgtgaggtggaggcaggtacaggcggagagatcagcatgggcagaggcaccgaggggaggataggcctggcgcagttgaggaaggaaaggctggccagtgtggctggagtcagggaggggagggagggctgctcaggatggagtgggagagcttgcagggaccaggccagatctcttggggcctcctgaggtctcagctgggggctggatttattctaagtacagtcagaagccatcagagggttccagctgggatccaggcttggttcttgctgtgtagcgaagatgggaagccaaggaagatgggctcccggggagagagtgggggctacaatgcctaggccctggcaacctcagcacaggggtggggggcctccctctcgtgtggtgctcatggacctcaggtcacctgaggagcagaggaacctgtttggttggcctgggtcttcctctctggtaacttggaggtgtgtgggacgaaggagaaggcaagtattgtgcatggagaggctcaagagtcatagcgctggcaggaagggcagagggctgctcctgcacacaggcctcctaggcctctgcccacagtcagctcgccattgcctgcaggccccggaagaatcccctgttcatcrtggacctggtgctggacagctctggggtgcactatagcaccccactggagcagtttgaggcatctctgctgaacctcttcgacaagggcatcctggccacccatgccgtgccccagctggagaaggtacgtgctgcagcctgagcaggccccaggcacctgctgccctggctgctgatggctccctgagctcagggtgctgccacagttcaactgtatcacaggcctcctgtcgggcaggcagcatgctcagccctgtaaatctcaaatatcccatttaatcctcatcacaagctgcactgtgacctattaacactcgcattctgtaggtggggcttggagaagtgtaatagcctaagattgtgtagctgctaatgtcagattttgtaggtgaggcttggagaagtgtaatagttagcctaagattgcatagctgctaagtgttggaactgcgatctgaaccctgggcttgctggtcctctgctgccacagccagatctgatgtagaccccacgctcttgatcccacccagctcttggcctctctcttcatctccagaggtggacacaggccggcttccacatacagaccctctgtccaacgtccccaccagtcactgccactgcacacacacccagctgcacacagcccacttccagacccaagagcctctgtagccctagcccttcttgtcgcctttgctggtcagttagagccttcatgacccagctgtcttttctgcaccttttcttggtcctgggctgagtcaggcccaggcagagtcatgcccaggcagaggaagatgctgccccttggtgggcctcacaggggcgtctggccttgtaaagagacagcacagcaaacccccttctcccgctgcatccctccttttgtatttggtcaccctgccaccctctaggcttcaggccacatcctgcccctgcttgccctgctcctygggaggactccccatctcccctctgctcattcaccccctggctcatccaggtctgccctgccacatgccttccctctgcagctggtgatggaggacatcttcatcagcggtgaccccctgctggagtccgtgggccttcatgagccactggtggaagagctacgggccaccattgccagtgccgtgtccaaggccatgatcccactgcaggcctacgccaaggagtaccgaaagtacctggagctgaacaacaatgacattgcctcctttctcaagtgcgtacgtgtgcccatgcacrtcggagggtgtctgtgtgtttgtgcatgtgtatcccctgcccaccctgctcaccatcctctgccccctcccgtgtgcttgctgtcctcagaacctaccagacgcagggcctgttggcccaggaggtgcgggaggtagtgctcacccacctgcgggagaaggagatcctggacagctcgctgcccagcagcatcatcattgggcctttctacatcaacacygacaatgtcaagcagagcctgtccaagaaacgcaaggccctggccacttccgtgctggacatccttgccaagaacctgcataaggaggtggatagcgtaagtgcccacctgccccgcctcagtgaccacagcagcacacaccacagcagcacacacggaccctcacatacatggcaagatgtccccaagcagggtctggggtgtctgtggatgcccaggccaagggaaggagctggaaatcaccctgccccatccctgcctgtctgcagagagctgtcctgtatgggaggtcccaggaaacgggggtttccacctccttccctagactcttagaggcctggaragcctcacgaaggacacccttgacggacttgtttcatggagctaggggattcgagtgcaggcctcagaagccctgcgtgtgttggtagggctggaggaggctggaagggtgaggtgtkccgggtcatacccttgccccactgacagtcctcagcaacccrgggagcccaccaggagcacccctcttggaaagcgccgcaggatgttgtggtggaggggacagttacctgtcgggagatgctggagaccaaggaggaagagcaggtgagggaaggcaagggagcagcatgctgccctccccagcgcctcctcccactgccagatctgcgaggagttccgcagcatcagccgcaagatctatgagaagcccaacagcattgaggagctggctgagctgcgagagtggatgaagggcatcccggagaggctggtgggcctggaggtgaggcaggcacacgggcactggggccagggaggcacagkgctggtgttaaragtccgagggctggggcaggcaggggctgggaggtcggactcaggaggctgagggtaaggtagttggacagaggacagatggggtttagggggttgtgagccggggcttcagagctctgctgtctgggggtaggggggagctggaagctggaggtgtggcagccatggctctaggagccctgagcctgatgctgcccttgcaccctgggcctcctcccctggcccagacctccccattctgaaagagagcagcccctctctagtacccgtctctgggragccaggttccgattacccaccacctccctggcacacgtgaagttctcattaccacctgtctgtgcaggagcggattgtgaaggtcatggatgactaccaggtcatggatgaattcctctacaacctcagctcagatgrcttcaatgacaagtgagtgggagcttggcccccatgccaggtgcggggtggagcatgaggggagctgctgagctgcagaggctcccaaatgccccagctgccacagtctgtgcaatctccccagaaacaccccactgagatttcagaggccagggctccacacatgggccgggaccagccagggccaggtggccgaaggaattcatttgggcctcttggcctcagctgctccccaaccctgtctctgtcctgtcaatggcctggcacatgttttgcttgttgttttttgaaacagagttttgctttgtcacccaggctggagtgcagtggcacgatctcagcttactgcaacctccgcctccagggttcaagtgattctccctgcctcagcctcctgagtagctgggattacaggtgcccaccaccatgcccggctaatttttatattttcagtagagatggggtttcaccatgttggctaggctggtctcgaactcctgacctcaggtgatccacccgcygcgccctcccaaactgctaggattataggcgtgagccaccgcgcccagcctgacacacgtattttactgtggacctagggtttcctgtttgtggctggtgccctttggggttcttgggagcactgagagaggcaaagctcagcctggtgggcagtccctggagaggggcatttgtccccacccaagtcaaaagccttgtgggaaacagccttaggtgcccttttcctgccaagccttactgaggccgccagagaccccacacccagtgctgcctcacagatgttgggggagtcaggaccatcagggccctgcccaggagagggagacactggcagacagggcatctgggtgctcagggggaactcccccacgaccagcatccctaggccagctgcaggtggaagccccacatcccacagaccccctatgtcagctgggcaaagggagttggtctgacctgaaggcagctggcctgagggccctggctagagactgtggctttgcctcctctgaggaaaggcccctctggcccctgaggcttaagaggggaacttggcctcactcttctcacttccccttggtccccatcactacactgggcaccttgggtctgcatctcactggatgcagactgcagctcccagggggcagggcagcctccctgatggtggcagtcgcgcctcccagctcacctgtacttcgcagctgtctggccccaggtagcctccacagctgcctggatttcccctgaaccccttctcactggctgcctgggtgcctggtgggatgcccctgcctggtcttgccactccaccacttcagccgcgatatttctcccaatccccacccccatcccggccagatggattgccagcarctggccttctaagatccttgggcagatagagctggtgcagcagcagcatgtggaggatgaggagaagttccgcaaaatccagatcatggatcagaacaacttccaagagaagctggaagggctgcaggtggggcacagctgcaggcttggtgctggacacagcccccaccacacgcacgcacagttctccagggcctggcctcacttcttgcattcaggaggtgctgagtcaacatgtgatgggcgggcagatggatgaatgaataaatggctgaaagaatgaacgcaaaggccaaagagatgcctgggcagcaagctccagaaagattcggagtagtaaagtccccagctcttctgttgtgtccttggcggcctactgggcagtgggcacagtgtcagtgcattgggtctcccctggctttgctgtgaggaacctgctcactccaggagaacaacctccttagaactcggaggagtggacgtcctgggacctctggttccctgggtttgcatgggaaggcctggacacaagtggggctgcaggggcatctgacccattgctccttggcctgcagctggtagtagctggcttctccatccatgtggagatttcacgtgcacacgagatcgccaacgaggtgcggcgtgtcaagaagcagctgaaggactgccagcagctggccatgctctacaacaaccgcgagcgcatcttcagcttgcccatcaccaatgtaggcctcctgcaggcaccctgcccccatgcccccaggcttgaggaagcagctcatgtagatgcagctgccaggaggcagggcyctggcatttgggggcaggacccagcaggctgcagagtggagatagcccaaccctggccctcaggttgaggaggcccctagtacaaggcaggtggcctgagggtcagcccaggtctggtgcaacagctcagagcccagatctcaggtgggaagagaagaagggaggccaggcccaggtgtttgggggcacggtcagggacatcagccaggagcaagggagagggagaggacctggcccaagaaggggcaacatggagagagactgggaagygtcccaagacagccccagccctgccctcctgtccctgcagtatgacaagctctccaggatggtgaaggagttccaaccctacckggacctttggaccacagcgtctgactggctgcgctggtcggagagctggatgaatgaccccctctctgccatcgatgctgagcagctggagaagaacgtggttgaagccttcaagaccatgcacaagtgcgtgaagcagtttaaggacatgccaggtagggagccaagccggccaatcccctcctccctgcctctgccgcctgcctctcatgcgtttctgtcttacccggcagcctgccaggaagtggccttggacatccgggcccgcatcgaggagttcaaaccatacatcccactgatccaggggctgcgcaaccctggcatgcggatccggcactgggagacactgtccaaccagatcaacatcaatgtcaggcccaaggccaacctgacctttgctcgctgcctggagatgaacctgcaggaccatatcgagagcatcwgcaaggtggctgaggtggctggcaaggagtacgccatcgagcaggtgggtagccaccagcgggcccagccactccagccaggccctgccggacagcctgacctcctgctctggcaaccacagccacttgggaggatgacagtaataagccccatccctggggtcatgaggcccaggggttgagatgcattctattaagtgagttaataatgcacataaaattcttgacagtgtccaccattgctattatttttcagttactcctctcaagagccccaggaaggagctaatagcattagcctcaatttaacagatgtgtcaggccgggtgcagtgacacatgcctgtaaatcccagcactttgggaggatgaggaggaaggatcgcttgagcccaggagtttgagaccagtctgggcaacatagggagacccccatctctacaaaaaattaagatattagccaggcatggtggcacatgcttgtggtcccagcttcttgggaggctgaggctgcagtgagcggtgattatgccactgcactccagccagggagacagactgagaccctgtctcaaaacaaaacaaaagaaaacaaacaaacaaaaaaacagataaatcaattaaggctcagaagggttcagcaactggccaggatgacacagtaaatgccagaggtgagaccagcgcccacactcctcctaaccttagctgcctcccaacatgtgcgtacaaccacatgcagcacatgtgtaacagtgaactgggctgaacacagtggctcacgcctgtaatcccagcacttgggaggccgaggcgggtggatcacctgaggtcaggagttcgagaccagcctggccaacatggtgaaaccccatctctactaaaaatacaaaaaatagtggggtgtggtggcacatgcctgtaatcccagctactcgggaggctgaggcaggagaattgcttgaatctgggaggcagagattgcagtgaaccaagattgtgccactgcactccagcctgggctacagagcgagactccacctcagaaaaaaaaaaaaaaaagagtgaattggccctgaattcagatgaggggctcacacgggacttgttgccagacaagccragagtatttgccagagcggccatgtggaggtcatggccaggtactgtctgctgcttccctgggcagggctggtcagacagcatcaggaccagcccctcccaggactcagcctggcttgtccccgaccccaggcactggacaagatggagaaggagtggtcgaccatcctgttcaatgtactgccctacaaggcgacagacacctacatcctgaagagcccggacgaggcctcacagctgctggacgaccacatcgtcatgacccagaatatgtcattttcaccctacaagaagccctttgagcagcgcatcaactcctgggagaacaaactgaagctgacccaggtcggccctccccccagtccttccctcatcgctcccccacttcagagagcccgacccacaggtgtcactgatggtctccgggtggggttcaaagcatcgcagtgccttgccctcattcacacagcccctggctctctggcaggccccgccctactgcattcagaggagggcaactaggatgggctctccatccatgaggttcagctactggatgaggcagataagggtgcgtaggggcagcatttgggtcccaaaatgtggttgaggataggcctgagaactgccaggcggcctccccagggctgcctgagcttgggacaaccaggtcctccagtactgacactttctgggccggatgtcccaaggtcccagagcacctcagtgccctttcccactctgtcctgagcttctgttctcatctcatttggagctaccttggttgaggggactgggccaccagggactgcacttgtcttgggctctcaaggctagaggcaagggctgcccacagagccctggagggcagtcccggggccagcctgcaggtgtgatatccccttccccgggcctccctgatagctgctcagagacctccggcgaaggccagaagcaggtggggagggctcatctgtgtgcctggaccacccagagatgcctgagctggtcagcactatccccagtccccctctgctcacgctgtccactcgacctggagtttgacacccgccttccatctcctccaaggcccagcaacaagcagccttgccgactctccctcaccatccttcaaggggttcccaccgaggccattgtcggtgcctctttcagagtccactacacatgccgggcccatgattcaggggcagaactggccccttagtgggctgtgggcccctcgagggaagggaccaggccgcattcccctgtttcccctagtgcctcccagggcctggcacagtcctgacactgctgactgtgacccccatcccatgaggaagaaatggatgagtgcgtgagtttgcgctgatgggagaagacaagagatacatcctgaatggggaatttggaggcagaagggggaaatggctcattttgaagatgtctcacccttggactcatgtttcagagagtattttaggactctcacactcaagacccattgaatctcagagaatcctggggtcatggacccagaagtccttccaggaaggaggctggtttgtctcccaggcaccgagtgtttcctgtcactgcaggctttgctggcgtgggtgtgttcctccctttggaagagcagctcccccggctcctttggaggcttgggcgtcctgtggggatgtgggacttctctggagggcaggcatccctgtatcctctttgttccctggagtatcacagatgacagcaccatctagaaatctccctgtagacactggctttggtgtccagtgctctgcccaacatgctggtggggtgaaatgtcycagtcattgggacaaaccccagcttggaccctgacagtccatatcacacccctccctgcccctcccctccccaggaggttctggaggagtggctgaactgtcagcggtcctggctctacctggagcccatctttagctctgaggacatcaaccagcagctgcctgtggagagcaagcgctaccagaccatggagcggatctggaagaagatcatgaagaatgcctacgagaacygggaggcaagctcaatgagggtgggaggggcagctgggatccccaagggccctggtcacattgctggtagcctcctagtctcttccctccctacacagaaaaggctggtggacaagcctgaggatttgatcttgaaccatgtcctccagagtgggctccccagcctcagagttgctccttagaggcacagtcactgacggtttttctcttggagatccacagcccatattaacgttttttttttgtttgtctgtttttttttttttgtttttttttttgaaacagagttttgctcttgttgcccaggctggagtgccatggtgcaatctcggctcactgcaaccttcacctccctggttcacctcccggaggctgagacagggtaatcctgtcttagcctaccaagtagctgggattacaggcatgcgccaccacgcgtggctgattttcttttgtatttagtggagccgggatttcaccatgttggtcaggctggtctcaaactcctgacctcaggtgatctacctgcctcagcctcccaaagtgctgagattacagacgtgagccaccatgcccggcccatattagcattttagaagctctgacaagtcctgcagcaaagcaaactctttagctttgtttaactctaacttgtttgaccgtagaattttttctgtggggctgatggttgcagccactggctcagggagaatttttctgcatcttctttcccaggccccgctgaggggctctggctggtgtgggtgctctgggatgagcctatcttgctacctggaccatgctcactgcccatttctgtgcatggcccgggccctgcaggtgatcaatgtgtgttccgacctgagaatgctggacagcctgcgggactgcaacaagattctggacctggtgcagaagggcctcagcgagtatctggagaccaagmggagcgccttccccaggtgggcgccacctggccatgcccactccgccactgtctgcccacaaggctgaggtgtccagggccctgctcaggctagggtgyggggatgtcagcaggactggggcagctggggcccagggagcctgcacgacccgcttcctcacccctgttcccctggcagattctacttcctgtcagatgatgaactactagagatcttgtcgcagacaaaggaccccacggccgtgcagccacacctgcgcaagtgcttckagaacatcgctcgggtgggcagctgggcccggggctcagggctgggagcatggggcatcttcccagggagaacgtccctccctttgtgatgagcccttttagcaggaaatgtggcaaatgacattcctggtctttggagacacacctggggcctgtgggaggaaggtcaactgcagaatccccagctcagggctgagggccctggatttccaactcaccaggcgctccctgtgcccccagcacactgcaaaacccatgaggccagaagcctgtggcctgccttgtcttccctcatctatgcaggaggccggggacatgcaaggcagtcagcctccttccctaaagcctgcttcatgccgggcctgggctggggcctgaccactgctggggagaaggcaggccatccagcctgggaaggcccagccaagatagactctcggggggacgggaaggcagggctttcttcttgaggtggagggcaccgggcaggcttagcgctggggctgtggtggccagggcatctgggcacaccagggtgaccccactcctgctcctccactgcttgcagctgctattccaggaggacctggagatcacgcacatgtactcagccgagggggaggaggtacagttgtgcttctccatctacccctccagcaacgtggaggactggctgcgggaggtggagcgcagcatgaaggccagtgtgcacgacatcattgagaaggccatcagggcctacccyacggtgagccgcccgcagcccgtgcagccttccacccctgcacccctctgctccctctcagtgcccctcctgctctagccggcctcgtcctcaggctgcagccctgaggtccctgggggctcaggcrggattctggagtctttcctttccacacacactccagaaagtgggactcactcctaatcatcgggatggctgttctggttcccagcactcactgggtgccaggctccaggctgggccctctcctgcagtctttctctcagctccatgaccataaccggcagctgggctctaggtgactccccagcctgcagagtcagttcagagatatctctgccacmctgagaagcccagagcataagggcttccctgctctgaagggactggtggcatcaacaactggagccaagtctgaaaggccagagcacagacagcattcagaggaagaagaaagaatgggattggggctgcggctgtccaggtcagcctgcccatgctgtcttcccagatgcccaggacccagtgggttctgaactggcctggccaggtgaccatcgctgggtgccagacctactggaccatggaggtggcagaggctctggaggccggcaacctcagaagccaactgttcccccagctctgccagcaggttggagtcaagaggacccctgtctgtccccctccacccsctacatggcacaggagggcccagtccctcyggaagctttctcctatagtgagcctggaagaggcctggggttgggtctaaaggggaggtcagacacccttgaagtgtctcacaaccagccacccacaggaaggacgggcctgaggcgatgccccctctgcaagggtcagtgagggagccacgcgcctggtccctcctgcacagtaccacaggcaccccttgccctgtgctccagtgccttgccaggctccccctcccggctttaagggttcagacagcacgacatgctgcagggaggcagacgccaggcatgtgcctctattctacttccttccttcccctgcccggtccctgctcccctcccaactcagaccatcagagacccccaggatagagggactgtttgtggcagaagcccaccctctgtgaaaggggagggtgagcctcctcgtggtaccctgatgtttgacagtgcaccccatttctgcagctcagtgatctggtggcccttgtgcgggggaagctgtcccgcatgcagcgggcagtgctgtcagcgctaatcgtcattgaggtccatgccaaggacrtggtgagcaagctaatccaggagaacrtggtcagcgtgaatgacttccagtggatctcacagctgaggtgaggacatggggggcgcccccagggccagagcagctgccaggaaggggcaggggaaaagagaaaagtcagttagcaataagctggtctctgtccttgaggttctgggacaagctgggtatgggtaccttaatgccctcattcccaaaaagaaccctctctccttgactatataccctgcccagtggcccattgccccatggccaggccctcatctccctgcaccgccaggtactactggacaaataatgacctgtatatccgtgctgtgaatgctgagttcatctatggctatgagtacctgggcaacagtgggaggctggtgatcacgcccctcaccgacaggtaagcgttcccctcttgctccttcccacactgagaccctccctctagttctctctggcccaggaatccagggaccatggccactctggggtgatctagtccatcagagcagtacagggttaggaccaagggctttgggctcagacctcagttctgcccatcacaggcggagtgacttcgggcaggtgacttgacccctctgtgcctgagtttcctctgaggcctcctcacggtggtaatgagaatttcatgagctgatacatgtagagctctcagcacaggtgtggcactcagtgagcatctaatgggtatgcactttcctgtttttatccgtcaattcctcctttaatgtgccagaggaactgagctgagagacatcatgggtgagcccttttctaatagttccctcctagctcagtcagtcatgtcatcttgccgcctgtgtctagcactagctggattttcaagctgtgttttgagtgagggaagtgaagtgtggccacatgtcggccatccccaggggtccctgggcaaagctgggcagggtggtgaaatgggacagggaacgcgctgggcaggtgtccacaggctccagtcctgaccccggagccagggctgggcacaccccagcccaccaaaaggggacggggcgagaggccccagtccacaggaaattccaaggaaagggggagtgtccaggccatgtgcggcccgagcccacctcctctgtctcctgcaggtgctacctgacactgaccggagctctgcacctcaagtttgggggtgccccagctggcccagctggcacaggcaaaactgagaccaccaaagacctgggtaaggccttggccatacagaccgttgtgttcaactgctctgaccagctcgacttcatggccatgggcaagttcttcaagggcctggccaggtgaggctgggcatgagcgtggcacaggatggggtgggacagcctagctctccttggggagggctaggtgagggcagtgcctgagaggggcctcgaaggatggtggaggggacagaagggggtaataggcatcacggcttggtcctgggggcattggggtggggagtgrcagtgggttgaagactgagctgatggagattgcccctgagggcttcctcccaagtggagttggagggggccctcagagggaggtgcccagaytgggctctgaacacatgtgccccatccaatgttccggcctcactcagtgctggggcctgggcctgcttcgacgagttcaatcgcatcgacatcgaggtgctgtctgtggtggcgcagcagatcaccaccatccagaaggcgcagcagcagcgggtgagcccgggggacccaccttactccctcagatctgccatactcacgccgccatactgctccccattgcaggctgagaagccaggcgctaaggtccaccctgggtccagcctctcttgtcccgggggcacaccctaaccccagtctgtgggcagctcccaggccaagctgcgggggatgaaggggtcccctcctcattacatcctgacctttatggaaagccccaggcattggtcctttctctagccacgtgcagggcggccagggaccttgttctggggacaggagctgagaggctagcagttatcccctcccccacttcccctagtcaggctgagcttggctggagctggggaattgggggtggagcgagtgggaagcaggagatgtggagacctccaagggcctgaagccaggagctggaaggccatgggtagccactggggcctgaggtttcaggccagatcctgagagaggatacaacccatgatcaggggtccaggcctggcctaccagctacagccaggacaggggcatcaacaggggacaaggggcccactcagaggaggggacaaggctgggcaccctagtcccaggcaagtcagcctctccccactgcaggtggaacgcttcatgtttgagggtgtggagatcccactggtgccatcctgcgcagtgtttatcaccatgaacccgggctacgctggccgcacggagctgcctgacaatctgaaggcaagtgcaggcccagagtggcccaggaagcaccagagctctagcctgagttcagagatgctaagccacttatgcaaggacacagttgcttggactccagggactgtgattccctatggtagccccttagccatggaggggaggcctcagggcctcagacttgtcctcagggcatgggagaagtcaggctgcctatggatgtggtgtggagggggaatctaatgagacctgttcaccctgggccttcaggagaaacaggaaaacaggagccaagaggggcatctcctgggagtcatgtgggggcaggtttggatcaacaccaaggatccactctaatggcagagctaccagtctcaggggagtgaaagcctcagctgtggcaggcttggtgcagcagggagtcccagcgtgttagggaggagggccrgatgaagctgggggtgctctgggggtgagctctgtttgctgttcacatgtgcactgtgtgtcccaggcgctcttccgacccgtggccatgatggttccagattacgccatgatcactgagatctccctctattcctttggctttaatgaggccagtgtgctggctaagaagatcacaaccaccttcaagctgtcttctgagcagctcagctcccaggtgtggtcctgccctgatgggtttccagggtctgaaaacttctgcctgctcccagcctccagggcacctgctgagggccaggctctatgcccggtgctttacaggcattaccttgtcggcttctcccagcaacccttggagataggrgttacatgcccatttgtcrgctgaggacaccgaggtcctaggtagctaaaggtctggccaggctcatgcagtacacagcagcgctggagcaggagccaggaacagatgcctgtgtggctacttcaggtgcaagggccttgatcattagggcaccaagagcttcagaaccccaggctggggagcaagtgcacctgggccttgtggggaccagagtaggacagccaggccctccgagcctcccagcaccaccatccttccactcagcttgctgagcccagattccaaggacagatggggtggcccaggcaccagtgctggtggatgagctttcctgttcagcttggttcccaaacaggcccccactttgcagcagcagagacgagtcccacctctgggctgacatgctagcaacttagtttgtcttccatcatgatttcagaaaaaaatccctgttgtcaccctaatgggccttctctgggtcacctgctcatccatgaacaccaatcactgtggccaggggtaatcagtactacctttggccagatgcagtccaccaaaatctatgagctagaagagatgcagcctgttaccaggaaaagcagtggcagttcatcacagtgcactcctgggtgccggcgctcccacacacccttctttccaaaatgctccccacccccaatcagagcaactatcccacatggttttggaaatgcactcaactcttcccaaatagaaatgacccaaagtcaagcccagcctcttcatgcagctccaagtccgagatttctggaacatatgctagtctatgggttgggtctagatggagtcctcttggttgggcaccatggggcagaatgattaatttaactatttccaactcacttactgtgtaatgaagagaaacaggctgggggaaaaagcatggtggtgtggccagaaagacgggtctggagagatgttatgggagaatgttagaaggaagctcaagggccatcaaggccaagctgattgttgcacagatgggaaactccttcattcacttttccagcacaactagagggccctcctgcccctggccatgtgctgggacagtgaccaaaggatgcagaatgggtatcggataaaggagggggctatcgggacagtaaagtgcagggtgcccggggagcccaaagaaggtgcacctgcccaggctgggcatgtaggtggtcccagcaggtctgcaagggaagtgctatgagctggtgatgagacttggccaactgccaggtgggaggcagagtgttccaggcagaagccttggagagggacagtgctcacccatgcctccttctgtatggcgacaggatcactatgacttcgggatgagagccgtgaaaactgtgatctyggctgctgggaacctcaagcgagaaaaccccagcatgaatgaggtgagctccacccagcagggctccaggagtggaactctgggagggctcctgggcagctggagggcagctggcccactgccctgaaggctcagccggcacctgctgcaggarctgatctgcctccgggccatccgtgatgtgaacgtgcccaagttcctgcaggaggacctcaagctcttctctggcatcgtgtccgacctgtttcccaccatcaaggaggaggacacggactacggcatcctggatgaggccatccgcgaggcctgcaggaacagcaacctcaaggatgtggagggtgagcctcgggccctgagtgttcgtggaggggctggccatggccaccttggagtccaggtcagggggacagagacaggacagtccaaccccaggggccctcacacctggccaagtgtgctgcaggcccgggctctcagccgagcaatccagaggcagggcagatgtcccggcccagtctccaccaaaacccgcctggtggtggggaggcaggcgttgtccccttcctaggccctccttcccrtgtgggctgagagccccgagctcctcttgggccttgcctcatcagggcctggccctcactgggatgtgactggagtttcaaggccatattccttgcaccccagcccacctcaccacagccaccactcacctcttccagaggcctcttggctccaccccactagcgggacttgcccacgttccttgttgagtgacacccctggcgtcactgcgctaaagaaagaacatttgggcccttccttcactgacttgttgcaaaggccaccatgtgtctgggagggctggggggacactgccctcaaatagactccctctcatcccgaaccctcgcccctcatagtaggatgagrgtctcagttcattcccagccagccaccccctccagcaggtcctttggtgggcctgcaggaggagctcctctgggaagccatggccagtcaccctggccacacaaggcccttctcgggaccctaggcagttcctgctcagccctgcaaggcctcccccaggtgccctccattgtgcttcaattccatgtgcagctcgaatgcttcctcctctggtcacctcctgcacccccgaccctagcaggcttgttgaatgaagcctcaaactcttctctccctcacagccttaggtcacctttgccgtccctggctaattgggccctatttggcaggaacccccggacctgcagggccatagccaccaccacccttcttgggccaaagtgaggcatttattccctacccctgtgggcctggcttctgcctgctggcagctgcctctatagctcccaactgaccctaggatcttgtctctaggagtttgctcataggagtcagcacttacttggggtggtgctctcagcaggctggggctgaagttggggcctgtgacagctgacactgagcaagctggtgatggctgaccacctgaccaatggctgtgaaggaacggtagtcacagtggaaagaatggctagcatttacagagtttctactctgccaagttctgtgcttagggcttcacctgcccctgcctatgatgtaggtgctaccaccatcctcattttatagatgaggaaattgaggctcagggagtgcagtgactcacccaaggtcacacaagttagtggtgtggccaggacccaagcccatgctctgacccttgggccccatgccatgtcccccaggcttcctgacaaagtgcatccagctctacgagaccacggtggtacgacacggcctcatgctcgtcgggcccacaggctccggcaagagtactgtaagcagagccaagcttggcagccagtgtccggatagtgggcctgtaggggggtgcagcttcaacaggggttggcctccatttgtrccccttggcatagaatacccctccccctccccttggcccccagcccactctagccctgctctctgggagcctcactctcaggcggtccstctcccagtgttacagagtcctggcagctgccatgacgtcactgaaagggcagccatccatcagtggtggcatgtacgaggctgtcaactactacgtgctcaaccccaagtccatcacgatgggccagctgtacggggagtttgacctcctcacccatgagtggtgagtgaccccccagcctcaccggtgaccccctgctcccagacctctggaggctgtgggctgcggtcacccctccctccattagcccagtggaaggccgggctctgcagcccaacgcttgggattctattctccattctacttcctcgctgagtgaccctcctcaccccccaggccatggttccctcgtctgcaaagcggggacaataatggcaccatgcttatggtaaggcaagaatgacttaacacgctcagtgcctctgcagtatctggccattgtcatgacctgagagaagctggtgggccctctccgggcccctgctcccaggccggggtgtgcattttaggggaagtgcactgagataggagaagggcagctggatggagactgctgagacgtcggcacctcaggggcttttctctaaggctattctgtttctccaggcaagagtctccagttctctgctgggggtgtctgcttggctccagtgttctgggagccctgtaggggatggtcactagggagggacagtcgcccaccttccacaacgtgaacctgtactgcttcccccatttctggtgaagattctcccccatatccactccagtctcttatgtaggtaggtgagggggctgggggtcagaccagaaaaaagtcccctgttaaagaaaaaaaattattcaatgatcctttttttttttttgagacgaagtttcgctcttgttgcccaggctggagtgcagtggcgccatctcggctcaccgcaacctctgcctccttgttcaagcgattctcctgcctcagcctcccgagtagctgggattacaggcatgtgccaccatgcccggctaattttgtatttttagtagagacaagatttcaccatgttggtcaggctggcctcgaactccctacctcaggtgatctgcccrccttggcctcccaaagtgctgggattacaggcgtgagccactgcacccagccctcaatgatactttttaaagcatgctgaggaagaacatattcaggagcatggcaggcacagggaccactgcactggggccttatagttaaggggagagactgggctctgaatacagcatgggccagtgggaatctatagccaaggggcagggtgagcatcagtgggtggaaaatccagaggaaacatcagtggtgagggggattctggttgaaccaatctaacaggattccaactgaagacaggcctcagcgtaaccagacattgcctgggggtggtgcagggaaggagcctcaagagtgatcagttatcaagggttctggctaaactgacttagcagggttctttactgaaactggattttacaaggacgtgcatatatgggcacctaggagaaggttccggagcctaaggctggaccaagcacagcatcttcatcagccctaccagccccttccctggtgcgtgctgcctctgaggtctgagtcccctgggttctgaggcaggacctggccacttctcaccacgctgctttctctgccctgtcatttaccctcctccatccttgtccattgtcttccagagctgcacttcctccatctctgctattgcctcctcccctgctccctttttcctgttgggatttcacctttaatggggcttcagcagggcagggacataagcacatgttttcattacaccatgtgacaccaaaaaaatcccacttttcctattataatttttaaaagaacaaagagattgaaggaaagtagagcccgcccacccggcggccaggcttccctgggagccagctgtgctcgaagcaccgcctccctgatgtttccagccctctcctccctggcgctgcaggacagacgggatattctcctcrttcatccgggcgggggccatcacctccgacaccaacaagaagtggtacatgttcgatgggccggtggatgccatctggattgagaacatgaacacggtgctggatgacaacaagaagctgtgcctcagctctggggagatcatcaagctcacagaggtgcacctacctgtccacctgcccactctcctccaaggctgggtgggcctggaggctgcatcatgctggccaaactctgccccctcacccctttctctcagggccatgggtccatctcaggctgtcaccctgactcagcaagagccctcctgctagcaggagcttaggctcagctcctagtgcccctccctgagctcccacacctcagggtgtcccgcacagttgctcagagcaccctttacacagaccctctttcttttgtgctcgagcccaccaggatgcctgtcccactgctccccggctgatgatgcctcttgcctcccaggcccaatttcagccatgttgccccagtcaggtcaggtggggtcaggtgtgcacctggccctggcagtatgcccggggtctgggagatggatggcatagacaccacggggatctgtctggtgtgtgaggagcagttgtcagagaaagagggatatggcctgggcacaagagcatctcaggggtctacactgagtccagctcttgaatccttctaaaagcaaatacctggcagtcaatgtggacctgtgtctatgtgcacaggggtggrgggctctggagcaaaatacacagttcccatcagatgtgcccaggcctccagggaccccaaaatgctctgaccccagtctggtcagcgaacctcaggaatctcctgacttggggtcctcctcagggctccagggagagccacgttatcagctgaggacccagcggttcctgtcccacccagcactgcccctgccccacagcctgcccacaccgcccacttacaggatgtgcagcccctccccgcagccctgcagccctttctccaggcctgaggactggcagccagcccactcatttggttcgtcttggcaccaggcaatgaccatgatgttsgaggtgcaagacctggcggtggcttcmccagctacagtctcccgctgtggcatggtgtacctggagcccagcatcctggggctcatgcccttcatcgagtgctggctgaggaagctgcctcccttgctgaagccctatgaggagcatttcaaggccctctttgtcagcttcctggaggtgagtgaggccacgggtatgtctgaccctggcagggcagcagggcactgtggctgccagccatgagaactgggtrcctactccctgcaggaatccatctccttcgttcggtcctcagtgaaggaggtgatcgcctcaaccaactgcaacctgaccatgagcctcctcaagctgctggactgcttcttcaagccctttctgcctagagaggtacagccctgagagtggggctagatgcacctggtccctctccccacactgctctccttgctctctggggcctgaaagagagaattggattggtgcaacatggtgcaacatggacaagaccacctgtccaattggctgtagagaaacaaagctgtgtagcagaggtcaagacatgcccctgccccacttcctcaggccgcttgatactgttcctgtctcagcctgatactgttcccttcatccccagggcctcaagaaaataccctctgaaaagctgagtcgcatcgtagagttgatcgagccctggttcatcttctccctgatctggagcgtgggtgccactggggacagcagtggccgcaccagtttcagccactggctaaggctcaagatggagaacgaacaggtgagagccggcggcccccagggaccaggagcctcagtcctactgggcctcacagcctgcttctcctcctggttcccggcagctgactctgcttttcccagaagaggggctggtgttcgattacaggctggaggacgcgggcatcagtggcaccaacgacagtgaggatgaagaggaggaatacaagcaggtggccgcaggccctccccagagactgcacagggagggaccactgggtggctgctgttcccgcaatgaattatggccacacagggagccgtcacattgatggccaccaggtctcaggcagcggttatttgcatcatctcatgaatcctcatggccctgtagagtggttattattgtgcttgttttccagatgtggcagagctgtacttgaacctagggctgggctaagaggggagacattcgagtacctccctttccagccatatgcactgcctcttccacattgatgcggagcccagggactggccacctcagttccacttaaaagccccattttcccagagactgggctcccgagggctggggggcaagctcttgaagcctgcttcagtgtcctcatcgctactatcagctagcaagggctccatgagctcaccctcatcccaaggtcaagaccccagcccaggaggacagaggtggaaaggcgtctgcagagacctgtccattactgtgcagcgtcctgctgggggctcccagggcacatttgggtctaacgtttaagactgtgcccagtgggatgcattggtttggccatagtgatccccccatcaggggacgtctgcaagctgggtcagggctgctgtgagtgaagggatttgtgcaggcggggacagtgttgggaagactggacctagtggcctctcagcttccagctgacaccagtgcccatggttctggcccccacatttctcgggtagcctgaaactaaacagaaaacccctttgcattctgggttgttcaattctcggagcttctcctttctgcagagactcagggcctggcagtccttagggagcccccaacctgggcagggagagccctcttatgcagttgtgctcagagtccccattcttggctgtttgtgctgggagtccccctccccatgcagaaagcagggcacaggactttccatttccgccggaagcagccctgcacctggacccgcttgccaaagcccagcmgtgcagctcctggcccttctgcacttggccatggggccgcagccaggagtggggcagggaggggttccaggcccactgctgagccacctatgattccaggttgcctgggtgaagtggatggactcctcagctccattcaccatggtaccagacaccaactactgcaacatcattgtgcccaccatggacaccgtgcagatgtcccatttactggacatgctgctcaccaacaagaagcccgtgagcacccccccaggccctgcctccactgtccccaaggcctatattgggggttgaccagcctcccacatggatgcaggggcagctcctcctgtgcaccaggcccaccgcatgctcctgtgccatccccgctctgccaggtgctgtgcattgggccaacaggcacggggaagacgctcaccatctctgacaagctcctcaagaacctggcactggattacatcagccacttcctcaccttctcagcccgcacttcagccaaccagacccaggacttcattgacagcaagctggacaagaggcagggcacccctccctccttcctcacccctgcatcctcccagcctggccgatccagctgctgtcccacctctccaccaaattatgctcctgggtttgccaggaacctcccagggggagctgacagccccccaatgggcccagggttccctcacagactgctccagagccttccctgtatcaaaaattcctacaaagccagtcagcgagtgggtgctcgccctggctgtgcccttggacagggccctgggtctgtctgtgagaagcctgttgtccatctgcctgggaggcgagactcactttgagggagctcagactcaggtcagcctgtcccagctgtcccaggacactcagaacaaggatgagggtgggtcaaggcatctagcaatttggaggaggctaaaatttagcaagggcttcccagaggcaaagctgccacccgttcgcccctggattctcagaggacctggtgcctgtgggtgctgggctcacacagcccctcccctcaggcggaagggtgtgtttggaccacctctggggcgcaactttatcttcttcatcgatgacctgaacatgccggccctggagacctacggtgcacagccacccatcgagctgttgcgccagtggatggaccayggcggctggtacgaccgcaagatcattggtgagtgtggccggcctggctcacagggcaagggctacgcgtgctgtgcaggggcacaggaggcacagcactgaaggcctacaatactttaaggcacccacaaaaatgttttaatttctcttaaaattaaaggggaggaggggggccggctgggggaggggcggagagacgccgccgccacggctgccgcagcctctggaagcctggaaaaggggaagcgagagcaagtgaatgtctcagtccccaggtggcggtggtggccgcgggggcgcgacggcggggcgggggcgctgctgctgcgggggcaggaagcggcaagggcggtggcggcccgctccagccrtgccgaataaaacaagaaggagaaagaatcaccaaaagcagggaagagtggaaaaagttcaaaagaaggacaagacacagtagaatcagagcaaatttccgtcaggaaaaacagccttgttgctgtcccgtctacagtgtctgctaaaataaaagtacccgtctctcagcccatagtgaagaaagacaaacagcaaaattcttcaaggtttagcgcaagcagtaatagagaacttcaaaaactaccatccttaaaagatgttcctcctgctgatcaaaagaagttttttatccagaagttatgtcagtgttgcgtcctttttgactttgtttctgatccactaagtgaactaaagtagaaggaattaaaacgagctgctttaagtgaaatggtagaatatatcacccataattggaatgtgatcacagagcctgtttacccagaagtagtccatatgtttgcagttaacatgtttcgaatattaccaccttcctccaatcctacgggagcagaatttgacycagaggaagatgaaccaacgttagaagcaggctggcttcatctacacttatttatgaatttttcttaagatttttagagtctgcagatttccaatctaatatagcgaagaaatatattgatcagaagtttgtattgcagcttttaaagctctttgacagtgaagatcctcaggagagagattttcttaaaaccacccttcacagaatctatgggaaattcctaggcttgagagcttacatcagaaaacagataaataatatattttataggtttatttatgaaacagagcatcataatggcatagcagagttactggaaatattgggaagtataattaatggatttgycttaccactaaaagaagaacacaagattttcttattgaaggtgttactacctttgcacaaagtgaaatctcttgagtgtctaccacccccagctggcatactgtggagtgcagtttttagaaaaggacagcacccccacagaaccagtggtgatgacacttctcaaatgctggccaaagactcacagtccaaaagaagtaatgttcttaaacaaattagaagcgattttagatgtcattgaaccatcagaatttgtgaagaccatggagcccctcttccggcagttggccaaatgtgtctccagcccacacttccaggtggcagagcgagctctctattactggaataatgaatacatcatgagtttaatcagtgacaatgcagcgaagattctgcccatcatgtttccttccttgtaccacaactcaaagacccattggaacaagataatacatggcttgatatacaacgccctgaatctgttcatagagatggaacaaaagctgtttgatgactgtacacaacagtccaaagcagagaaactaaaagagaagctaaaaatggaagtacgagaagaagcatgggttaaaatagaaaatctagccaaagccaatccccaggtactaaaaacgagagtgacatgaaaacgtccagggttacttgaaatgtttttataagataggactatgtcttcaccatgggggcggggggtggggctcgatttcactaacgttgtatatgaaaatgtctgcaataaaaagtacttttgaactttgtaaaaaaaaaaaaagttaaaggagaggagcatgaatttttagggcaaagaaaaattttcctgtgtaatattgatgtatttgtctttattccagtactgttctaaagtataattttgaatttttgtatggagaaggggccacaaaggtcataatgcagccctggccagggcccttcctgacttcctgcccctactccaggtgccttcaagaacctagtggacatcaactttgtctgtgccatgggccccccgggtggaggcaggaacaccgtcaccccgcggctgatgcgtcacttcaactacctgtctttcgctgagatggacgaggtcagcaagaaacgcatcttctccaccatcctgggcarctggttgggtgagtattggtgggggtgagcatggacaaaggcagaagcccaggccagggaggccacaccaaggacaactgggtggccaccagaaagggtggagtggccaaaccatgaccgcaaccctgggttcacctctcactcagctgtgtgatctttggcagctcatgaatctctctgagcctgtttcttcatctgtacctaccattccaggtcgtgagggttaagtatgatattgcatgtagagcacctagcatgaagcctggcacgtggtgattgctggatgtatgatgcacacagatatgcactcactcacatacatacatacgtatacgttagtacttgcccagaaactctggggaaggcatgttacttttgtaaatcaggaaaagccacaagataggatggacggagtgtctctgagcctttatggggtttggggaaaagcttaccccaagatgctgtttcccccaccatctcacctggccagggtgagcagcaagaggtccacctaaccctgagccccgtgtttctccctccatcctctagatggactccttggagaaaaaagctaccgggagcgtgtscgtaagtgtgggcctgggcgggaatggggcactggttccaggaggagccctgggctctggttgggtgtgttgaggctgcgaccaggcgccgtggtgaaccatcctcaggttcatgcagggaccttgggccactagggtgccagagcgaaggttgacacaggcactggctgccccataggctcattcacccattcttagagcccttccatgcctgcgttagtgtccagctgatgatagatgcaaattaaatgcaaaatgaatgcataaataagggaatccaacaaactcccaccctgtgtgaagaatcagaactccagggagcaggtgtgcacaggaaagccgggagtggtttgtgcggggcaggcatcgtggtgaatctgcccgtcgtcgcggcaaggcggctgaccactgcagtccctgtccttgcccaggcctgcctcctcaccctgccttcagctgaaagaggctgtcgagaaacagctcccttttgggtctgcacccacctgcttacctgcgccctgccttccctcctgtggctgggaacggactgctgctccacagcaaagcccagcctcctcctgggcctgcctgggaatgtggcacccctcttccccgccaacaccagtgctcccttcgccactgggccttccacaaacaagccccattctccatctcaaccaccaaatgcaaaacagcctctctgggcccccttcccrcctgccccagcccgtcactctacctctctgctcaccttgatagcaaaactcctccaaagcattgtctttcccgctgcacccgccctcccctcccactttcctgtgaatgcacctctcaccctctgagagttcttgtcaccagttgccttctgtggccagaccagcggtcagcccttgttctcgccttcccaggggtcagtagtgctggccggcagacatccccttcctgccacgggcttctctcaggcctcccccatccctggctgcccattctcggctggactggggcttggtctccagcctcctctccctccaaccacactctcctgagacagtcccatcccgcctctgacggggaaaaccatctttgtgctggcaactcccaagtctacctcctcagcccagacctctcccatgaatgcctgattccacatcttccctgggatgtccacagggtatctcaggccaaacctgtccagagccaaactcccgagtaccccggtccccgcactcttcccatctcaggcaatggcagctccatccttccaggtgctcccagcaagacggggtcttggcgccatcctccatccccccttccctcaccccacagctcacctgtcaggaggtcccataggttctcccttgagaacccatcccaatcggccactgttcaccaccctgtccttgcccacccagccagtgctgtagccccgccatggtctcctggcagctgccttcacctgcctaaggtctatcttccgcttggggccacagggacccatgaaatcattccatcagtccacactcctcctctctcacccatcgcatccaggcaagagcccgggtcttgacaatggtaggcaaagccatcctcagttcgccctgcctcatcctctgatctcaccgcctcctgctcatcccctcattgctggtccttaagatgccaggcctgctcccacctccaggcctttgcccttgctgtcccctctgcctgggacaatttttctccagttatgtgaaagcttgcatctcacttctctgcttgaccccccttcctcagtgaggcctcccccagcattccgtaaaatcgcccccaagcccaactctggccctccccggacccctctcctgctgcagggctgcccgtagcccttgccacctatttgctgtctttgttacttgctaatccactcattgtcgtcctwaccaacaagagtgtcagcttgagggcaaggagtgtgtctgtttgggtcactctgtgcccagtgcctgtgtcaacagwcaggcccctctcctgccctttctttccattttctccacttctccgccaagtttccactgacagaatttgggttcccagcacagaattggatagttttcaaagaacaggccgataggtgtatgagtggtaaaaatgcaggctgaggggtaggcagccccgaagtgggtggtaagccctcaaggtcgggggtgtgctccaagcctccccacgcccactccggcatcttgaggcctacgtggatcatgagaccctccccaagtgtggctcagaggtggaatgttcaggtttgggcacagcctccataggacaaggcagtaatggccccgcccagcactgaccccacgagcgcccccagttccatgatgagtcccagtgctccgacaggccatgtcagcataaagatataaggggtgcagagcaggagattcttcacctcccccaagctgggggcatcygagatggggccaaagggtacgtggaatccaagcctgaaggctggggaaggggcttggtggggggcacagcacagcaaaggcaaggaggtcaggacctgcagaggcggcagagggagctcctggcatgtgacccaggccattctcctattcccccagctggggccccccacattgcccacttcacggagccccttgtggaagccaccatcatggtgtatgcaaccatcacctcccagctgctgcccactccagccaagtcccactacaccttcaacctgagggacctctccaaggtcttccaaggcatgctcatggctgacccggccaaggtcgaggtgaggaccaggcaggcaccctccccagtgcccacactgctctccgcatcctccccagccccaccaatttcaggccttcctgcccaaacaggccctgagtggggcttcctggaacatggaggtgccaggccctccagagcccagccttggtgcagctgagcccagtcttgttagttgaacccacacctggaatggtggctgagacggggatcacatgagagagccagggcaagacgagggagaaagagggcttctggtttgggccctgcatgtgagaacgcttgagggacagtgagcagggtgccctctgggaaccaaaaaccccaggtggaaggagggggaagtgtagcagggagccaggtgtcaggggcactggcaggggtgggtccaggcactaggcacggtggggggccaacatggagcttaaatttgttctgagggtgtaatgagccgtgtgggtgggcgggggacagacctgcactttggaatgggactgagcggccagtgtgtgtgtagcccaggctaaggagatggggtgagcaggacagaagctgaccctggccttgtagccacgcttgtagccaacaaagtctacagaaaaggctgggagcttccggagggcagtcctgccacccagggagatgcagggaagctgggacagaggcggcagctgagatggagagagggggcaggttcagaggagattggtgggtcatgtcagtgtggcttggtgggtggttagatgtggggtgttgggaaagtgttaggagcatcaagcatccctcccaggtttggggttaggggagcgacagggggctaaaaggtggaagtgaggtgcttgtgacaagctagcagagccagacacccagagggyacttggccagctggactcggagctgaggcatgaggaggcccaggcagcactgtgcaatccaccccatcctcagccagccagcagttgcacttgccagcagcccccacacactgtccctgggccatggtgggagagccaggctccagtcagggccccaggaactggggcccaccctcccttgcctggtggtttgagagatagctgagggcttgggggccaaggacaggcaccgatgctggggctactgcaggaccaagtgcagctgctgcgactgtggtatcacgagaactgccgcgtgttccgggaccgactggtgaaygaggaggaccgcagctggttcgaccagctcctcaagcgctgcatggagcagtgggaggtgaccttcaacaaggtctgccccttccagcccattctttacggggacttcatgtcaccaggctccgatgtcaagtcctacgagctcatcaccagtgagagtaaggtgaggggcccaggcaggcgccctgcccctggtggggtcctcttcaatctgcctccctggggcccaggccccctgcagtcaccactaacagactaccacactataaccagggggccaggacrcggggtaagacagccagctccaggagactcccggcatgcccttgctctctctgggtaccggtttcttcacttatctctgaaaaccagcctgtggtccagctgagatgggctctagacacaggggcaatcatccctccacaaggggccgggggcggggcctggggccatgggtctcagtcaggaccccagggaggcagggaagaggcctcacttggtggccccagtgctgcatggctgaagcaggcctcctgacagtttctctccacacgcatcctctcctaattccaagagctcccaccagggtcacagggtcagcacaccctggtaagccccagaaggagcaggcagggctctgacccaactctcaggcctccatgtgtccctgggtcaggcctcgtgcaggggggcctggcttcttaaggcccagcgtccccaccatgcacaggaggaacagggtatgctgtggcaggtgagctccccgtcagggagggccccagtacacggtgctctgatcagccgagcccatgattggagtcgccccaaaagtgacagcaagcaagttcctacaagggactgcccccaagccatccctagattgggctggttgagattccaaagaaagaagcattgaattacagggtaattagtccagagcatttattaggggaactcacatacaggggagagcagagatgttctagctcagtatgtgtgcaacaagggagtcatatgagttatggagttcacatgaggactgaaggatttgggtgggctggggctagcttctatgtgtttaacaatatgcttgatccccccgtgggttttatttttgcttttgtttttgtttgtgtgtgtgtgtatgtgactgggtcttgctccatcacctaggctggagggcagtggcatgaacttggcttactgcagcctctacctcatgggctctatcagtcgtcccacctcagcgtcctgagtagctgggaccacaggcacgcaccaccacgcccagctaatttttatttttattttttattttttggtagaggcagagtttcgccatgttgcccaggctggtgttgaactcctgggctcaagtgatcctcccgccttggcttcccacagtgctgggattacaggcgtgagccaccgcgctaggccaatccctcagtgttttgagcaacaatctaagcaagtttatcagtgtctgggaatgttcagcttgggctcgagcctgcaggggaaacatgcagctggccgggtcacaggtggtcaaggcacctgtgcttctcagtcaggacagagaagaaagcgggtgggtggggggaatcggggagaccctacagtaagagagaccccgccttccccatcctcgccttggtgcacagatgatgcaggtgatagaggagtacatagaggactacaaccagatcaacacggccaagctgaagctggtcctcttcatggacrccatgagccacatctgtcgcatcagccgcaccctacgccaggcgctgggcaatgcactcctgctgggcgtgggtggcagcggccgcagctccctcacaaggctcgcctcgcacatgtgagcgcctccrgggcgtgctgggcagtgggcggccagggctggctggtcggtttgactgacccatgcttttgcacagtggtagaggcctcgggcaaccctgaagtaggcccgtgcagcctacaggcttctggaaagactagtagcaggatctgggctccagggagaggcagcagcagtgcctgtggtgctgtagggagggaagtgtggtgcaggcatcccagagggattactaggggaggtggccagggctgctctcagaatcagagctgggaggatggaagggaagggcatttggactgagggaacaacttgggcaaaggtctgaaggcaaaaaagcaggttcagggcctgaagggtctgcaggtctgcccaggatgggagcagaattccaggtggtcagggtagggtgtggtcacccaccacccttcagcgtctggccccaagtccctggcatgcttcaacccaaacttctgcctccagggccgagtacgagtgcttccagattgaactatccaagaactacggcatgtccgagtggcgagatgatgtgaagaaggtcctgctcaaggcgggcctacagaacctacccatcaccttcctcttctcagacacccaggtgccactgccacagcagagggcagggctcgggggggctggacacaaccccatctgagcatagcatcccggaaggtggccagtccttcatgcccagctcacagtcagggcagatctcagaagagaccaccaggaccaggtggggccacagatgggcaggttgagagcatgagaccaaacccaacctctcagagctaaggtggggtatagatcatcactcatgccccgaaggtaaagaaggccctggtagcatagcaccccactcactggccaatggtgtcccacctcaaggaccacagggcttgtccccaaagtgctagggacccatggcttccctgctccctcttgggatggcatgaggcttctccctagatctctgagaggttgtctagggtcacacgacagaacaggcttcaacctggctggtggtcagggttgggcccaggggcccagcctgaagcccctgaatgtgccccatcctagacaaaggcccctctgctcccagccctgtcccaaccccagagctcccttcaaggcagccactgtgagtcaggaaagggaggatgccatctaacacaagccaggcccaggctgtatgagatgggcaaggacctatctctgcccgtggccatggtttcctcttgtgagtaaactgagacatggagaggggcgaagaggaagatgccacaacccccagtgaggacccagtgtcctgccacaacccagtggttttcagagcttctacatgggggcaagtcctagactatgactacaggctagtctgttatgaggtcacttttgtgactctgggcttctctgagccttagtggtacagtctgtcaaatggagctgttgtgaaggtccagcgagactgtggtcatatagtccaacatgcaggggcttagctccccactccttcacccctccccagatcaagaacgaatccttcctggaagatatcaacaacgtcctaaactctggtgacattcccaatctgtatactgcggacgagcaggaccagatcgtcagcaccatgcggccctatatccaggagcagggcctacagcccaccaaggccaacctcatggctgcttacacagggcgtgtgcrcagcaacatccacrtggtgctgtgcatgaggtacaggcagctgtcgccaggctgcgcyggggcagcggagctgggtgtgtacatgggctggccccggggacactggatgccatgcgctggggcctgagatgaggagacgcggccctgggcctggccatcatgccattgggcccaggctgctgtgctgctgtgtcctggctgccatgccacagggctgtgcaagggccctgggtcctgggctcctggggtcgttggtcagtgtctctggacctcatttggattcctgactttccagccccatcggagaggtcttccgagctcgtctgaggcagtttccctccctggtcaactgctgtaccrtcgactggtttaacgagtggccggcagaagccctgaagtctgtggccaccrtgttcctcaatgagatcccagaactggaatcctcccaggaagaaatccaaggactggtgggtgtcttgctgaagctcaggcccttggggagacctgtttagcttggggcatgggctcagggtcaccaaggtctgggtgagattcccaggcccaccaccgagggtaagcttttggtcaggctgtgtttcctgtctaagcctccatttcctcatctgtaaatgcgcagagccacaggtcatcacagtgactagggtgctgcgcacacagctgcacgggtactgcttcccttattccctgagggccccatggtgctttcttccaagaaccccctgatagaactccagagatcacagatgggggtgtagatttgcctggtccagcctgagacggtgacagtcccaacatttccctaccagctgtgctgaggccttgggccctgtctccccctagatccagcctctgagggggaaccacctcagggctctcagagagaggcaggtcatgggggctgtgaaaagaccactgggccaagagctgggagacagctaggtccaagttcaaagccagcccagcccttgacagctatgtgaacttgaactaacccctggacttccctgggcctggggtttttcatctgcacaaaaggtgacctcgacctggaggtcgtgaggctcatagagtgaatgtgagaggcatggaggttcctgctgtggccccctcctcggcccaggttgcagtggctgtgggcacccagtccctgtctttcctggggcctctaccaggccggcatccatggtcttcctcccccagatccaggtctgtgtgtacatccaccagtcggtgtccaagaagtgcatcgagtacctggcagagctgacccgccacaactatgtgacccccaagagctacttggagctgcttcatattttctccatcctcatcgggcagaagaaactggagctgaaaactgccaagaaccgcatgaagagcggcctcgacaaggtgggcccaggcragtccccgtggacaaggtcagctgcctgcaggctgcctgctcactcagccctgactccagggtgacaccatgctccgcctttcaaactgcagcccacgacgttgaagtgggtggcttcccccctcatcaaaagaacaaaagttgccagtcaagggccaggccaaagcgtggcaccccacagatatttgggggactgatgcccttcctctggggtcggctgggcaatgtgggggccaccgaagctgccggccacagcttctctctcatgaatgagggcggcccagsaggccctgtgctctctctgtccctgccacacctgttttcctgtctctgccctgacccctagctgctgcrcacttctgaggatgtagccaagatgcaggaggacctggagagtatgcaccccctgctggaggaggctgccaaggacaccatgctcaccatggagcagatcaaggttggggtgctcccgagcccctccccaatgcctgactctgaggaagctcggcacccccacacaggcgcaggctcgctagctgcctggccactgcaagtcatctggcctccgtgtgccccagcttcctcaatcagtagccatccattttgtcatggaatgtttgcccagtagctcttctatgccaggcactgcactgggcagggggtcggtgaggagcaaggcagaggaatctgaacgattccaataaccacaacccggagtctgcccagcacagggccccatgttggagggcccgatcctcatggcagaccttgcagtttgtgtattccttatgacagctttctggaaggaatagtcaagtgtcctgctcggcaaagtcagtgcattgcaaaacttcccagtagatagaaagaagctagaagaaaggcaggaggagggtctttctctgtcttgcatgaaggtgcctgcaggcttagggggccctgcctgtggggcacttacatccaaacttgtaaggccccaagccacacgccaggcccatggtgagcactcaggaggtggaaggggctcctggtattcccagacctctctggcctgtcacagctggagggcccttggagaacagggcaccccaactctccttccatctggggagactaagatgcagagaagagaaaaggggggaggacatccctatgtctcccatccccaggtggatacggccatcgccgaggagacccggaattcagtgcagacagaggagatcaaagccaatgagaaggccaagaaggcacaagctattgctgacgatgcccagaaggacctggacgaggcgttgccagccctggatgcggctctggccagcctgcgcaacctcaacaagaacgatgtgaccgaggtgggcagcagggcatctcctggcattccctctcatatgcctctgtcctcaarccttccctctgcacatcccctgggacccagcagcctgccccaccctcctcattccagcccccagggcccaagtaggagcatgggcacctgggttggggaacagaaggaactgtgggctgaggccaacctcggtggatctctggatatgcccgtgtcctgtggtagtagagacttggttggtagggccaacctttctggcagggtccctgccgaggggkgcccactgggtctgagtcttccccacttggtggctgggcctgcaggtacgtgccatgcagcggccacccccgggtgtgaaactggtcatagaagctgtgtgcattatgaaaggcatcaagcccaagaaggtgcctggagaaaagccaggcaccaaggtggatgactactgggagcctggcaaggggctgctgcaggacccgggccacttccttgagagcctcttcaagtttgacaaggtaagcatgccaggcaccctggccagccagcragtgaggacaaggcccgcccggcaggacagtgaagctggagaggagcttgccccaccacatcatctgcatgtgcagtggcctctgtcctgtctctctctgtccacctccacaccaccagcaccacacaagggcccgagggccacacagatggctggaaccagagcctggccccaaggggttctcagtctggtagggtgacagacccacccacagaaaggtattgaggaaattgggacctggacaggctcctgtgccccataggaagtcacccatggtcattccaagtctccacagcctggggattctctttcatgccctttcatcccagaaacccccaggccttggccaagaccttcaccatctgcccagtcatcccctctctccctcagccttagcacctggggcccagcttccctgtctgtctctgggtttctctgtccatctggggccatcagtatccttgggcacgtggtctctcgggggctgtgccatggttaagtagcctggagctcataacctctttgggggtttcctctgcatcccagaaattagctagggggcagctgcctgtcccacacaggccaccatccactgtgtgtcagtatcaggccctgggcacatcccacacccatttaagcagcatctggaccccttatgggctaccccattcctccttctcctcttccatcagacaggaaactagaggccccacaggcctaatcaagtccctctgagagaagcgcccaagtcaggagtgctcaaggctggtgcttaggctcccctgggcccaagctctgacccctgggagctcgtgagcaatgcaaatacctgggcctattatgaactacagggctggactctccctgggtgggacaagagccccagggggtggggtaggcccttgaggttaaacatgagcctggtgggcctcagaaccattcactcatcccaatacctgctgatggtcttgctttcaggaagtagcccttgcctttaaatgagcttttaagtggggtcttgtgtgttatgtgctcttgagactgccgcagtgtcccaaggaagacctccctaatcatatgatctaaaatcctggggaccaaagattaccttctggccagcctttctgggctatgttgttccttaaggagaaagaatctgtactgaggcctgcacagggcataaaagccagggtgtccctcagcaggccccacatcccagcagagcccttcccctgtcacccttgagaagcagcctcttgagacccaggcttcccacctcaggacaacattggggatgtggtgatcaaagccatccagccrtacatcgataatgaagagttccagccagccaccattgccaaggtgtccaaggcttgcacctccatctgccagtgggtgygcgccatgcacaagtaccactttgtggccaaggccgtggagcccaagcgggtgagggctgagtggagctggtgggggagggctcccctcccgggggtacttggcgagctaatcctgcgccctccgccccacagcaagccctgctggaggcccaggatgacctgggggtgacacagaggatcctggatgaggcaaaacagcgccttcgtgaggtggaggacggcatcgccacaatgcaggctaagtaccgggaatgcattaccaagaaggaggagctggagctgaagtgtgagcagtgtgagcagcggctgggccgagctggcaaggtgcgcaccctcctcctgcaaggcctgcaagcgggcccggcccagacaggggccagaaaggaccagggcgccggtgggtcctggggtggctgtccacaccccctccctggcaaccccaggtgccacagtgggtagggccagccccaggcccctagcccagcctcccagagcccaccccacggggctgcccctccagctcatcaacgggctgtcggatgagaaggtgcgctggcaggagacggtggagaacctgcagtacatgctcaacaacawctccggcgatgtcctggtggccgctggctttgtggcctacctgggccccttcacggtaagaagtccccacctctgtctctgaccagcctcgccttcccaaagagacccttcccccttgaggcctcgcctccatgataggcagcctgcaggtggctctccgctcactcagtcattcaacaagcacttagcaggctccctctctgagccaggcgctgtaaagcactggggatacagcagtgtacaaaacagccagaaaagccacctagtgggaacatagaagagctcacacttctgcacttgctgcatgccaggcactgttctaaacatgccacctgtgtcccatttaatcctcatagccgccattacaggcaggcatcgttagctttgcccgtttcacagatgaagggctgaggtttgtggaggccaagaaagtcacccgaagtgggattagaatgcaggtatctggctccatgtctgagctcagatctctgcaactgccaagcactgtggcttagtgggagttgggaggtctctgtgagtgtcatggtggggtggtcctgagtctggcatctccccagggccagtaccgcacggtgctctacgacagctgggtcaagcagctcaggagccacaatgtcccacacacctccgagcccacgctaatcgggacgctggggaaccctgtgaagatccgatcgtggcaggtgcccaccccaggggcaggagtgcccaggcagggcctgtggtgtggtccaggctgggccaggagccttctgcctccttcctaccytgctttccagggcctggctcggagctgcctctgctgaaccctcctgtgcccagcaagagggtggtaggaggacaggaggagaaagctgggctgagtgtggcacagatgctagctaaatgtggggagagggattaggggtacttttaagagtgtgatggaccaggcgtggtggctcacgcctgtaatcccagcattttgggaggccaaggtgggtggatcacctgaggtcaggagttagagaccagcttggccaacatggtgaaaccccctctctactaaaactacaaaaattagcctggtgtaggggcacacacctgtaagcctgtaatcccagctactcaggaggctgaggcaggagaattggcttgaacccaggaggcgggggttgcagtgagcagagattgcgccactgcactccagcctgggtgacagagcgagactccgtctcaaaagagaaaaaaaaagagtgttgggtggaggttgagaaacagtgtccacagtagggtttagaagggttgtctggtcagatgcagtgtaatcccagcactttgggaggccaaggcaagtggattgcttgagcccagaagtttgagactagtctgggcaacatggcaaaaccccgtctctactaaaaattcaaaaattaaccaggcatggtcgtgcatgcctgtagtcccagcttctcaggaggctgagatgggaggatcacctgaacccaggaggtggaggctccagtgagccaagatcatgccattgccaaaaaagaaaagaaaagaaagctttcctaaaggaagtatctgagtgagactctgaagggcagggagagttggcaaagagaggtaaccaagaggccataggcagaggccaggcgtgggcagaggccaggagggtcagtggggtatgggctctatgaagatggtctcatcaagtgagcactcagtaggcaagaggacaaaaaggcacagcgaaggagggcctttctgtctgtgggtttctctgtccatctggggccatcagtgtccttgggcctgtgctctctcaggggctgtgccatggttaggtatccagcccaggagcgagggagaggcgggagtcctgggggtgaggcattgcctacattgtcacctgcccccaacctccaaggggatgcagtaaggagagggaagtccatagccgaaacacgaggccgggagatgctgatgccctcagtgaccctgcttgcaggaaagctctgacccagtccagtgcctggctctccacagatygctggcctccccaacgacacactgtcagtggagaacggggtcatcaaccagttttcccagcgctggacccacttcattgaccctcagagccaggccaacaaatggatcaagaacatggtgagcccacccaccaggcaccaccaccccaccccagccaggcatagcaagggcagtggtgagccgcagagcctcaggctggctctcagtccctgcaacccyttcttttccccttcccttacaggagaaggacaatgggctggatgtgttcaagttgagtgaccgygacttcctgcgcagcatggagaacgccatccgctttggcaagccatgtctcctggagaacgtgggcgaggagctagacccagccctggagccagtgctgctcaagcaggtgggtctgcagtggtgatggcagggtggcagtaggcctggacagggcagtccccttcccctgccccactggtgatgctcaggccacagtacccaccggtcccacccaccacagacgtacaagcagcagggaaacacggtgctgaagctgggggacacggtgatcccctaccatgaggacttcaggatgtacatcaccaccaagctgcccaacccacactacacgcccgagatctccaccaaactcaccctcatcaacttcaccctgtcgcccaggtgagcccccactcttggggacgcccaagcatcagctctgcctctgcctgcccagctgctcctctcccacccccaggccgggagtcagtgggactttcccccactcaaagtctccaccagtttcaccccaggcactcacattcgaagcctttctagcacttccaccagctcctcctacccactactgtttccacctaagaaccttcatccccacctcatccagatccctggtcagggtccccagcctctgtgtctagcaccagcctcacctcctccagggaccccttctctcctactgagccctcgccaggccctgtgccctcatcctcagagctgacccagagccctgagtcgggcacactctggctctttgaatccaaatgccctgcttcttatccttgctgccacgagcctgggcactgtggttttcgctggccatccatacacagcccacagcccataggcctgctttgtgctaaggcctccatttcagtggtcagtgtgaacctctccacaaagcagggggcaaaaacaccctgaaggcctgccctgggtatcacagcccccacttgccaaggaggtattgtccagagaccccagccgctcacacatccaactgctcagccccttctaggattccaggctgccacccaaggtctcactgagaactgatgtctttgaaggcaggctctgcactagccctgcagcctgagatggaggctaggcctcctaggccaacactggcaaggatgctgggctcttggagccccagaagcacaggtggatgggtgaccaggttcacgactagccctccggggcccaccaggtattacagacttggtgtcccctgcccccggcagtggcctagaggaccagctactgggccaggtagtggcagaggagcgacccgacctggaggaggccaagaaccagctgattatcagtaatgccaagatgcgccaggagctgaaggacattgaggaccagatcctgtaccggctcagctcctccgagggcaaccctgtagatgacatggaactcatcaaggtgctggaagcctccaagatgaaggctgctgagatccaggtcagctgctgcctgcccacccacctgccccgggagtgccccgggcctgccccccacctctccctgcctgccctaggcctgccccccaaaccccctaccttctgctctttgacccctccccccacccactacacccacaggccaaagtcaggattgcagagcagacggagaaggacatygacctgacgcgcatggagtacatacccgtggccatccgcacccagatcctcttcttctgtgtgtccgacctggccaacgtggaccccatgtaccagtactcccttgagtggtttctcaacatcttcctctcgggcatcgccaactcagagagagcaggtagcaccggcatgccaggctcctaccctgcacagatatgacccatgtggacacatttccactgtggggcacacacaaactcacaactgtgttcactggcgtacactctcctcttagactcacaatacataagaatgcacacagcacgcctaccctcctccgagccccttcactgggaacaccaagtgcccaagaggaggcccaggctgcccctacggctgctggggagactggctaggctgggctggaccccggggctcttccttcctctcacctctccgcgctgccatcacttctccactccacagacaacctgaagaagcgcatctccaacatcaaccgctacctgacctacagcctctacagcaacgtctgccgcagcctctttgagaagcacaagctgatgtttgccttcctgctgtgtgttcgcatcatgatgaacgagggcaaaatcaaccaggtgctggcagagacacccaggacagactgcctgaggggtggccctgtggcagggcctgagaacagggtggaaggaaagggaaagccaggcatgaaggcaccgcgagagcaaagtggcagaggaaacaattccttgattaaaagcagccagggccgggcacggtgactcatgcctgcaatcccagcactttgggaggccgaggcagatggatcacttgaggccaggagttcaagaccaccctggtctctactaaaaatacaaaaattagctgggtgtggtggtgcacgcctgtaatcccagctactcaggaggctgaggcaggagaatcgcttgaacccagaaggtggaggttgcagtgggctgagatcgtgccactgcactccagcctggaagacagagcgatattctgtctcaaaataaataaataaaagcagccagaagaccctgggttaattgtgctccaaccaatggctcaaggttcaagaaggccaatgttgtgagcacaggccttctcgagccttgagtgtgctggtgagcacaaagactgtccccagggacggactgtcctgagcctcccacacctgcttggccaggaactcacactctcatgaagccctatgcatttcgtggtgcagcggaaagccctgccgagacagtgagagtgacagccaccactgtcagagccctaactgcgtgccyggcacaggactctggcctgggaagcagtcagccttctgattctttctactcccaaatgaggaggcagaggcccagagaagtcacatctcttgccctaagggcacacagccaggaaaaggcagggtgggaacactaacccagacctgtttgactaccatccccaagggagactcagtttctccaggtgagggtggttagagaggcactactgggtgggggtrcccagagcaggaggagctggccagggcctgggcatcagcctcctcctgtcccctgccagagtgagtggcgatacctcctgtctgggggctccatctcgatcatgactgagaatccggcaccggactggctgtcagaccgggcttggcgagacatcctagcactctcgaacctgccaaccttttcctccttctcttccgacttcgtgaagcacctctcagaattccgggtcatcttcgacagccttgagccccaccggttagctgggccccagaatatggcaggatgagcccatcgaggggatgagtccctaggaaaggcttgtctgggcgccttctctaaggggccacccagggttgccctgtggctgtggccacatctcctctgtgcctccagtgccatacccctgggatagcccactctccccagctgtccggctggccgaatccctggggccaccaacctccttccaacaggctggctctcagggaggtgtgggccactgttgcagggagcctttgcctggcatctgggaccagtacctagaccagttccagaagctgctagtmctccgctgcctgcgtggggacaaggttaccaacrccatgcaggactttgtggccaccaacctggagccacgcttcattgaaccccaggcaagtgctggaaccctggcaggactggcaccttgagcttgtccccaccctgggtcccagggccctggctgcatctggatagactacttggccaggccaggacccctgcttgctccctaaaggctctgaggttccagcccccaccaggaagcccactggggaccactctgagaaccccagatccccctcccttgccccgatctctctgcagccccaggtggtctcagcatctccccctgcccttgcagacagccaatctgtcagtggtgttcaaagactccaactccaccacacccctcatctttgtgctgtcacccggcacagaccctgctgccgacctctacaagtttgccgaagaaatgaagttctccaaaaagctctctgccatctccctgggccaggggcaggtcagggctaggcagggaggaagggagtgggctggggggtgkgcaagctggcccccygctcagtgctcttgcccctgcagggccctcgggcagaagccatgatgcgcagctccatagagaggggcaaatgggtcttcttccagaactgccacctggcaccaagctggatgccagccctagaaygcctcatcgagcacatcaaccccgacaaggtgtgttgccctgcccatcacagacccagyggggccgcctctgcatccatcagggactaatgaggcagaaataagagaatcatgccaagcactctgcccagcctctagcaygtggcaagtgctcagcaactgacatgtgccacacatcgacatcattaatcctctcaatccacccccacccccagttacctgtacaagcggtgatgtgacttgtccagggacacccagcacagaccgtgacctgggacttgccaaagcccttttttttttttttttttcagacggagtctcactctgtcaccggggctggggtgcagtggtgcaatctcggttcactgcaacctccacctcctgagttcaagcgattcttctgcctcagcctcccgagtagctggtagtaacccgccactatgcccagctaattttttgtatttttagtggagatggcatttcaccatgttggccaggctgttctcaaactcctgacctcgtgattcgcctgccttggccttccaaagtgctgggattacagacgtgagccaccgcgcccagccaaaagcccaattcttaaccagttgtctgtgcagcctcgcctgacccacctcagggtccctgggcaggagggagcctggtgtcagggyggccaccagatatgggtctcaatgctcacgtggagccatggccaccaggtacacagggacttccgcctctggctcaccagcctgcccagcaacaagttcccagtgtccatcctgcagaacggctccaagatgaccattgagccgccacgcggtgtcagggccaacctgctgaagtcctatagtagccttgrtgaagacttcctcaactcctgccacaaggtgaggcacacttggtgcaggcctaccctacctgcccccgtccccgctcctcacctcccctgcctcccacctcccccaggtgatggagttcaagtctctgctgctgtctctgtgcttgttccatgggaacgccctggagcgccrtaagtttgggcccctgggcttcaacatcccctatgagttcacggatggagatctgcgcatctgcatcagccagctcaagatgttcctggacgaatatgatgacatcccctacaaggtgggcctggggcagactggggcctgggggactgggcacttaggggagccctcacccacccaccccataggtcctcaagtacacggcaggggagatcaattacgggggccgtgtcactgatgactgggaccggcgctgcatcatgaacatcttggaggacttctacaaccctgacgtrctctcccctgagcacagctacagcgcctcgggcatctaccaccagatcccgcctacctacgacctccacgtgagtccagcccaaagggctgcacaggaggggcctgccagcctggggttctggggtaccatgagcaccttggtgctgggtgggaggagatgcagcccccaccctccatcagctgtcttttcatcagtcaatccatcccatcccacaaagacagccttggcgagggagtcagaccctgcccactggggcttgcctctgtgagtgaactcctggtcagccactccctgggtggaattactcagtgaaggcttggggcagctcctccaaggcagtaaccaggcccagactccacagtcagggagggctgccacagaaatgatgcttcccctaagatgtgtgaggagaagccatgagccagggctgggttgtgtgggtcatcagtgcaaagggcctgtggcaggagggagcctgacaaatttgggccactgaatagaggggcagggaatggatggcagtaacaaggaggctgggagggaagcaagggccacaccacacagtgcctcagaggcctggagtcccaagagcagggacatgcataagggttatgagcaggagtgacaagtggggaatgtgacaagtggggatgtgctccattggagggtaactctgarggctggggcagagcaagccaggggcttccatgttggcytcctctctcctagggctacctctcctacatcaagagcctcccactcaatgatatgcctgagatctttggcctgcatgacaatgccaacatcacctttgcccagaacgagacgttcgccctcctgggcaccatcatccagctgcaacccaaatcatcttctgcaggcagccagggccgggaggaggtgggtggtgtcagagtaaggggcccaagggctggacgggctgggcttcaccatcctgcccactcccctgtgggaaggacccctatgcatgtggaatcccacaggggataagggggcccagccttgaccccacagtattyctttgcccctgcagatagtggaggacgtcacccaaaacattctgctcaaggtgcctgagcctatcaacttgcaatgggtgatggccaagtacccagtgctgtatgaggaatcaatgaacacagtactagtacaagaggtcattaggtaatcaccccgccatacccctgccccgagtcagcrgccactggactgtagagaaatgacaacaggggttactatgggccaggtgccatgccaagtgctacacatcctctaactcagctattttttgttgttgttgttgacacggagtctctctctgttgccatgctggagtgcagcggtatgatctcagctcactgcaacctccacctcccgggttcaagcgattctcctgcctcagcttcctgaatagctgggactataggcgcacaccacctaattagcgcgcccagctaatttttgtatttttaatagagacggggtttcaccatgttggccaggatggtctcgatctcctgacctcatgatccgcctgcctcggcctcccaaagtgctgggattacaggcatgagccaccgcacctggccaactcagccatatttttattattcacattttgtagacgagtaaactgtgaccccaaaatgttccgtaagctatccaagtccaacttcacacatgtgctaagggccagagctgggatttgtacccaggccacctgacccagctctctgctcttagcctctatgttttgccattgtttttcactctgtggccttgagctgcggagcatagctactgccacgtgaccccagcccactacctattctcttgccactggcctcacaggtacaatcggctgctgcaggtgatcacacagacactgcaagacctactcaaggcactcaaggggctggtagtgatgtcctctcagctggagctgatggctgccagcctgtacaacaatactgtgcctgagctctggagtgccaaggcctacccatcgctcaagcctctgtcatcatgggtcatggacctgctgcaacgcctggactttctgcaggcctggatccaagatggcatcccagctgtcttctggatcagtggattcttcttcccccaggctttcttaacwggcactctgcagaattttgcccgcaaatttgtcatctccattgacaccatctcctttgatttcaaggtctgggcacagccagggccaggtcaggtgacaggctagggtacagcccagggaggagaggctctgaggccacggttggttggcagttgggggacccctaagccagggcatggaaagacccaagccagaagaggccatgagtcccaggaacgggtctgggctgggtccatcagaaatccacaggggcagggcacaraccacaggccatgggctaaagtggtaggtacgtgatgatgggcaggcaggcagcattaggcagctctctcagaagggagttttgtgcctcctaacccagattctgggtattgttatgtgtgtggggtgtrtctgtgtctacccacaggtgatgtttgaggcaccatcagagttaacacaaagaccccaagtagggtgctatatccatggattattcctggaaggtgcccgctgggatccagaggccttccagctggctgagtctcagcccaaggagctgtacacagagatggccgttatctggctcttgccaacacccaaccgcaaggcccaggaccaggacttttacctgtgccccatctacaagacactgactcgtgctggtatgaggcctgggatgggagcctacactatgggcggggacccaggactaacccagcccagcccaagccagtcacttatccaggttagctgaacaaggaaggacaacagagatttgggccaggccagcaagcagcaggcaggttaatgcccaagrcctgccgtctggctgtggggagcacccctgaactcctatcctgcatgcctccctcagcaggcccaccttgggccccaagagcctacaagccccagcctgtcattgggagttcagaggggtaactgaggcccagggcaggaacttgtttggactaggtccatcagagaatgaaaagtggcatcaactctgccatccctatcttcagtccccaatacagtaaccctgggcaggcttgaaccctggccagaccccctcatcaggtaggcttcctcttgggtcagggccccctccctgtcctcagcttagtctgcccactgccctgcccctacgctatccctgctagtagtaatagggcatgacctaacccgtccccctccttgcccattccaggaacactatcaaccacaggacactctaccaactatgtcattgctgtggagatccccacccatcagccccagcgacactggataaagcgtggtgtggccctcatctgtgccctggactactagactcagacagaasggctggggccattaaagctgaattttctaagcagtccagctgtgccttagctgcttgcatgaggacccctctgcaggactcactgccagggggctggtgaggggctgcagcagcctcagcagacgatgcagtcggcagaggagagcgggacagaggcggcagctttgacctgctttacctgtccaaaagcaacaaggaagagatgcccagcgccctcccagggagaacacaccaggcgagattagattagaggcagccccgcctctttgacccacagtcccagcacctctccaggctgcaaagccacagatttggtgaaagccatggccctctccccagaaagtgcaccctgtctacagtccacctgaagtccctcctcagctcaggtcctaaatcccaggcctaggattccaaggatctctggcccaagacagctggacactcaaggatcatatacttcttacctttctggtcccagggccctaggcccatgaggtctagtaaggcccagcctccatatctcaggccagcaaccacaggagggttcatttctcaggagattcttaggagagttttattcattcattgatccagtatttacaggggctagaggggtcaagctgtgctcagcccagaggcagctgccacacttgccagcaccccccactcagtcactatgtacagataaaggggcctgcttggatcacctttttcaaagccatctggcagaggccatggggctgtgttggggcctgggctccagaggcactgctgggcccattaccccttggcatcaggtcctctggaacacaggggctccaacgggttgtcttgatcctgctgtcccccaccctgagtgccttgcagaggctgaggaaactggagtagcaggaagagctgagtggtgccagcttcctataagcaaccctgtctctgctacccctgagagggagacatggtaatactgaggggctggacagaggctcttctgagcctcaagcgccagggacagagacctagagcccaatttaggcccatagctagggccacaacactgaaggcgaagagccctagaaccttgctatggagagcagtcttgaacagcctggctagaacaaggaagacagttcacaggccactgaacagttcccacatgctctgctcaggccatgggatcccagcagcctgctcaccccaaccccactgggacaccctactcccaacccagcccagtgctgggtccctgagtttggcactctcctaagaggaatgaagagagaagacctggcttccttacaacagggacaggctggtggctggggctagagcagcagggcccagagcccagggcccacccaggcccccagctaggaccctgtagttgggaccgtggcatgatacaaggacctgggcccaccaggacagctcctaggagagaaagcatagtcaggtaggaacttatgtcaacatggtggcatgttgggttggagcccagaaaaatagatgtctctgataggtaaaatatatattctgctgcccaggcagaagggccaggtcctgctgctccacagccggctgtggaggaagctgcagtacctcgctgtgccccaactccagatgctgcctcctgagcactatggggctgatctgccgtgtcaggcctcagggcacgatggaaggaatgtggcctggttcctcccattcccagggcctggactctccagctgggactattcagtaatactgggaaaaggggaagtggggcagggaaggaccctggtgagggccacacggcaagagtgggctgcagagtcagggccagcagtcctcactggcgcttggccttgtaggggcgagagcgtttccgccggtcaggcttccgctgcttgtggagccggccgatgctgaccccttggcgccgccgcacggagatgttctgctccactaggttggccagcatgcctgcgaagaggtagagacccttgagcaggtgctggctgcctcaggccaggagctgaggctctcatggccctccctgtgccccaaggtctgctcaagcctcaggagaggccaggggaggggagctgaaggacacggccctcagcagggcattccagttaagacagcagcgcatcccctcaccttcctgagccagcatggagataaaggtgcagatgaactcatcgtagttgtgggtccttctctggtcatcaatctgtaggagagaagaagactgagagcactggagccaatcttgccagagcagccaccagtggacctcgggagaggccagatcaggcaactggagaaatcacccaccttgaacttcttcctcttctctacctcctccttgaggcacgcctcatagtttgcaatctcagcctccacacacttcagcagtgccagcagctcctgccaaaacccagcattgcacctctgatcggggcgggccagcaacaaagccccacgagcaataggcagctagaggcaaggatgagcagcgagtccatgcctatcaaggcccctgccaccacccaacccagaaagtcttctggcacatggctccagccaccaatcttcacaccaaagttccaatcaagaacttggcacctgggcaggaggagctcaggccttaccctctgccaggattaaaggagaaaaccacaacggaggctcaccttgggtgagtatttctccccactcaagggctcgccaggcctcaccatccccgtcttctctctgctgtccgtggcttccacgacctccttctccactgggctgctggacccctggctgccttggattggtctgatggagggcgaggaacccttcccaccctctgggaagagaggtcacaagaaaatcatcagagtgcaggacactttgtggtcacttggccacttccctcctccctcctgggtgcaccaagtggccagtgagccagtccaaggcccacctgtcagcgccaggggactcagcaccccatcctcagccaggtgcagcaggcctgtgctgatgacaggacccagatcacggacagcacggttgtagcgtatgcagtcaacacgcagcaggctgtcatcctctccaaaaagcaccttggagatgtgggaggtgacagggctggagggccgcgtcgggttggctgagcggataggcgagcgcagtggcgagttgaaagcactgccgatctcagaggccgtgtctgtactctcattgctgggggtgggtgagggctgcgagtgtgtgggcactgccacagccggactcccagccccgctgctagtcttgatggacagaggaattgagaggtccttctgggactctttgagcttctcagccaagacgttgatggtgttgggctgcagcactgacagttgcccatcagcagaaccgctcaatgcccctggcttccctgttcccttccccttatacctgtggggcccgagaagatgtgaagcaagggaacgggccaggtgaccatacccagcagtacccagaatggcttaaatacatcccgacctccaggggctgaccctaaaactccttatacttggtccaagcaacttgaactagccatgctaagcctggcatcaagttctgacagctgcagccaagtgtcctcaaaagacacttcctctattccagccatcccactcctggccttttgccaatgccctgtgttccagcaaagctgcctccccaccacccacatctcctccatccctgccccaaccaatccttcaaggcctggctaaaaggccacttccaataggacatgatataagcttacgtgctcagccttaccccccagcccaccaaaaacttcctggggacctggggtcagccccatcatgccagcctcccccagggccccaaactccgcaggtgctcaacattatctgctgcagggcattctcagacacagactgagatattcaggatgggatccgaagcacctagaacctggtagccttagaaagctgggctgacctaagggcagagttggtgttctgcacgtcatcctcctcgtcatcctcatagtcatcctcatcatctgagtactgctggggtgggcggactggaactcggctgcggcccacacctgccgccaggtcttcttcctcctgggacaaagaccagggcagttacaaacaagtgctgctcggcccaggctgagcctagacactcacagccagagagaaagccaacatggttttccagactgagtcagcggaacccctccagctgttccatggcctgtccttggcttgtggggaggctgccacccacttacactggatagaaccccacggaggggttttaagagaaacagagtgccctgaaacacatgcctttattttgccagtaaaacccaacccatgaagttgtaccaaggagcgtgacctaaacatttaatcccacagccacgtaactagattaaattcaaaggagctctccctgcctccctaagctcctgctgttgtgggggccttttcatatcaggcagaggaacctagcaacccaggcccaggcagcttgacccagccatgccaaggatgaacaccaaggaaccacatgggaaaattgcctgttgcagcctctcaagagaatcaagtagagaatcctgcaagggtgctcccagcttacctgcatgggggacttggcataattgtgattgtctagaaaggccggcagccgctggacaatgggagtggggttggggtgaaccccattgaggctgctgcctggaggcttcaccactagcttgggtttgttgggagggctgtgggatggggcttgtgcgcatgaaccagccgcctcctctgcaccatctgagacagggcaagaacacaggcaggacctccagtaggatctccaagaaaagctcacagtctccccggccctgtgaaccagcacttcccagagaagaacagcccagccagctggtgcaatgggagtcagcaagctctaagtcatgatcccgcaatgagacagggcaaagaatgagatgggaaaaaagaagcaggaagaaaaaaaaaaaaaaaaaaaaaaaaaaaaaccgcctctagagaaaacaagaaagggagtgtacattacagagaagggcccaggggcctgtggtaacagcggccctttacaggtgcctttctttagggaaggactgctctccctctaccttctgacgggggaagaacactgcccaaggacatccccagaaaaagactttccctgtttaggcctcccatgtcagacattagcgggtggctctgaggtccacaagaggtcccaaaccccccagtacctgtgtggttgccctcagaggctgcaggggccctgtttgcttccagcaccagcggggacttgttgctggctgacttggactcctcaggcagctgtgactcttgagacttgtgggtctgaatcagctctggctgtgttactcttatcagctaacaacagaatccagggctcagaggagaaagggtagacccgggcttctaccttaaatagctaagggctgaggacctaaaggaataatggccttggctctacccattcactcacagggaaataaaacacccaaacccaaacttccttttagaagctattctccctccccactccaagtcccacctttcccacaatgggggcaaagaaaagatgtggttagctgaagcccagatctacaagagagtatgttcacgaatcagagacaaatgctgtgggggaagggaggaggaatgcagggagggttgggctgggcagaggccaggaagaaagggcacctacctgctgcagagcctctagtactgtctgacggttcaccttcagcacatgcagcctggcctcatacttgatcctgcggtcgggcaccactgccatcaggttgaagcggatgtcgtggtagggctccctgcagtcacagccgcagccgtgagagcagctcccgccccggccccgccatcaggttgaggcagatatcctggcagggctccctgcagtcacacctgcagctgtaggtataggccccaccccaact

SEQ ID NO: 96544 - DNA, 33535 bp, Homo sapiens
  misc_feature (1)...(33535): n = A,T,C or G
agccttaaagtacttacaaaaagagcaagcccatctttttctcctcgctctccttctcataggaaaaaggcacataggataaacaggagccatctctcatatttcgtacccaaaaggacttaatccagggcaacaaaatcttaagttcgataattaaggcatattcctacaaaggaaaaggacaaaggccctagtgggcaaaaactctatctcaatcctgactcaaaaggttacctacaccctctctgaaacgaatttgcataagaactgttgtttatgaaaatgcatcttgatggggcaactgggttgttatgaaatactcagaaacccagcccagctctagaactcactcctgagtgcaaaggcaatgtcaggcacgctggtaaaggaccactagaatccagcagcccagacccctttctttgtggtcaagaagggcaggaaaacaggtgcaggactgctacatcggtgagtgtaactaatctgataannnnnnnnnnnnnnnnnnnnnnnnnnnnnnnnnnnnnnnnnnnnnnnnnnnnnnnnnnnnnnnnnnnnnnnnnnnnnnnnnnnnnnnnnnnnnnnnnnnnnnnnnnnnnnnnnnnnnnnnnnnnnnnnnnnnnnnnnnnnnnnnnnnnnnnnnnnnnnnnnnnnnnnnnnnnnnnnnnnnnnnnnnnnnnnnnnnnnnnnnnnnnnnnnnnnnnnnnnnnnnnnnnnnnnnnnnnnnnnnnnnnnnnnnnnnnnnnnnnnnnnnnnnnnnnnnnnnnnnnnnnnnnnnnnnnnnnnnnnnnnnnnnnnnnnnnnnnnnnnnnnnnnnnnnnnnnnnnnnnnnnnnnnnnnnnnnnnnnnnnnnnnnnnnnnnnnnnnnnnnnnnnnnnnnnnnnnnnnnnnnnnnnnnnnnnnnnnnnnnnnnnnnnnnnnnnnnnnnnnnnnnnnnnnnnnnnnnnnnnnnnnnnnnnnnnnnnnnnnnnnnnnnnnnnnnnnnnnnnnnnnnnnnnnnnnnnnnnnnnnnnnnnnnnnnnnnnnnnnnnnnnnnnnnnnnnnnnnnnnnnnnnnnnnnnnnnnnnnnnnnnnnnnnnnnnnnnnnnnnnnnnnnnnnnnnnnnnnnnnnnnnnnnnnnnnnnnnnnnnnnnnnnnnnnnnnnnnnnnnnnnnnnnnnnnnnnnnnnnnnnnnnnnnnnnnnnnnnnnnnnnnnnnnnnnnnnnnnnnnnnnnnnnnnnnnnnnnnnnnnnnnnnnnnnnnnnnnnnnnnnnnnnnnnnnnnnnnnnnnnnnnnnnnnnnnnnnnnnnnnnnnnnnnnnnnnnnnnnnnnnnnnnnnnnnnnnnnnnnnnnnnnnnnnnnnnnnnnnnnnnnnnnnnnnnnnnnnnnnnnnnnnnnnnnnnnnnnnnnnnnnnnnnnnnnnnnnnnnnnnnnnnnnnnnnnnnnnnnnnnnnnnnnnnnnnnnnnnnnnnnnnnnnnnnnnnnnnnnnnnnnnnnnnnnnnnnnnnnnnnnnnnnnnnnnnnnnnnnnnnnnnnnnnnnnnnnnnnnnnnnnnnnnnnnnnnnnnnnnnnnnnnnnnnnnnnnnnnnnnnnnnnnnnnnnnnnnnnnnnnnnnnnnnnnnnnnnnnnnnnnnnnnnnnnnnnnnnnnnnnnnnnnnnnnnnnnnnnnnnnnnnnnnnnnnnnnnnnnnnnnnnnnnnnnnnnnnnnnnnnnnnnnnnnnnnnnnnnnnnnnnnnnnnnnnnnnnnnnnnnnnnnnnnnnnnnnnnnnnnnnnnnnnnnnnnnnnnnnnnnnnnnnnnnnnnnnnnnnnnnnnnnnnnnnnnnnnnnnnnnnnnnnnnnnnnnnnnnnnnnnnnnnnnnnnnnnnnnnnnnnnnnnnnnnnnnnnnnnnnnnnnnnnnnnnnnnnnnnnnnnnnnnnnnnnnnnnnnnnnnnnnnnnnnnnnnnnnnnnnnnnnnnnnnnnnnnnnnnnnnnnnnnnnnnnnnnnnnnnnnnnnnnnnnnnnnnnnnnnnnnnnnnnnnnnnnnnnnnnnnnnnnnnnnnnnnnnnnnnnnnnnnnnnnnnnnnnnnnnnnnnnnnnnnnnnnnnnnnnnnnnnnnnnnnnnnnnnnnnnnnnnnnnnnnnnnnnnnnnnnnnnnnnnnnnnnnnnnnnnnnnnnnnnnnnnnnnnnnnnnnnnnnnnnnnnnnnnnnnnnnnnnnnnnnnnnnnnnnnnnnnnnnnnnnnnnnnnnnnnnnnnnnnnnnnnnnnnnnnnnnnnnnnnnnnnnnnnnnnnnnnnnnnnnnnnnnnnnnnnnnnnnnnnnnnnnnnnnnnnnnnnnnnnnnnnnnnnnnnnnnnnnnnnnnnnnnnnnnnnnnnnnnnnnnnnnnnnnnnnnnnnnnnnnnnnnnnnnnnnnnnnnnnnnnnnnnnnnnnnnnnnnnnnnnnnnnnnnnnnnnnnnnnnnnnnnnnnnnnnnnnnnnnnnnnnnnnnnnnnnnnnnnnnnnnnnnnnnnnnnnnnnnnnnnnnnnnnnnnnnnnnnnnnnnnnnnnnnnnnnnnnnnnnnnnnnnnnnnnnnnnnnnnnnnnnnnnnnnnnnnnnnnnnnnnnnnnnnnnnnnnnnnnnnnnnnnnnnnnnnnnnnnnnnnnnnnnnnnnnnnnnnnnnnnnnnnnnnnnnnnnnnnnnnnnnnnnnnnnnnnnnnnnnnnnnnnnnnnnnnnnnnnnnnnnnnnnnnnnnnnnnnnnnnnnnnnnnnnnnnnnnnnnnnnnnnnnnnnnnnnnnnnnnnnnnncggcttcccggaatattgaagccccatcttataggagtttttctaaaggaaaccccactttcagccccacacccatatgcccctgaacttcagaccatacatttcaatccctgtatctttaacctccttgttaagtttgtctcttccagaatcaaagctgtaaaactacaaatgttcttcaaatggagccccagatgcagtccctgactaagatctaccagggatccttggaccggcctgctagcccatgctgtgatattgatgacatcgaaggcacccctccctaggaaatctcaactgcacgacccctactatgccccagttgagcaggaagcagttagagcagttgtcagccaatccccccaacagcacttgggttttcctgttgagagcggggactgagagacaggactagctggatttcttttttttttttttttttttttctttgagacggagtctcgctctgtcgcccaggccggactgcggactgcagtggcgcaatctcggctcactgcaagctccgcttcccgggttcacgccattctcctgcctcagcctcccgagtagctgggactacaggcgcccgccaccgcgcccggctaattttttgtatttttagtagagacggggtttcaccttattagccaggatggtctcgatctcctgacctcatgatccacccgcctcggcctcccaaagtgctgggattacaggcgtgagccaccgcgcccggcctgagctggatttcttaggctgactaagaatttgtaagcctagctagggaaggtgaacgcacccacgtttaaacaggggcttgtaactcagctcaagcccgaccaatcaggtagtaaagagggctcactaaaatacaaaataggctaaaagcaggaggtaaagaaatagtcaaatcatatatcgcctgagaacacaggggagggacaatgatcgggatataaacccaggcattcaagcagggagtggcaaccccctttgggtctcttcccatcatatgggagctctgtttccactctattaaatcttgcaactgaaaaacaaaaagacagttttgctctgtctcccaagctagagtgcagtggcgcgatctcggcttactgcaacctctgcctcttgggttcaagcgattctcatgcctcagcctcatgagtagctgggattacaggcacgcaccaccacgcccagctaatttttgcatttttagtagagacagggtctcaccatgttggccaagccggtctcgaactcctagcctcaagcgatccgcctgcctcagcttcccaaagtgctgagattacaggcttgagccacagtacccagcctattaaaatttctgatggaaaattttacatgtaacttaaaaatatatataagcaggcaccaaatttagagggattaaaagcaaaaattctgaagaccaccatggtagacactgtggttgatcagagcagtgctgagaaaatacacttgacctcccagaactatgtggcatgtccccagttaaggccattcatttaggacttagacctgaggaatttatgataaccaataacttctgaacttctgctttaaaaaatgttagcgttttgagaaatttttgttcaaatggtagaacaagctatcatttaagggaaatgagcactctatctccagatttctcagctctgctaaataagactgaacttggaggattccatataaggtaattttctactttaaaaccctgtgagtcaggccaaatcagtggcttacacctgtaatcccaatgctttgggaggccaagcaagagggtcacttgaggctaggcgttcaaggctgcagtgagctgtgattatgccactgtacttcagcctgggcaacagagaaagaccttgtctctaaagaaataaaaataaatagaacctctataagtcaatatagaaataatctaaagcagatgcttcaataaagtgaacacttttgacttgataaaataactgcacatgcagatgtggtactttataatattgtgtcaatatctgaagccgtcttgaatgtaataattataatgcaaattaaaatgtaggaattcaaaaattgtctatgacatatgtctaaaatggtaggttcagctttggcaagaacagctagatttgggagtagtactggacagtacatatcaccctcagaaatttgaaatatgaactcacaagatttaggcattacagaatttagagttgaaagaaatagatttgagtcatatctacacttcctaatttcaaagctcactctcttctactgccaggcattggaaccttgaaaagacaaataagctttgccttccttcctagttcattatgaacaaactatcaacaaaaaccatcctgttcagccagtttctcagagcaaccatgggagtcacagcaggtaaagtggacttcttaatttgcaaacttttaagggttgtattatttattacttggtttttttctcaggggaggccttgggtagaaattacctcgatatagaatgaaaaatgtttgcctggaaaatgtgtaggatgaagagaatagaaaccagtaattaaaatatcaattggtatgtactataataatttcaataatgcaagtaagctgttggtaaatatactatggttttcctttcagtaattttactggatactaagtattaacaccaagtaacaacattagggaagattacaagtaaaggagtgaggttttggtgttttgtcccttcttgtttcttattgcctgttgacttacacatgttgttgagtgactgctcttcagaaatggggtcctgctatgttgcccaggctggtctcgaactcctgggctcaagtgatcctcctgccttggcctcccaaaatgctgggattacaggcatgagccaccatgcctggctacttttaaatattttattggaaaactcttagtatttattctttcccttggcaagcattctttactaactctttttctggcatcttctaaaattctgtttttaagatttttttttcaaatgtccaaagattttagggaaatgaattaaacaattgagttgcatcagacacaattcattccaaatgacctgaggaaagaacaaagtatttagacttcatttcctggtcagtgagggatctctgtgagaacttgtacttcgcatagatgtttgtcctacatcaaaagttgcatatttccacagttcttctgtcaccatgaaggggatctgctcagacgccatccttgttctagctacctccatgtggatggcctttgcaattggtgagttatgtgtccttgctctgcccacattttctgcagtaaatctagaatcatgggaagattagagatggaagtggaagtgctgttcagttttatttaatcctaatttctcatgttacaaatgtagaaattaaaacccagagaaaggattcatacaatgttgctactatcaaagctgggatttgaatccaaaccatccaagtccaggaacattgaacttcccaaaatgccaggttactacctaagatatttaaacctcagaaatgtacatttctagagtttgtatatttacatatctcaaatcaaaaaaagaaactcattagactatgtggaagtagactcagatattattctggttaatggcgggttttagcaaaagtcatgcttatagttaacagtagggaatctctgaaggcctcaacatgttgtttttctattcgatttctgcaactctttcctacttgtcttcaatctcttactttccattggtacggcgtctcacttaaaacatttttttcaaggctctcacatcttaggagagttctgtaacaagctgaaaactatttttcatgactctcatatcttacgtaaaaaacaaataagcctggtccctctcctccccttccctctccaatttaatcatctgttgacaaatctaggtatatttctacacttcctcacctttcattcaatcctcacccccactgctactgagcatatcagccattggcatcagcctccctgcaagcctgctgtgttcccttctggctgagtctcatcctctgtcgggaacacaccataactcaaccaaagtggaccactccatctttcttgcaaatcaccctttccttgttcttgtagttgtatggccttatatttttgcctcaaacctatttctcccctgtatgcccataaccagtgactaagttcggttgatagaacacttcatatatcatgtaaattcatgcttttccacatttccacaacagtgacttcctcagtgaaggttctcatcatttcatgaaaatatttttatattctccttaaccgttccctttgcctctaacttgacttactctaacccatgtaccactgctacaatagttgtcatttttagtgcaaatcttatcttagttctgctgtaataaacacaaagcctttgtgatgtggcccttactactatgctgggtttcccagcacccatttatttacatatccaataaatatatactgtgtgttgaccttatgccagtaactgggctagacatgggttatgtgtcaggagtggtacctgaacacaccagtggtggaagatatatagatatcatagttcatacctaatattaacacactttttttttttttttgagacagagtcttgctgttacccaggctggagtgcagtggtgtgatctcagctcactgcaacctccacctcctgggttcaagcgagtttcccacctcagcccccaaagtggctggaactatatgcatgtgccaccatgcctggctaaattttttttatttttagtagagacatggtttgactatgttggccagggtggtctcgaacacctgacctcgaatgatccatccggcttggcctcctaaagtgctgagattacaggcatgagccacctcacccggccacaccttttttttttttcttgagacagagtctccctcagccacccaggatggagtgcagtggcaccatctcagatcactgcaaccactgcctcccaagttcaagcgattctcccatctcagccttccaagtagctaggattacaggcatctgccatcatgcccagctaatttttgtattttagtagagacagggtttcaccatgttggtcaggctggtcttgaactcctgacctcaggtgacctgccagccttggcctcacaaagtgctgggattacaggcrtgagccaccgcgcccrgccagaccacacattttgataaatgtttcaaaaggtaggaacagcaagaatgtgtagaacttaagccactgcctatctttccccttcccttcccagcgcagtgtgagggaagatctactctggacagatatggccaagatgagtttttcttctctccctaagcttacagggggcaatggtatatctccctcagaaggacacgtcgtcaacatttttcattccccccatacctttgtgttgctgaggctaaattccaggaaagtgagtcccagaggcagggtcctcttttttcccacccatctcctacttgtgagactgaggctccatcccaggtgaggcagactgagagtagtggggccctgatggccctcaccctagcttaggtcagcccagtgtctcaaaaaaaaaaaaagaaaagaaaagaaaggacggttgggcatggtggctcatgcctgtaatcccagcactttgggaggccaaggcgggcagatcacctgaggtcgggagtttgagaccagcctgaccaacttggagaaaccccatctctactaaacatacaaaagttagccagccatggtggtgcatgcctgtaatcccagcctcccatctcaggaggctgaagcaggagaatcacttgaacctgggaggcagaggttgcagtgagctgagttcgcaccattgcactccagcttgggtgacaagagtgaaactcactctcaaaaaaaaaaaaaaaaattagccaggcatggtggtgcagacctatagtcccagctactggggaggctgaggcaggagaagcacttgaactagggaggtggaggttgcagtgagccaagaatgtaccattgcactacagcctgggcaacagagtgagccgctgtctcaaaaaaaaaaaaaattacaacgttacattaaaaaaatacttacttacttagtgcaacacaaaccagtgaaggaggacttgagaaaaaaggagacatacacaaaacaaaaagtaaaatggcaggtgtaagtcaatccaactatatcaataaaaaaattaaatgcgaatgaattacacaatccaatcaaaaggcataaactgtcagactgaacaaaaaaaaaccaacatccaactatatgctttatatggagatactccttagattcaaaaacacaaataagctgaaagtaaaatgatgagaaaaatatatcatgcaaactgcaaccataaaaagttggaatggctatactaatatcagacaaaatatacttcaaaacaaaaatgttactacaaatgaagagagacatgttatgataaagggtcagtctatcaggaagataaaacaattatgaacatatatgcacctaaaaataaagccccaaatatatgaagcaaaactaacagaattgaagggagaaattgataatacaacaataatggttggagacatcacctcaaactttcaataatggctaaaacaactagacagaagaccaataaggaaatagaagactagaacaacactattaaccaactagacccaacagacatctacagactacaccatccaacaacatcagaatacacatactgctcaggtgcacatgcagtgttctccaggataggccatatcctagatcataaaacaagcctcaataaatctaaaaggattgaaatcatgtaaagtaatttttctactatatagaaatgtttatttgaatgtattctatatgttctttatgttagagaacatatagaaatgtaatatatttgataatagcacaaagggggtgagtgggagcaacgttgctctcaccactactatttaacattgtactggaggttcaagccagggtaattaggcaagagaaaatgaataaaagttatccagataggattggaagaagtaaaatgatctctgtttgtagatgacataattttgtgaatagaaagtcctaaggaatactctaaaaactgttagtgttaatagcaagtttgcagaatacaagagcaatatacaaaaatcatttgtatatctatacactactaatgaacatcctgaaaatgaaattaagaaaacaatttcacttacaatagcatcaaaaataataaaatacctaaggataatttaccaaaggaggtgaaagacttgcacactgaaaactacaaaacattgatgaaagaaattaaagaagacctaaaccaacataaagatatcccatcttcatggattggaagacttaacattgttaagatggcaatattctagaaatcaatctacagattccatgcaaatcctatcaaaaccacagctggcttttttgcagaaatggaaaagctgattctaaaattcatatggaaaagcaaaagactgacaatagacaaaatagacctcaaaaaaaaaaaaaaaagttgaagtactcacacttttcaatttcaaagcttactacaaagttacagacatcaagacagtttggtactagcatgagaatagaaatacaggtcaatgtttcagtcatacgttttatgaaaaagaaaaagaaatacagatcaataaaatataagagtccaggggaaaaacaccttacatttggagtgaattgattttaacaagstctgaagacaattcagtggacaataatctttttaaacaaatgctgctaggacaactggatatctatatacaaaagaataaatgtggaccttttcctcacaccatggacacaaattataatgcctcaacatggatcacagaactaaatgtaagagctaaaattataaaactattagaagaaaacaatatgagtgaatttcgtgaccttgaattaggcaaagccttcttaacgatggcaccaaaggcagaaaggaacaacaaaaacaaaaagatcaattggacttttaaaaacttttgtgattcaaatgataccaataaagataccaatatggccaggagtggtggctcatgcctgtaatcccagaactttaggaggctgaggcgggcagatcacctgaggtactgaaaatacaaaaattagctgggtgtggtggtgcacacctgtaatcccagctactcgggtggctgagtcacgaaaattgcttgaacctgggaggtggaggttgtagtaagcagagatcacgccactgcactccagcctatgtgacagagcgaaactctgtctcaaaaaacaaaacaaaacaaacaaaaacaacagagataccacttcacacctactaggatggctataagaaaaaagaaagatagtaacaaatgttagcaaagatgtgaagaaattgaagccatcgtgccttgctgatgggaatgtaaaatgcagctgctttggaaaatagcctggcaagtccttaaaaggttggaatatgactggcaattccacactttgtatatacttaagggaaataaaaacacatgcccacacaaaaatgtgtgcataaatattcatagcagctttattcataatagcaaaaaagtgaaagcaactcaaatgtccattaactgattaatggataaataaaatgtggaatatacatacattgaatattatttagttataaaaaagaatgaagtactgatacaagctacaatatagttagaacattaaaacacagacacaaaaaaccatatacttcgttgcatgactccatttatatgaaatgtccagaaaagcaaatctacagaaacagaaagtagaggctgggcttgatggctcatgcctgtaatcccagaaatttaagaggctgaggtgggcatatcacctaaggtcaggagttcgagaccagcctggacaacacggtgaaaccccgtctctactaaaaatacaaaaattagctgggcatggtggcatgcacctgtaatcccagctatttggaaggctgagacaggagaatcacttgaacccaggaggccgaggttgcagtgagctgagatcgcgccactgcactccagcttaggcgacagaccaagattctgtctaaaaaaaaaaaacaaaaagaaacagaaagtggattattgtttttcaggggcgagggtggggcaggaggggaaatagttggaagaggggcatgataaatgactgctaatggttacagggtttctttttgaggtgatgatggcataactgtgaatatactaaaaaccatcaaactgtaaactttaggtgaattatttaaaaagaaaaaaatcctctatatgatggtaaaaattggtaaattcagctgggcatggtggcttacatctgtaatcccagcactttaggaggctgagtgggagaattgcttaagcccaggaattccagaccagcctgtacaacgtagtgagacctcagctccaccaaaaaatcaagtaaaataagttggtcatagtggtgcatgcctgtagtcccagccacttgggaggctgaggtaggaggattacttgagcccaggtagttgaggcttcagtgagctgatatcgtgtcaatgcactccagcctgggtgacagagcaagactctgtctgaaaactttttttttttttagacggagtcttgctctttcacccacgctgaagtgtaatggtgcgatcttggctcactgcaacctccacctcctgggttcaagtcattctcctccctcaacatcccaagtagctgggactacaggcatgcaccaccatgcctggctaatttttgtatttttagtagagacagggtttcaccatgttggccaggcaggtcaaagcattttttaaaaatctggtaaaattctatgatatgtgaattatacccaagaaagctgatatatatgagagttgataacatattatacatattatatactataaaattatatcatgtgattataatatatacttatataaaattttatatacatatgtaattgcaaagactgctttgaattgaatatgtaagccttaatgaaactcagcatcttttagggcatctcaatataatgaattcatggtaatttgtaacttagagcatgtttactaaaaaaaactgacaaggattacagaagttgttacttatgaaatggaagggctagaattaagaactccattttacaagaaggtaaaggcacgtatttcctgattctttgctcctttagagggcagcttgcatcaaagaggagcccagcctcttctgatggggtttgatgcttcctgtgtgccaactagggttcccctcatcttacctttttcgctgagggcagaagacagagaagcaacttttctgtaygtgcttttgtcttccagacttcccccttcctatggcctctgaaagaggtcagctagacaaaacaatagtgagtactgcttccttggttcctaataacaggaatggggagagagccagtttgcccaaaagccccagctctttcttctgggaggtgggcagtggagggggcttgcatgggaataacagaacaataaaagctgagtcaccaagtatgtgtagcacattttatatgttcctgagccctcttctcaagggttctcccaatcagtttacataactcacctgtggggtagaaagcaagtattttgcaccaataaatggatgaggatgtcgtggcacaaattcaggtaggtcctatgccacagtggatactgtttccaccatgatatgccaggcataccccctgcctccctcacaccaaggccctatgaggtatttcctccatctccttcctttggtgccttcaacctgctgtgacaagtttcagcccctgccatctgaggcaccacatatgataatgttcatcagaattttttttttttttgagacggagtcttgctctgttgcccaggctggagtgcagtggcgcgatctcagctcactgcaacctctgcctcctgggttcaagtgattcttctgcctcagcctcccgagtagcttggactacaggtacgtgccaccacacccagctaatttttgtatttttagtagagatggggtttcaccatgttggccaggctggtctcaaactcctgaccttatggtctgcccacctcggcctcccaaagtgctgggagtgcaggcgtgagccgccatgcctggcccttcatcagaaattttaacctggaaagacatttccctacttctgctctctgtaacctaccaatcacattttggggttggtacaaaaatatgattgttaggttacagagggcagggatttttatctttttttttttttggagacggagtcttgctctgtcgcccaggctggagtgcagtggcgcgatctcggctcactgcaagctccgcctcccaggttcacatcattctcctgcctcagcctccccagcagctgggactacaggcgcccaccaccacgcccggctaattttttgtatttttagtagagatggggtttaccgtggtctcgatctcctgacctcgtgatccacccacctcggactcccaaagtgctgggattacaggcatgagccaccgcgcccggccggtatttttatcttaataaagaatttatgggagtctggagagtgcacagattatatattattttgcaattatatacatattgtgggtggtaactgttggggtcaaacactgaggcttctgaatccttttctctgaactcctgatctggtgctcgtattccatccacctcccaagctatacataataacggccaaaggacctggatgaaagtgtctgaagcagttgtgtgtgtctcaccttcaggttgaatgcctcaagaatgtaaataagtgctggtttttatcctacatcaagcccagtgaacctatttgtggcagtgaccaggttacctacagtagtgactgccatctgtgctccaacattctgtaagtcctaattttgttctccctttctttcaagtcaagaggttaagagtggtcaaaagagggtgatgacctcagcccacttcctacatcatccaatgagaccttctctccagacattcctccaatatttgttcctccctttcttccattcctttctgtgacctcaaaaggtacatgtgatcctattcagacaatgcagaaacagaaatccactaaggtgagggcactgtgtgtgacctggacaagcctcaagtggaggcactcagaaacaagcagccatagcatgtagatcatgtgaccctacatgaaggtcatcctcatgccccctcaggccaaagaacagaaacaaagaacaaaaagaagaggaagaggaagctgggtgaagaatcttcccagctaatagtttattggtcctaaaatggatattattttccaaaacaactttcttttgctttcaacttagtatgtggtttagtctctgcacccatcacatgttagaagctttgagtaacacacaagtgaaacgcccaattgtttagcccaaggggaatagtgaggagcaggggtttgtatgaaggaaactccgtatacagttaggaggattctctgacatctgccttctcctttaaggagaaaagccacacccttgtctaactaaggcttacaagttgagtgctatcttaagagagaaaagcaaaaacacaagagtagatcagaattaagtctctctccccttcctcttcttagcttctcctccagagaaggaataagaatcttcttgatcaggatgagagatatttggctgggcaggatcggactttcttgtattcttggctgaataaacactaaagcttacactagaacccatacgagagttgtaaggtaaacaactttggtgtcagcctcaatcactggcacagacgctgacacctgacaatcagaaagcatcatctggggaatgcgcagcatgacagagtcaaacgatgctggaaccaggagacatctgagagatggcctctaaagagctccctttcagtgtatcttagaaattattctagctgggcgcagtggctcacgcctgtaatcccagcactttgggaggccgaggtgggcggatcacctgaggtcaggagttcgagaccagcctggccaatatgatgaaatcccgtctctactaaaaatacaaaaattagccgggtgtggtggtgcatgcctgtaatcccagctactcaggaggatgaggcagaagaatccctcgaacccaggaggcggaggttgcagtgagctgagattgcatcactgcactccagcctgggagataaagcaagactccgtctcaaaaaaaaagaaattattctcttagcagttgcactggatattacaagttaaattctaatttataccaatctaatttggattaataccaacttaattacaaaaattttaaaaaatatttttgcctggaggggtggctcaagcctgtaatcccaacactttgggaagctgaggcagaaggattgcttgagcctagggatttgagacatgagcaacatagcgagaccctgactctacaaaaaaaaattaaaaaattagccaggcatggtggcacctgcctgtagtcctagctacttggaagtcaggatgattgcttgagcccaggagttcaaggctgcagtgagccatgatcgtgccactgcactctagcctgggcaacagagcaaagttcttttgagacgggcagatcaggaggtcaggagatagagaccatcctggctaacatggtgaaaccccatnnnnnnnnnnnnnnnnnnnnnnnnnnnnnnnnnnnnnnnnnnnnnnnnnnnnnnnnnnnnnnnnnnnnnnnnnnnnnnnnnnnnnnnnnnnnnnnnnnnnnnnnnnnnnnnnnnnnnnnnnnnnnnnnnnnnnnnnnnnnnnnnnnnnnnnnnnnnnnnnnnnnnnnnnnnnnnnnnnnnnnnnnnnnnnnnnnnnnnnnnnnnnnnnnnnnnnnnnnnnnnnnnnnnnnnnnnnnnnnnnnnnnnnnnnnnnnnnnnnnnnnnnnnnnnnnnnnnnnnnnnnnnnnnnnnnnnnnnnnnnnnnnnnnnnnnnnnnnnnnnnnnnnnnnnnnnnnnnnnnnnnnnnnnnnnnnnnnnnnnnnnnnnnnnnnnnnnnnnnnnnnnnnnnnnnnnnnnnnnnnnnnnnnnnnnnnnnnnnnnnnnnnnnnnnnnnnnnnnnnnnnnnnnnnnnnnnnnnnnnnnnnnnnnnnnnnnnnnnnnnnnnnnnnnnnnnnnnnnnnnnnnnnnnnnnnnnnnnnnnnnnnnnnnnnnnnnnnnnnnnnnnnnnnnnnnnnnnnnnnnnnnnnnnnnnnnnnnnnnnnnnnnnnnnnnnnnnnnnnnnnnnnnnnnnnnnnnnnnnnnnnnnnnnnnnnnnnnnnnnnnnnnnnnnnnnnnnnnnnnnnnnnnnnnnnnnnnnnnnnnnnnnnnnnnnnnnnnnnnnnnnnnnnnnnnnnnnnnnnnnnnnnnnnnnnnnnnnnnnnnnnnnnnnnnnnnnnnnnnnnnnnnnnnnnnnnnnnnnnnnnnnnnnnnnnnnnnnnnnnnnnnnnnnnnnnnnnnnnnnnnnnnnnnnnnnnnnnnnnnnnnnnnnnnnnnnnnnnnnnnnnnnnnnnnnnnnnnnnnnnnnnnnnnnnnnnnnnnnnnnnnnnnnnnnnnnnnnnnnnnnnnnnnnnnnnnnnnnnnnnnnnnnnnnnnnnnnnnnnnnnnnnnnnnnnnnnnnnnnnnnnnnnnnnnnnnnnnnnnnnnnnnnnnnnnnnnnnnnnnnnnnnnnnnnnnnnnnnnnnnnnnnnnnnnnnnnnnnnnnnnnnnnnnnnnnnnnnnnnnnnnnnnnnnnnnnnnnnnnnnnnnnnnnnnnnnnnnnnnnnnnnnnnnnnnnnnnnnnnnnnnnnnnnnnnnnnnnnnnnnnnnnnnnnnnnnnnnnnnnnnnnnnnnnnnnnnnngcaacttgtggtgcaataacccgcccgtttttgggctaaagaaaaccctctttgcctttgtcttttggcaattttataatgatttgtctatgtgtggctctattagaatgcatcctattgtaagttttttgaacttactggatgaagtttttcatcaaacttggggaatttcagccattatttttccaagtattctcctctccttgagggattccctttatgtatatgttgatgcccttgacagtgtcccacacttctctgtggctatattcatttttttcccaatttgaattgagttttatcttattggttatgtgaggcattttaacccattttgttcttttttcttcataattatttttctttcttttcctcaaactggttactattcattggtctatcttcaagcacatttgactctttcttctgtctgctcaaatcttatatgagcccctccagggaatttttcattctaggtcattgtaattttcaactttagaatttttattcaggttcttggaaaattttttctgtctctttattgatattcgctatttggtgagacatcattctcatacttgcctttagttctttgttctttacatacagtttccttcagttcttttttttttttttttttttttttttgagatggagtcttactctgttacccaggctggagtgcagtggcatgatctcggctcactgcaacctctgcctcctggattcaagcaactatcctatctcagcctcccaagtagctgggattacaggcttgtgccatcaagccccactaatttttgtagttttagtaaagacaggatttcaccatgttggtcaggctggtcttgaactcctgaccacaagtgatccacctgcctcagcctcccaaagtgttaggattacaggagtgagccaccacacccggcccagttctttaaacataagtaaaatagctgatttaaaatgtcttgtaagtccaacatctgggcttcctcagtgacagattccattgactgacttttatcctatatgcgagccatactttcttttcctttgtaygtgccatgactattttgttgaaaattgaatmttttgaataatataatgtggcaactctggaaatcagattctcacctctatccaaggtttgttgctgttatttgttgttgttgccatgtgttagtttagtgacttctgaaataatcctgtaaagtatgcattttttgtcatgtatggccattgatctggtcctactcattatcttattatcagctaatgattggaaaaaaatttccttaaatggctggaaccaataaatctcccagtctttgacaacaaaaactttgtgtgtgcactgaggcatgtctctactcaaccaggcagtttaaagctacactttagtggtcactggatgtttgcacagacccacaagattagttagagatgagatgttgggactttctctggtcttttctgagcakgcagaaagccttacactggctgcaaggccttctgtatttccagtaacatgttagagcttttcaaaacctcctatggacatctcattgcctaacttacttttaagctcttggttaacctattgtttttcacaactgttacacactgtgcagcagccatgatgttaaacagttgcctctgattgttttcaacaaattttcccagggaaaaggctgtttgcaccaagagaggtttgagtatggtcaaataaaagctttgcaaatgggtctttcagagaaccacccagacaggtcaaataatgacaattctctggtaatggtgcattgaaggcattccaacaccagtcttctccctccagatgctgccaggctgctggttttcactatgattgtgggtggttgtttttcattactaccatggaactgggaatgctgcagatgggtccagagcaagataaaatgccatgaaactcactattcttactgagaagcagcaatttttcttcaatagatgttccttggattgctgcatggtttgatttttttttttttaattcccagaattctggaaaacttgattctgaccatttttgccagtgttcttgttgctttcgtggaggaaattttaaagattcttacttctccattttcactgtccaagcaaaagggctcacttttgaatgaagacactgagacctgaggggagcaacttatcaaagttcttataactataaatgggtgcaaatgcatatttttaaagattgaggtaaaattcatatgacataaaatgaaccattttaaagtgaacaaattggtagcatttagtacatttacaatgttataaaactgccacctttattactttcaaaacatttttgtcactccagaataaaacctcatgtccattaagcagttaacttcccattccctcctccccacagttcctggcaactagcaatagactttctgtttttacagatttactattctgtatatttcacataactggaattatacaacctatgatcttttgtgtctggcttctttcacttacataatcattttgaggttcatccacagtgtggcatatatcttcatttctttttgtattactgaatagttttccattatgtgtatataccacaatttttttatttattcattgaaggaaatttgggttgtttccatgtctaactattgtgaagagtgctcttatagacatttgtgtacaagtatttatttgagtacctgttttcagccttctggttatatacctaggggtggaatttgctgagttatatggtaattctgtgtttaactttttgaggaaccatcaaacttttctataggggcygaaccattttacattcttccagaaatatgagagttccaatttcttcacatccttgctagtactttttaaaaatattattatatccatccttgtgggtgtgaaaatggtatctcatcaagttttcatttacatttctctaatgactaatgaggttggacatcttcttatgtactttttggctatccatatacttttttggagaaatatctactcaagtcctttgcccatttttaaaaattgtgttgtctttatgttttagttgtaagaattctttatatattttgaatactaaatactatgattttcaaatatttctcccccgattctataggttgccttttactttcatgataatgtcctttgatgcacaaagtttttaattttgatgacatcaatttatctattttttcttttgttgttcttacgtttgctattacacccaaaaaaccactgtaaaatccaaaggcataaagatttacctctaatttttcttctaagagtttagtagttttagcccattgatcttttttttttttttgagacagagtctgactctgttcccaggctggagtgcagtggcatgatttcagctcactgcaacctctgcctcccaggttcaagcaattctcctgcctcagcctccggagtagctgggactacaggtgtgcaccaccacgcccagctaattttttgtatttttagtggagacggggtttcaccatgctggccaggctggtctcgaacttctgaccttgtgatccccctacctcggcctcccaaagtgctgggattacaggcgtgagccaccacgccyggccccattgatccatttttgaattaaattttatatatggtgtgagatagaggtctaacttttttcttttttctttttgagacagggtctcactttgtcacccaagctggagtgaagtggcacgatcttggttcactgcaacctccacctcctgggttcaagcaattctcctgcctcagcatccccagtggctgggattacaggtgcccaccaccaagcctgggtaatttttgtatttttaatagagattgggtttcaccatgttggccaggctggtctcaaattcttgacctcaggtcatctgcctgactcagcctcccaaagtgctgggattataggtatcagccaccatgcccaccctgtctaatgttattcttttgcatgtggttatccagttgtcccagctttatttgttgaagaaactatcctcttcccccattgaatggccttggtacccttgttgaaaatcaattggccatagatatatgagtttatttttggatccttgattcttttcttttgttctgtatttatatcctaataccagtaccagtaccactgattattatactttttttttttttytggagacagggtcttactgcatctcccaggttggagagcagtggtgtggtcatagctcactgcagtcttgaactcccaggccyacacaatcctcctgcctcagcctcccaagtagctgacactgcaagattattgtagtgttatagtaagtttttgaaattggacatttggagttttccaattttgtttctttttcaagatgattttggcaactcagggccctttgcaattctatatgaatttcaagattggcttttctatttccacaaaatataaaggccactggaattttgataaggatttcattgaatctgtagattgctttgggaagtattgtcatcttaaattaattcttccagtcagtgagcatgggatgtcattcatttatttaggccttctttatttattttcagcagtttcaattttgtagttttgagtgtacaagtctttcacctccaggattcttactaagtattttcttttttggatgctgttgtaaactgaattgttttcttaattttattttgaaattgttcattgctgatttatagttatagaaacacaactgatttttgtttgttaatcttgtactctgcaacttgctgaatttattagctttagtcatttttatattaattatttgggattttctacatatagaatcatatcatctttgaatagagatcattttacttcttcctttccaatttggatgccttttatttctttttcttgcctaattgctcgcctagaatttccagtccaatgttgaatctcagtggtgaaagcaggtattcatgtcttgttcctgatcttatacaggtctttcagtctttcaccattgagtacgatattagctatgggtttttcataagtgttctttatcgtgttgaagaagttctcttctattcctagttttctgggtgttttattatgaaatggtgttggattttgttgaatattatgtgtgtatgttttgaatcaattagtattatcatgcagtgtttttctgtcattctattaatgtgatattattaaattggctgatttttttttttgaaacgctctgaattcttgggataaaggccattttgtcatggtgtataatccttttaatatgtggttgtattcaatttgttggtatttttctgagaatctttgcatctgtattcacaagggatattggtctatagttttcctttatgtgatgtctttgtctgtctttgataacatggtaatgctgtcctcatagaatgaagtagcaagtgttccctcctcttgtattgtttggaagagtttaagaaagattggtaytaaatcttttaaaaatatttggtaggccaggtgcagtggctcatgcctgtaatccctgcactttgggaggccgaagcgggtggatcacctgaggtcaggagttcaagaccagcctggcctacatgatgaaacccagtctctactaaaaatacaaaaaattagctgggcctggtggcgcatgcctgtaatcccagctacttggaaggctgaggcaggagaattgcttgaacccaggaggcagaggttgcagtgagctgagatcgtgccactgcactccagcctgggcaacaagagcaaaactctgtctcaaaaaaaaaaaaaaaaawttttttttggtagaattcagtactaaagccatctggtgtttgtcgggacattttttattactgattcagtatctttacttgtcataggtctgttgagactttttatttcttattaagttttgataatttgtgtgtttctaggaatttgttcatttcatccagaatatctaatctattgacatacaattgttcatagtattctcttttaatcctttgtttctgtaaggtcagtagcgatgtttcagctttcattaaatgcatattttaactttaagacacattctttttctaatcctctgtayttctacttgaattttcaaaggctattttgaatttctgtattttattgtagactgagtatgttttmtatactcaatgtctttgacaaataaaaattcatatagtagaatttttaaatatttgccaagaattcattattagcagaatgtttatttcccaaacttagccaaagattatcaagtaaaatttagtcagaatttatgatataccatacagcaaaaataattttaaaatataatttctttcagatttgaagggcttaacataactaaactgtatgatggacaatgtgtaagtaaagacacttttattttttatttttagaagtaaactagataagttaagagctcactgttttagagggttttaaatgttttgttatgaacattttcaaacatacataaaagtagagccaataatagatcccataagcctatcatgtgtattcaataaattgtaatgttttgccacatttcctccctctattcttttatttctctgttttctttgatgaagtatattaaaacaggtctcaaacatcatgttattcactcctacatacttcagagttcctctctaataagtttggacatttccttacatactcagaaggtcttattacaactaattatttcattgtcatcttctaatacatacttcatattcaaatctccccaaccaaaaataacaccttctggaggaagaaacataatttggcctgataattcagcttaaagaacatctatttcacccttgctcttccctgtcatttccaatatctaggatattaatgaaagacactaattgaaatgtgaacagttattctgagagtgaatgggccaagactttgccgagccctagtctagagattgtgtccctgacttacnnnnnnnnnnnnnnnnnnnnnnnnnnnnnnnnnnnnnnnnnnnnnnnnnnnnnnnnnnnnnnnnnnnnnnnnnnnnnnnnnnnnnnnnnnnnnnnnnnnnnnnnnnnnnnnnnnnnnnnnnnnnnnnnnnnnnnnnnnnnnnnnnnnnnnnnnnnnnnnnnnnnnnnnnnnnnnnnnnnnnnnnnnnnnnnnnnnnnnnnnnnnnnnnnnnnnnnnnnnnnnnnnnnnnnnnnnnnnnnnnnnnnnnnnnnnnnnnnnnnnnnnnnnnnnnnnnnnnnnnnnnnnnnnnnnnnnnnnnnnnnnnnnnnnnnnnnnnnnnnnnnnnnnnnnnnnnnnnnnnnnnnnnnnnnnnnnnnnnnnnnnnnnnnnnnnnnnnnnnnnnnnnnnnnnnnnnnnnnnnnnnnnnnnnnnnnnnnnnnnnnnnnnnnnnnnnnnnnnnnnnnnnnnnnnnnnnngacggtcaattacctgaatgttctctagttccactaaagagaaatcacaagaacttttagacactttcatgatttggggtaactatgaaaagatctcacataatttctacttctgtcagattcttgctgagctgggcttactcattaaaaatcctgctaaatccctccttttayatctggacygtacctcagtctatgactcttgtcaaataaatctctggtcttatatccattttaaacttttaacttcaaaggggtggttttaaatttaaggatatctatagaatggtgttcaaagtgttctaagaatcacttatgtgccaaagtaaagactaatatttaacaggggagaagagttttagggacatgcagaaagagggattggtaaggaagatatcacatcagtataaaatgatagaattttccctaaatcagagcgatccagaaaagaattgtgcggcatccaaatacagtgagcttcctttcatcacatttggactagaaaatcccaaatcttctaggggagatccctgtatcatgttgggacctcaacagtctatttaagacaaaaatgcattttattcatttatttcaaatgtaaacattaattgtgccatggatgaaaagttaactataggagaccacctgaaaattttactgcagagcacaattctgtctctctaccaaggctctgatgaaattgttgatataattaatattgcttttataaagtaattcagaaagcttggatgccaaggatttgcagagattaagaatgcagactgggccaggcacggtggctcatgcctgtaatcccagcactttgggaggccaaggcaggcggatcacaaggtcaggagatcgagaccatcctggctaacacggtgaaacccatctctactaaaaatacaaaaaaaattagccagtcttggtggcgggcgcctgtagtcccagctacttgggaggctgaggcaggtgaatggcatgaacccgggaggtggagcttgcagtaagccaagatcacgccactgcactccagcctgggygccagagtgagactccgtctcaaaaaaaaaaaaaaaaaaaaaaaaaaaaaagaatgcagactgaagtcagaattcattgcacaaactcagtgatctagagctagtaccactgacagctttagttattcttatgtataggtagtaagcccaggtatcccaagtacagaatgtgatgtctggggaagagcgttgaagaaaaagtcacaaatctttcagttaatacctctgtgactcagctagaactcatctgtctgggttatcatgaaactcaaatgagatgtacacttgaatgaactcaaatgagatataggcttaataaagatatgtactcatatatatgagtatataattgcattaagagccaaccataatgatgaactacaatgagctattggcaccttcccctaaatcagtccttagagaatcaattggagtttgaggaaactaataattccagaagaggtggggggkgggggcagatagggagggagagagagagagtaggaagagaaagaagaaaagaagacatgaaaatggagaaagaagagggatagggaggaagaggaagtggaagaaggaagggaggaaaggaaggaaggaaagaaggaaggaaggaaggggaaagagaagggaaaggaaagggaaaagaggggaaggggaaacctgagacactcttagggagatggaaagctccatatcctccaacaggcctctgccaggaccctgcttcatgtcaactccactgcctctatcccctcaggagttcccagaggctctcctggagtccaaagtctcacccagacatccccatcctttgcctcttttccaccgactttcactctgctttttccttctccagtgaaattagaatgtctctaacctgccttaattcagagaataattgtttagcatttcccctgctgaactatggttgtgkttaccagtgtggtggcttttctcttaacttcctcaaatttgatttctctaagcagatacttctcttgcaggaaaactcttgaacgtacgacaaagaattataaaacctactgaatctccagattgccaagtgaaacacaatggttgcctcttcaaatatatcccctttaattactaatggttggatcaaactcgttgatttatgtcttcaataaatgattcttagcagaaaacctggctggcaaacatttctcttgattaataagaatctttaaaaaatatcagatattctattttctcatccccaaactacttgactcatgccatgggttccctctgttcttacacagattgtaagcaaatgaccacaaaaatctaaaatcttagtaagaaaagcaagctttctggtgtttttaacttgccctgtacccattctccctaccccaactctgctgtaggcttaaattaaaccagccttgaaatcatggtggaaaccagcctgcgaaaagacattcaaaggggaagaacaggtttggaggtccccaaaaacaccatttccagaaaatgatcgttatttgatttgcctggcagttccctagagacctcctccagctgggttgctttttggctttttgttttgttttttgttttgttttaacctgactgagagttctctcactgagaactttttccctggggcatctgtcaaaaacaaacagcctcaatttttaaaatttgcaacaaccttaagcagtgataacatttgggacaaacaaataacaacaacaaaaaaaaagtaaaagaaaaagctgagaatagaatgtccatggagcttttgaaaagctctggcatatttctaggaatctagaagaccaagagcatgagcaggtctgtaatatgtccaggagaatctttagaaggccctatgtgctcaccttggctgactttaatgctctaaatagcaagaaatgaagtctaaagcagagttgtaaactgcctgcctgaccattgaaggcatggctcaatacatacagaatacctcggcaaaggcagaaagacttattggttccaagtatttaaaaacactatgtccaatcattagatgaccactaaactaatggaacagagtcttcaatggttacacactaccaagaatacatactttaaaaaattaattgataaaaatcactacacaaatgaatagcaacaacaaacctgggggaaggggagaatctgatttccaaagttgccacattatgttgtttaaaacatccaattttcaatgaaatattgtgacacatacaaagaaacaagaaagtctggcccatacacaagaaaaaaagatcagtcaataggaattgttgccaagaaagctccaatgttggacttactagacaaagactttaaatcagcccaggcaggtgactcatggctataatcccaacactttgggggcctgaggtgaaaggatcacttgaggccaggaattcaagaccagcctggacaacatagttgtcctatctctacaaaaaaattaaaaattatcaggcatgctggcacgtgcctgtagtcctagctacttgggaagctgaggtgggaggattgattgcttgagcccaggaggtttaggctacaatgagctatgattgtgccactgcattctagcctgggtaacagcgaggccttattaaaaaaaaatacacatacatacatgtatacatattttttcaaagagataaactatgtctaaagaaataaagtataagaatgatgtgtgaacaagtagagaacatcataaagaaattatttttttaaatataactttcttgaggtgataagtacaataactaaagtgacaaattcactagagaggctcaatagcaaagttgaacaggtagaagaaagaacaagtgaacttgaagaaagattgacattaaccagtgcgaggagcagaaagaaaaaggaacagagccctggaagcctttgggatataattaagcataacaacataaagataatggtagtccaggaaggagaaggaagaaagaaaagggcagaaagatatttgaagaaataatgactgaaaatatctcaaatttttcaaagaatgttaacatatgcatccaagcaactcagcaaactccaagtaggacaaactcaaagaaatccacacctatacacatcataatctctgtcaaaagccaaagaccaagagagaattttgaaagcagcaaaagagaagcaaatcattaagtacagatgaccctcagtaagattaacatctagtttctcgtcagaaatcatggaggccagaaagcagtaggataacatattcaaagtgctaacagaaaaaaaacatcagccaagaattctatatccataaagaaaatccttcagaaatgaagaagagtggtgactcactcctgtaatcccagcacttagggaggctgaggcgggtggatcatctgaggtcagaagttcaagaccagcctggccaacacagtgaaaccctctctactaaatataattacaaaattagctgagtgtggtgttgcatgcctgtaatcccagctgcttgggaggctgaggcaggagaattgcttgaacctaggacgcagaggttgcagtgagccaagattgcaccattgcactccagtgtgggcaacaagagcaaaactccatctcaaaaaaaaaaaaaaagaaaaaaagaaaagaaaagaaaaaaaaagaaatgaaggagaaagtaagatgaccaacaaaactaataaaaaccgaaataatttgtctccagcagatccaccctgcaggaaatactaaagggaatactttaggctgaagcgaaaggacacttaaatccacaaggggaaataaagagaactggtagaggtaactacacagttaaagacagtataaatatatggttttgtttgtaaatcttttattctcctatatgatttaaaagacaattgcataaagcaatagttaataataaataataacagccaggcgcagtggctcatgcctgtaattccagcactttgggaggccgaggcgggcgatccatcgcctgaggtcaggagttcaagaccagcctggccagcatggtgaaaccccatctctactgaaaatacaaaaatcagccaggcgtggtggcaggtgcctgtaatcccagctacttaggaggctgaagcaggagaatcgcttgaacccgggaggcagaggttgcagtgagccaagatcacgccattgcactccagcctgggcaacagagcgagactctgtctcaaaataataataataaataataataacaaattatacgcttgatgatgtgtcacaggtttctgaggctctgttcctctttttctaacttgttgagatggaggcttactgaatttccagtctttcttcttttctaatatatgtattttaggctacaaatttccatctaagcaaggctttagcagtatcaatttttaaaaaattgtatctaagtacagtatacatacagaattcacataagcgtagcattgaatgaggcacctggtcagtactgtttctaagtgtttagtaaatgttttttattactactgtgaattgtcctttgcctcttatgccatagcatcctggcaatggggaggggtttgagggtgggatggtgaagagattctgggattccattttattggagcatttttttccccttgcttctcataaggtgtctgtcggggagagatctgtgtcacttattgcagtttgttgcatgctggaatgctgcagattctggaatgccatctatatcagttgtctggaatttggtttcacataaggttcttgtcttctgtttaactggtttgctgggacttctgaagtcctgatgatcatactgagaaggcagactcaggggtggcgatgctggctgtggccctcatctgctgggccatggtggttattgtgttgcttcttttgctgtgtcctagaacaggggctttactgagccacccatgtcctctgagagctttgcaacttacaaggactgttctcttccttcaggggctgggatgacttgctgatttaagcccctttgttgagatacagaggtattgtcataatgactgggacttgtgttgctcatctttgaggaagatttgtttaggcttgctgttatccaccatatcttttatttagagtagtttgctggctaactcactgggtcctttggcctactgcagattcagttgctacaactccgtcagtgattccgtgtagggagaagtaatgggttgtcatttttggagtcagggttgggggcctggggtttgagaatcagaggtcagaattcatgggttgaggtttagggatttgaggttgggattaggaggttagaagataagcatcaagggctcaggatctagagaccaggtctaggattaaaggattataaatttagggactagggcttgggttaggattggaactgagtagcagaggagttaagattagaatagggggtggtggtcaagggtctaaacaaaaagagaagagatgcaagggtctgcggagagactggaaaaactttcctcgtaagttcccaaaggtgactgggtatcaggaaactattgggaagtggcttcttattgctgcagagacagaagccatgagttggggataaaccttccaagagggcaatacctgtgtaggcagacactgaagtcagttaaatgtgcaagtaagtctttacattgatgacagttatcgtttattttcattcttctcattctcagtgatttccctcaaaaaaaaaaaaaaaaacccaagaaaccaaaacactttttttttttttaaccatctttattcaacctgtcaccaagtttctggtcacctgccacagctgacccccgatccattctccctgtccccatcctctccatacatcacagtacacaccaggaatacccccagttctcatctcctcaccctgggctgcgtcaatagactccagagtaacccaaaccacaccctgctgcccagattcctaatgacacgtgaaaggccgttatgacttgctttcctcatgccctatgcacacctgggctccagccaaggatcctccttcatcaacccccatattagctacgatccttcatgctaatgtatcgctcagagctcaaaagactttgaagggcctgtgccttcgctatcgagcgcttaagttctttgccctccgcgtacttttgacaaatactgggcatcaaccatgttccaggaactaccctgggcaaagaaaataactgggcaaggtttccatcggtgtctctgctggcgggcatcgcccccgccgggccgccaccctgaacgagcccgtccggtcctctgggttccgccaccctgcgtagcgctgcgccagcacccggcccagcactccctcccgccgagggcgcccaggccggcttccgagggcgcccaggccggcttccgaggggcggttcccacaagcgagttccggcgcccagaacggcttcatcctctcgtcccgtccgcggcaaatgcatgcgcctggcaaacccgccaccctccagggcaactcacacctcacctcacgccgcggcgcaaccggactaggaccccgagcagggctgcccagggagcgcctgaaggaccctgcgagggccgcaggctatccagcgtggcgcctggtggccgggccctgtgccggaggacaaggtgaacccgcagccggacttctgctgcactggggctccgaatgacccagaatctggggtgggcttaggccccgggtacgaggggtgagggctgcgcggttgcaggcctagagaagtagggggctgggtcgagagttgaggccgtgagcccggggggctggagggcgtggccacgggggtaggggcgcaggtcccggccgcgcgtgggtggaccagggctgggccgccgccctccaggaagcgagtggtggccccctcgagtgctggggtggcagtgtaccgacagctttactttttttttgttttggagacggagtctggttctgtcgccaggctggagtgcagtggcgcgatctcggctcactgcagcctccgcctccagagttcaagtaatgctcctgcctcagcctccctagtagctgtgactgtaggcgcgcgccgttatgcctggctaatttttttgtatttttagtagagacgggctttcaccatgttggccaggatg

SEQ ID NO: 96545 - DNA, 60416 bp, Homo sapiens
agagaggcaaaatgactcagagaaaacaatcagattcatcagtgtgaaatcatgagaaccaaaggaaaaaaaatttttttttttagtcagggtctcactctgttgcccaggctggagtgcatggtagatcatagcttactgcagcttcaaactcctgggttcaagcaatcttcccatttcagcctcccaaagtgctgggccaaaaaaaatttttaacaatatcatcttatctggtttaggaagtttacattttctttatctggtgatcttctagtcaaaggacaacccagtcaaatctaacatctcaatatcttgaattcacctccctctcctttataaagacagatcatttattcatggtaactgtggctgaagcagaaatatccaaagtaattataccactcctttacgtacttactcttttaaacaacatagtactgtattctagaaagtgatacaacaacatagttaatctacatgaatcatctcccaattttacttaaaaatatttctggttcctttattaccaaatgaagcccattctaccttcagtaatatgctgtataccaaatacacattttaacctaacagcttaaattttaagatatttccctgtttaaaaaaaaaaatcagtccaacaacttaattacttattgacttgctaagacaaatgaagatttgtattttacacacataaggaatgtttataaagcttcttttcttctctggcctatgaaattctgtatgtccatacatggtcaaatacaaagaagtcagcgacatatggaagagatccagaaaacataactgtaaactagtgccattcacaggatccaactgtatcctatcatctgcttttacaagtatcctcatgggatccatggaaaacaaattagttcaagtccaagaatttcaaacttttctaacaaatctattccaaatggtcactttcccacgcacttcccttaagcaggtcacatcaacatcttttatggcatcactcagggttctctaagattagctgcatcatctaataccaaaagaatgaatcaagggcattttcaactgtttttccctgaaaaataaataaaactaaaactatcgtctatgaatcatctatgtataattcatctattgagacctcttttggaatctgagattccagaaatccaaggtactcattttctaatactgagtgtatacagtatacaagagtattagtataccgagttttcagttttacaatctgaggaaaaaaagtcaaacaatgttgattatacagcttcatatacactaaccttttctaacttaatgtttacgtgccatttattaaggtaaattaagaagttatttaattaagcatataacattttgaagagagggttaacattttctttcaagagcttacctctacctacacttgctcaagaggtagcattacagccaaaactctgaagacattggaatggcctgagatactccacttagctcaaacacaaaaactatctatttcccttatttattggctcaaaagacaaatatcatcttaaatatttcatcgtgttccacaagaaaatgaaagaggaagtaaccaatagtagaacagttatgcctaaagaatactttcttctcatgaagacccagaactactttactaagaagaaagttgatcccaaaactctaatttggctttctattctgaacctctccactcctcatatccctgtctccttacactgagcctcaaatcccttgcccctcttaatttctactagcaacctccttcccaaaacctttatttctttccctttccaactcaaatcccattctggattaacccatctttctattcctataccataaaattcatgaccttcaacctcaacaagaatttctctgctaatattcctcttatgtgctccttaatctcatgcctctcccatttcctaataggctcttcccaagcccgtgcctgtcacaatgctcagtgaagtacctcacatcaccacttaaaaatgagaccattcccagtctgtctgaatcagcactgtaccttccatggtagagtgtgtgtgaaatttatctttttcctaaagctaatttctcaatctattctaggaaactgattaatttccattttagatttatcttgacaaccgtttacactatttcccctatatcttcaagacgaccgggcttggtaaggagccagccaactattaaaaagattacattctcattttctaactatattcaggcttcttgaatgactctgaccctgtccgtaatatggcatgttctttcctaactgggcaaaagagtttacattatcttcagctagttttcagtatataaaggaatacacctccatggttcaatcaggaaagaggacttctacaagattctactaaggatcaatctggttctcaaatgctacaggtcttctttttggtaaagaaaagatatttaacagtggtgcacaggcctgtcttaaaaatcctaccagagatattctcacctccattacccctttgttttcaagataaagagagtttccgagaagatattcaaaacagaagaggatatttttgaagtgttactttaaaggaaggtaaaatgggtttaggcaatttattttgaagctaagccaatgtaagaattctagtaaattgagggcatgtcacatctttaacagatgctcacctggggagaaaatgtctgcaatatctaaaatgtaggggattattagatttttcaaactcctataaatcagcaagaaaatgacagaaaatattaagattaccaaaacactttaatgaaatctgaacagttattgagtacaaaagacatgttcaacctcactagaaatcaaataaaataaactcaaatacctctatatctttatgcacacacaacagcaatgagtgcctaagtctactaagacatacacaagaatgttcccgttagtaaaaaactgaaaacccaaaggcttatctacaataaataataaaggatatatactgatacagtcacacaatggagtattatacgacgatgaaaaaacaactacacccaacatgagtaaataatacagacataatctgcactgaaagaaaacagatacaaaaaagtatatgtatataacgttcaagaacaggcaaatttatggagaaggcagtcagtatggtgtttatctttgggggttgtaatactgaatgagagtgagcacatggaagaaactagggttctggaaatgaactgtatattaatttggatagtggttagttttacctttcatatctaaattcataaatacttaagtgaaggtattcataacagatacccaaattaagatagttcaaagttcattttcttacttaggtttaaaatttccaatatttatcacaaaataaataagcatgtaggatcaagtttttagagtagaattttgcaggtaattttaaatctcaagccctatgaaggttactaaaaaaaaaaaaaaaaaaaaaaaaattcctaaaatggaaacattaaaaaggagaaataagatatttacttcacaaaattactcctttggggtcttgcagtatgatatgtatgagttactgctcagaatatatagactgccctactatcctgtgcactgggatgatcactaccacttcttcaaatccagctaaaagcatcacggcctcaatgaagcctactcccgccagaactgttcacgtgcctcctctctgctcgtgtcctatatattacctaagcagagctcaccaacaatatttttcattaacagcttagagcagcgctgccaaataaaaataccatgtcaatcatgtaagtaatttaaaattttcttagtagccacttttaaaataggaaaaaggtgaaatcagtcaattttatttaacccgatacatccaaaatattatcactgcagtatacaatcaatataaaaaattacggagattttcttttccatgctcagtcttagaaatctgtggtatattttatatttgcagaacatcacaattcagactacccacatttcaaagattaatagccacatgtggctacaggctgctgtactatttaataaaaagtgcatatctagagtctagccccttgctttataaagtgtgatctaccatccagcagcatcagcatcacctgggatcttgttagaaatgtagaaaggcagcccatctcagaactactagaagaactaaatttaacaggatacccaggattggaattcatagcaaagactgagaagcagtaaattagatcacatataccttgggagtcttacagaattgctattgccattcaactatgatatggtattatcccaccgactaatatagaacactgtatttaaataacaatagcttttctatgaatcatgttttctctacactgtccaatgcaattttctacaatgatgaaaatcttcatatatgtgctgcacaaaatggcagccacttgccacatgtggctgttgagcacttgaaatgtatctggagcaaatgagaaattgcattttaatttaattaattttaattgatttaaacatgtggcaaatgactatcatacgacatagcacaactccaggggaattggttactatgtcacagtgtcatctctaggagaatccttaggacaaatttggaaagttctagtcaagataattcttttgattaactgtacttcttctgtttttttaattttatgaagtcatatttaccatcttacactggctaagggcaaatttgcatcttacctctaaggaagcataataaaagttacaacatgtgctttgtgtgtattaatattattccagcttatcatcaattaaaaatactaatatctagacctgtacagtctttttaattctctgagaaggacctggatactctggagaatacaaatctgtgaggaataatgagttgattaatgtcaactttcccagtccagattcacctaaaagaaataagggaaaatatctgttaaactcacccactttacccaaccttaaatattcaacagatgctataattgaacttgctttatgcaagtatttcttggtgagacaatgaaatgacattagaaaatacgctacaaagaataagtatcttgtcctcagtttcttagctatcaaattaaactcacgtttccaaggattcttttcagccttctaattataccacttatattcattaaaagtaatgtatctaataatctacatttttaacagtaatgtattcccaaagaaaaaagtcagtcattatttaaaaatccaagttggattatgtatcactgcttcagtgaaataaagtttttctttattaatagacaataatgaatgaataataaacaagaaatcatgcagctataaaaagcaaaaatctgctaatacaaagaataattaatcacaatgaacatctccgtataaaattctaaatcacaaaaaatactttctaatttcgccacccatcagcctaaatataagggtgcttctccacaaaccagaatccaaaaaatcttaggtaattactttttctaccgcttctactcaaggtaggaggtagacacgaaggaagctagggcatgatttctactctgaccacatactcttttttgactctccatgtttagtccaatatacatagtccagtgtatagtaactattacaagtataccaaaatataaatggcttcaaggtatatataacctaaggttaaaacaaattataaatcagattatgataattaacatggcacagagttaaagtatttattgttaataactcacttagcataataggcatgtttagcctaagtaactggtgtcacaatatttttatgcctaggaggaattctttttatattagctctcaaaagagataagattctctccacgtggtttgggcttacccctttgactgagagcatgccactttttactagaggttgatgtatgactcaacttagagttgaggatgaaaagtggggatcatagcacctgcctataccctggtacagatcatatgatgttgatttatttatttgtggagtcagggtctcgctgtgttgcccaggctggagtgcagtggtacgatcatggctcactgcagccttgaactcctgggtgtggtggtgcgcacctgtagtcccagcaactctggcaggctgaggcaggagaatcgcttgaactcaggaggtggaggttgcagtgagccgagattacgccactacactccagcctggagacaaagtaagactccatctcaggaaaaaaaaaatttaaattaaaaagttctagtatctaaaatgagcaaaatcgccaggcgcggtgggtcacacttgtaatcccagcactttgggatgcagaagtgggtggaccagccgaagtcagaggttgagaccagcctgcagtgagccgagattgcaccactgcactccagcctgggagacagagtgagactccatttcaaaaaaagaattagccaagcgtggtagcatgcacctgtagtcctagctaccggggaggctgacagggaaggattccttgagcccgaaggtcaaggctgcagtgagccttgtttgcaccamctcactccaacctgggcaaagaccccatctcaaaaaagaaaaaaaaacacaaaaacaaaaaacaaaacagaacagaacagcatcacttccttatcattagtttgaaggaagtgaattgcctgtaaaactttccattttcaaaaaaagtattaaaatatagtgtaaagccaggcacgatggctcattcctgtaatctcagcactttgggcggctgaaatggattgccccaagaggtcgaggctgcagctgagcgatcctcccgcctcagcctcgcaagtagcggagactacaagtgcatgccaccatgcccaactaattttttgtatttttgtagagamagggtttcaccatgttgcccaaactagtctggaaytcctgagctcaagcgatccaccygcttccgcctcygcctcccaaaatgctgggattasgggcgtgagccaccgggcctggcccaattactttcttcagtctgagcatgagggctggaagaaaagctctcacttgcatataattttttagagacagagtctccctctgttacacgggctggagtgcaatggcgcaatctcagctcactgtaacctcaacctcccgtgcttgatcgcttatataatctcagctcactgtaatctcaacctccygggctcgatcgcatrtatatacacacatatatttgtttgtttagacggagtcttggtctgttgcmcaggctggagtgcagtggcgcgatctcagctcactgcaacctccgcatcccgggttcaaacaattctctgcctcagcctcccgagtagctgggattacaggcacccgccaccaggcccaactaatttttgtgtttttagtagagaccggrtttcagtgaaaccatgctggccaggctggtcttgaactcctgacctcgtgatccacccgcctcgacctcccaaagtgytgggattacaggcgtgggccacctcgcccagccgatcgcttatatttttaaaaagatgttttcttcgtttcctagccccttctaccccgctacaaagtttcaaagacttaatgctattacaaagggccgtcagacgtcaagctcaggggtgcagctccctcatgccgggcagcctcagagggggccgaccctgcccaggatgaacggcgccaggtagccggggacgctaccgggagtccccgggccctggctggtggaggtgttgtggggcgcacgtacccaggctcaggtgaggcgagtgggcagcyggggctgcagctggcgctggccattgaggagcttctgcgcgacagtgcgatcggttgcaccttctgcgacaggggccggccggttggcgcgcagcgcctgctagcgcagagtctggcccttgctgcgcccggccccgaagaccgrgaagtcgtaaagctcctcctcgcagtttatgtgcggcggcggccgggccgaagcctggggacacagaactgccagctcagcagccggttacatcccgcccggccacccgtagccagcgtccgctaatgcgcgatcctggaagacccagcaaccccgccgcgagttccgattggctccgcgtgagtggcggtctcctgcgaagtcacaagagcgcgccttccgtgacgtcacaagggcgcgtcttcgccgacaccatagaggtgggccttccgcgacgccacaggagcgggtgttcgcctacgtcactggggcgctacagtacctggagctgggcagtcttctcatcagagtggggactaataacagtgacctccccgccaggtcctgtgtgttgccggctgaagaagggtagctgaaaaattcagacccagcacagtgtttatgttggtcaaaaatagaaaactatgtctggcgtggccgaggcgggaggacccttcaggccaagagcagcctagcaacatggcgcaaccccatctctgtagtcctacctcagacccccagctacttgaacccaaaggttcaaggctccagtgagctatgatcccaccacagcattccagcctgcgagattgaggtaaaccctgtctaaaaaaattaaaaatctatccaagtgtgcaacagggagggactactaaataaaacatgaggctggctgggccctactgtaatcccagcactttgggaggccgaggcgggaggatggatggcttgggctcaggagttcgagaccagcttgggcaacatgacgaaaccccgtctctacaaaagatacaaaaattagccgggcgcggtgcgcacctggcctaattttcgtatttttttctagagatagggggagggcctcgctatgttgcccgggccagtttcgaactcctgagttgaagcgatcttctcaccttggccatcagagttgtcgggattacaggcatgagggaccgcgccccacctgggttaggctacttaataacataagaaagtgctccgccaggctcagtggctgacgcctgtaatcccaacactttgggaggccgaggtgggtggatcacctgaggtcaggagttggagaccagcctggccatggtgaaacccagtctctacaaaaaatacaaaaattagccgggcgtggtggcgcatgcctgtagtcccagctacttgggaggctggtaaaggagaattacttgaactggggaggcggaggttgcattgggccgagatcgcaccactgcaccccagcytgggcgacacagcgagactccaaagtttgacaccagcctgggcaatgtagtgaaaccctgtctctacaaaacaaacaaacaaaaacccaggcgtaactgtgtccacctgtggccctagctagttaggaggctgaggcaggaggatcacttgaggccaggagctcaaggctgcagtgagctrtggtaatcccactgcttcccatcctgagcaatagaatgaaagcatgtctcgagatagctagctagctagctagataattgataggtagttttgtatcaaattttttccctaaatttgaacatgtttttctaaagtagcattcaacacgtcagcattttacagtgttactagttattaatgtgattatgtttttgtaaagtatcctttacaaaagcagttttgtctttcaaagcacacagataaggccctcaagtgaatttgtctgatgttggcgaccttggtaccattttgtccacctgattggaaaagtcagtcaataatttcaggtcactgttggccttagaagaagagcccaaaggcaacaagcaaaggcgctggtgtccagtcgccttctaraagcattttcactttcccttaaggtttcccttgatgaacatagaagtattgtatgtagaattgacccagtgctgccctggcaactttgtatattaggccaaatttacatttcttactaactttatgagaggcaccctggtaggctagtggagttacacacacagtctgatttcarctgcactgtccagaratgcaacacggtccaatcaaataacattctctgagccygtttmtttagctgtaaaagaagaataacatacccatctaaaaaggcagcttattgtatttgattggtcttttattttctatgaaactgtgtttaacacagtaattattttcatttgtatactacatttgtgttgtgtttttgattttagttttgtttttgaaatggagtcttttttttagtggttttttgttttgttttgttttgttttgtttttgagatggagtatttctattgtcacccaggctggagtgcagtggcatgatctccgctcactgcaacctccacctcccaggttcaagtgattctcctgcctcagcctcctgagaagctgggattacaggtgcccaccaccacacccagctaattttttaaatatatttttagtagagatggggttacaacatgttgcccaggctggtctcaaactactgacgtcaagtgatccacccaccttggcttcccaaagtgctgggattataggcatgagccaccgcacctggcttgttttcaaataagggtttcttggctaggcatggtggctcacacctgtaatcccagcactttgggaggccaaggtcagtggatcacctgaggtcaggagttagagaccagcctgaccaatatggagaaaccctgtctctactgaaaatacaaaattagccaggcgtggtggtgcatgcctgtaatcccagctactcaggaggctgaggaaggagaattgcttgaacccagggggcagaggttgcagtgagctgagatcgcaccattgcactccagcctgggcaacaagagcaaaactctgtctccaagtaaaaaaaagatttsttaaaatgatattttcagtattttatagatgatgtgtaagcagcaatcttaataggatgttaacccgacactttgcgagactggcagctgatttgatccagatgtctctaattcttttttctttttctttttctttttctgtttttttttttttttttttttttttgacagagcctggctctgtcacccatggcagaatgcagtggcacgatctcggctcactgcaacctccacctcctgggttcaagcgattctcctgcctcaggttcccgagtagctgggattacaggcgtgcgccaccatgcccagctaattttttgtatttttggtagagacagcgtttcaccatgttggccaggctggtctcgaactcctgaccttaggtgatctgcctgcctcggcttcccaaagtgttaggattacaggcgtcagccactgtgcctggcccagatgtctctaattctaacatgagatgtattgcaggatcatagcagagtgagttgctgatgtatccagaaggaaacgagcatggactctcacgacagctgtcctgagaagtgtgtgtgtgctgtgcttggatatctcactgctcatttatacacaggctttctggtgactgagttaacagtatctgtttcataaataatgtagccctctttctttctttctctctctctctttttttttttttttttttttgagacagggtcttgctctgttacccaggctggagtgcaatggtgcagtctcggctcactgcaacttcagcctcctgggttcaagcgattctcctgcctcagcctcccaagtagctgggattacaggcatgtgccaccacgcctggctaattttttcttttttgtttttgagatggagtttcgctgttgttgcccaggctggagtgcaatggcacaatctcggctcaccacaatctttgcctttcgggttcaagggattctcctgcctcagcctcccaagtagctgggattacaggcatgtgccaccacacccggctaatgttgtatttttagtagagatggggtttctctatgttggttaggctggtctcaaattcctgacctcaggtgatctacccgcctcggcctctcaaagtgctgggatcacaggcatgagccatcgctcctggcctaatttttgtatttttagtagagagggggtttcactatgttggccaggctggtctcgaattcctgacctcaagttatctgcctgcctcggcctcccaaagtgttggagttacaggcgtgaaccaccatgcctggccagctctatttctttaagmctacatgttttgcacttgttaaaagtatttgaacatacaattactcagcttcccttgtttatgcttgaattttgtataatcttaaatattttttccaatctaagctttattttatcccgtttcttctatatttgtataactttaggtggctatcttcattgaaagttttttctcaaaagccttaaaatagaacrtagttcttggcagcaatttgaaagttatttgaggagaaggggagacttaaaatgatgattcaaatgaagcaaactaaaaagtaataaagcaagacagaggaaaaagcagtaytcacttgagcacatcccaaaagaataacatttcaaatgtaactagaaaaaagtatgctgaagttcgcaatacagaaataattattaataagatagctttaaagccctgctcagcttttcaatgttgggaattgacccagaggtggctgtaacctaagatggttccttcagtaatgaccattttttctttttcaagatgatgattattccccaccttctgagagacaaagaccaacgagccaccacagccaccagtcccagaacccgccaatgctggggaacggaaaatgagggagttcaactctggtaagttcttagcaaaatccatgaccttttcctttatcttctggactctcagtgtgactgatgaaagttaccacatgctctgcagggggaaatggtttagcatgtattactacgtcttaatcacatctttgtaaagccaggagcattttgaaagtcacgttacagacattgtttaaacatagtctgtatttaccaaagtataggacattgtatcatctcgtattaattagttagtcggctcaaaattagtgctaatgacttagtaattcagtgatttctgttagctttaaaacctttatttcagaactatttcacctcttggttttcatttttgctgtgcgtcactgcctgccggctgctaatttattaactcccagtgaatcgtgtcctgtgaagggactgaatattagtggcaaattatgttgatgatttgtattttgaataaatagtttgaatacatagaacattaagcttgtatacattttgaaaatagtattttaatattctacygtgtcatagkcacaacgattggatatatattgaatttatatgtactttaagttgttatatgtttatggtctttagcattctaacatgcaattgtgtatctgttaagtcttatttttttttcaagattacactctgatttattgaggcatctgtttgatgccacattaagtggcccaggctttgtgtaggggttgaggttaaagcaggaagaagggtggtgagaggcaggggtaccaggattaggttggaatacctgggggtgctctgaggctctggaatacctgggggtgctctgaagtttccctggtcttggccggctgtgctgctggccaaggcatctgatgggcctgcaaggtggtccaggggctagggcagggactttggagtcacgccgttggctttgaatccagactcctacacttggtagctgtgaactctccatgcctcagggacctgcagaactgagctctgtctgagccagtttccatccaggcactgcgcatccatccagaggggcactgcctcaggttgctcactattcactgccttctcaagcagacccttgtctccttctaggccctcacaatccagtggaggagacgaaactcatctgcctctgtccctctgggcacgcttcatgccaggtgcatctgtggacaggggccatgctcctgggcttccaaagttggagaaagctgccaggctcaggtgggtacatcacagcagctgctgccctctggacacagtgacaaaagaacactctgggcctggagccgtggtctggggcattgggcaaggctgttgcacytctctgagcccatttccccatctggaaagtgcactgattgtatctccctgtgggcactgagggctcagkgttagtttgagagccagcatctggggtttgggctgtaattccccgtcagccccatagctgcggggaaccagggactttgttgggattaccctaggcatcagtttagcttcctgtccctggcttgggctcagcacctgaagtagtctagggggtaggtggtcctggtgggggctggggcttttccccagactgaggtcacacccagagccagaaatcttggtgcctgctctgggcaaaggtgccagcctgtgcgacaagagcgaaactccgtctccaaaacaaaaacaaaaaaccttgcatcatttcaaggggctcacacctccctaagggcctggtaattggctggctctggcctgcatctagccccgagggtgtaggtaacaccccaccttacctggtttcttcctgccagggccaatcttcagacctcaggactttgcagcctatcccacctcccctctggccagcctcgagccgttgtgggtccagcactttttccaggctgtctcctggttgtccttctgccttgaggcctggctcatgctgctccccttcccactcaccaagacccacaaggaccactccacacccagctcagccccatcccctcagatagtcctctctctttcctcaggtggccaggtgcatatcttggtgtgaggaccttcrctgtatctgggaatgcctactggtcacctcggtgacagagamcaaggcatttrcctgatatgagtgtcttggttcaytgtctacatggctagggagggartcaataataggcttttcacttgctgcaagggccrgttctcctggccccwtggctctagggatggaggayrctgcaggagatgcascgctcacttcccagctgaggactgtgggtcatctcagggcgatttcacagtccccacatgccccaccccctcagctctgcaaataccaagcagygcagcctgcctaggggatgatgggctcgagagtgcccaggtagtgcccagagtgcccttggcaggcccctcacctagctgcttccacagctctgtagcaagagttctaaacttttttgaccgtgaagtctgctgagaataagagctgtggactgttttcccagaaaggcatgtatgtgctctccacacaaaacctttcattgtggccaagcacagtggctcatgtaatcccagaactttgggaggcagagccattcggatcacctgaggtcaggagttcaagaccagcctgcccaacatgacgaaaccctgtctctactaaaaatacaaaaaattagccaggtgtggtggcagccacctgtaatcccagctactccggaggctgaggcaggagaatcacttgaacccgggaggcgcaggttgtagtgtggtgagatcacgccactgcactccagcctgggcgacaggagcgaaactctgtctcaaaaaacaaaacaaaacaaagccttgcatcctttcagggggctcacacctccctaaggggccagtaattaaaccccttgggcctgagggtgagaaactttgtctcagttcttccccgagtgatcagcccaggggtaaggaaggagaagccagaaagcaggacccatgagaagggcccactcctggagtttgaggcccactccctcctgcccctgcctctcctctgtccaggactcctccctgctctgccccactcctggggccataaccatggggagctgtggttttctacaggctcctgggcacaaagtgggcaggctcacctggaggcgatcagagcaacatggcaggaagtgagggggaaagccgccctggaactgcgcctctctgccccctgacgtcgctggcgtgcactcctccctcccctcactcaggcagtggcaagagttccatgtgagcactgtcctgctccctctgctgccctttttttttcttggggctaccataacactcccttccccagccctgccaacctggtgggacattgggcttccctctcacagggtcctggggacaggcccatcctttatcatacccacagagagacccctttttttcttcaggacctggggagcagccaggttccatgagttaaatgcagatctgaaccaagctgggactggggtacacactctcctctgctgaaaagtagctagggattccaactaggtgagaaggagagtggggcagagccagaccagacaaggactgatcacctggaaaaagcctgccatcaaaggtcttggcaaatgctgggtgcagtggctcactcctgtaatcccagcactttggggggctgagacaggtggactacttgaggcaaggagttcgagtccagcctgggcaacatggcaaaaccccatctctactagaaatacaaaaattagctaggcatgctacactcctgtaatcccagctactcaggaggctgaggcaggagaatcacttgaactggggaggcggaggtcgaagtgagccgagattgtgtccctgcactccagtctgggagacagagtgaaactaggcctcaaaaaaaaaaaaaaaaaaaaaagaatatggccttggcagagaggggccagcccggcagtgccttcccttgggtttctcctgggtaggcctctgccatgaggaggcgcttccttctgcctgtccatggcccacagcaatggaatgtctgcttctaggggttgggtgggagactgctggcagaactggaaaccttcaggtggggtttttttgttttgttttgttttcgagatggagcaccgctctgtcacccaggctggagtgcagtagtggaatctcagttcactgcaacctccgcccccctgagttcaaacaattctcctgtctcagcctcctgagtagctgagattacaggcaygtgccaccatgcccggctattttttgtatagatggcatttcgccatgttggccaggctggtctcgaactcctgacctcaagtgatccaccaacttcggcctcccaaagtgctgggattacaggcatgagccactgagcccagccccttcagggggttttgaggcttcactacaatactagtttcctgtggctgctgcaacaaattaccacacacttagtaacttaaaacaaccaaaatgtattcccttacaggtctgaaggccagaattctacagtaagtcctactgagtcaaggtgggagcagggtcggtggcttctgaggctctgtgggagaatctgtttcctggccgtggaggtggcctgcactcctcagcttgtgctgcccgtctcgaatgactggagtttcctgcttctgtcactacacctcccaccctctccatcacctgctctgctcttataaggatctgggtgagtacatcaaccccaacagccaaagacccttaacttcattatatctgcaaagccccttttgccatataaggtcatgttcaccagttcccgggattaggatatgggcatcttggggacatcagcctgctacagctaggctgcaaaactattacaccctcctggtgtttcaatgattgggagaaaaagggttggcattttttgcttaggggtccctcttaaacttatatctgtaaggtctggggtccctcttaaccttgtgtttgtttttgtttttttgaggtggagtcttgctctgtcatccaggccggcagtggcgtggtcttggctcactgcaacgtctgcctcctgggttcaagtgattctcttgcctcagcctcttgagtagctggggctacaggctatatgccctgctgttttgtatttttggtagggacggggtgggggtggggctagggagggggttttggctatgttgccctgagctcaaagcgatccgcctgcctctgctgccaaagtgctgggattacaggcctgcaccactgcacccggctgctgtaaagtcttatttcacacagctgagacatgttttaggaagtttgctgaaagactcctggagacctcctcgttgtgacctccctgttattgtgtctaatttgattgaacttttctgccctcctgcttttcagcttctctaatagtctctcattaaaccaattctaagaaccaccaaaaaagggaaatctttttttgaaagcagtaaaatgatatggactgttagaatgtaaaatatatgaaataagtcattatatgttagtgctgctctgacatagggacgtattattgagaatcaacttttgcttgattttcagagaaatggaataatcgtatcgctgatctacgtaaacaaattgaagaattgtctgaaagaaagtatggtatgtctaaactggaaaagtcctgtaatcttatgttcatgggcgtttacacaatggagttactgttcatcatgggggtaccgtggacaagcccagggctgccggcgagtcatgccatccttayacgtttctccttgtaaggtgctttgtagtgtctacacactttgtttctagattgctgcaaagctgaggaaaagttgtatttctttaattattagttagcatttcttttaaactttcagtatggagattggaaatttatttacatatttattgcaaagccctggatcttagggatttcattgaattatttatttatttatttttgagacggagactcactctgtcgcccaggctggagtgcagtggcacgatctcggctcactgcaacctccgcctcccgggttcaagcagttctctgcctcagcctcccgagcagctgggattacaggcgccagccaccaytcctggctgatttttgtatttttagtagagacggggtttcatgatcttggctaggctggtcttgaactgctgacctcctsatccactcacctcagcctctcaaagtgctgggattacaggtgtgagccgccatgcctggccaaatattatttttttaaatgaattgtttctcttagtctgctttgttaaatttggaattcatctgggcgcggtggctcacacctgtaatcccagcactttgggaggccaaggcaggcagatatctaggttgggagttcgagaccagcctgaccaacatggagaaaccccgtctctactaaaaatacaaaattagacgggcgtggtggcgcatgtctgtaatcccagctatttgggaggccaaggcaggagaatcgcttgaacccaggaggcagaggttgcggttagccgaggttgcaccattgcactctagcctgggcaaaaagagcaaaattccatctcaaaataaataaataaataaaatgttcagtactcaccaaggtgcccctattgtctctacttttatcttgatgcatcactgaattgatgttagatttcaaactcatcattgcccttatactattctattctgaagccacctttatataatgttgaaagaaattagtgatttgttattatcctctctctgttggtatacatcaaatgctcacctaaaaagagcaacaaccagtggaaaacacatgatgtttttatttggatgactatttacttgtaacctactagcaaactataaaattgtatgatatgcacaattttaactgaattgctttaagtgaacatttaaacatgataaaccatattgatggtatttatgttaatatacttaaaatgaacatttttcttcatcatgagtaatataacctacttgtcaatgaaaacctagcattaaatttgctaatgaattcaataacattttcataatatttttagttacatgcttaaggttctcttagtgtttctcccactttttaatagcttawgcctttttcgcctttgggtttttttggttcattttaaagcaaaaatcttacaacatgtgatacctggaaacactgtaacctagtggtaagaccataggccctggggacacaggctggccatgtctcttgtcctgtctgagctttagtatcctcttttgtggtcatgagaactgaagatctgtcccaaagatttgataagatagtaaagtgcttcacataataccagacatataaatatacactaaatgcttcctccttatatttttattgattgattgattgagacagaatcttgctcttttgcccaggctggaatgcagtggcgtgatcgtggtttctgcagcctccacctcctgggttcaggcaattctgcctcagcctcccgagtagctgggattacaggtgcctgccaccatgcccagctagttattgtatttttagtacagacggggttttaccatgttggccaggctggtctcgaactgccgacctcatgatctgcctgcctcggcctcccaaactgctgggattacaggtgtgagccactgtgcccagcctgtcttttctcttcacacccacagttcatgatgaaatattaaatatgtactagtggatattactttgctgaatattgcctagtgaatattaagtatttattctcacctttcagacatgaacttatgaattcaacaggtgaagatttacaacttgataaatcagcttcstgaggtacgtcttcagtcttaagtcagattagaagattatgtgaagtaattaacacttaacattgatttaatggtagcttccacatgaaatagtatgcctctaagtattaattatgtcctaggacaggagaattcatgttgtcaaaattctcatactctctagaacaataaactcattttctttttattagtaaatattgcatttatgggtagacaaaactgaaagaacaatatttgttctacttttgagatgcaagattcatctggcataatgcattgaacaggttattattgaagtctacaccagtcaactgaataagcattcatcaaatgtccatgatatgcaggacataagttttcttttagagtagggaaccatgcatattatcttgtaattagatgatttagttagatatgtttttaaagaaatagaaatataattgattttyttgttttggctytggagtggggacaaaacrgaatggattcacactgtttagatttactaaaatggaaggattgcagcaagatcatatccctagtctccctgtagcaaatgtcacctgctagctgkttttttttttttttttttttttttgtaagttgaagttttgttctgtcgcccacgccagagcgcagtggtatgatctcagctcatggcaagctcacctcctgagttcaagcaattctccctgcctcggcctcctaagtagctgggattacaggcctctgccaccacgcctgcctaatttttgtatttgtagtagggttggggtttcaccatattggccaggcaggcctcgaactcctgacttcaggagattcacccgcctcagcctcccaaagtgctgggattatgggtgtgagtcactgcacttggatttaatgggatatttcactacagactttagtaaacagaatattagcatttttggtgttctttttattttactcatactatttttctttggactcaatcacaataacagaattaaagatcaaagtgtaaaagttaaagaccagtacagattcaataattattcttttctacatattgtgtttaaatgatatccctttttctttttgttyttatagctcgagctgtaaaagccaaaggtccggtgatgatcccatacccttttttccagtctcatgttgaagatttttatgtagaaggccttcccaaaggaattttttttttttttttttttttttttgagatggagttttcgctcttatcgcccaggctggggtgcaatggtgcaaccttgctggtcactgcaacctctgcctcctgggttcaggaaattctcctgccttagcctcccaagtcgctgggattacaggtgcccaccaccacaccaggctaatttttgtatttttagtggagatggggtttcaccatgttggccagaccagtcttgaactcctgacgtcaagtgatcttcccgcctcggcctcccagagtgctgagattacagacatgaacccatgcctggccaggaattttgttttttaggaaggctttctactaatggaattcctggccttgagaggatattactttcgaaggaaaggatttttttgttattaaaaggtaagattcttggattcttattggattgttatctctgttaggagtaattcatctttagtcattcaccactagggttgtatttaattaagtctgagttattttatggtggttttgttttgttttgtttttaccaaattttgttctcattgccctggcttgagggcaatggtgtgatctcaggtcaccacattctctgccttctgggttcaagcaattctcctgcctcagcctcctgagtagctggatttacaggcatgtgccaccatgcctggctaattttttgtatttttagtagagatggtgtttcaccatgttgaccaggctggtctagaactcctgaccttgggtgatccacccgcctcggcctcccaaagtgctgggattacaggcatgagccactgcgcccagcctgggcctgcttctttctctttttctttttttttcattagcagcttaaaattggtgccttattcagacacaagcaaaaggacattagcccagctttggaaataggtgtgagcccatatatgatcttcctagtttctcctccccctttgctttttgctctcttgttagtatgttaattgttttcactctctgaatcttttttccccatttctttggcagacatttttacttgtcttggaagagtaggcgaagagctgtttttaggactctttgaaagggtacagtatgggtgacagtcttggctaatggtaacatccagggagctggggtcagcatgagctggaatcagttcaaattagcaaagcactggcactcagtggcaggaatacaagtgactgcaaagtgttaaacacatctggaaagggatactgacatcatcctcagaatctgtggggagttcacatagccagttaagacccattcctctttgaccctrtaaagattctttaaagaataatacccttagtggttttctagccagcttgcctgctcatttatctttgaggacaacatgccttgtggagctccacaggccccagaggggtrtggattctgcattcgaaagtgctgaagctgagagactgggtcttggtggaccccaagagatctggttctcctctactcattgttccttcttttcccagcagctggcattgctgtttaaatgggttgttctttgctgttttaagttgtttcatagtggtgtgtcaggatttgggttttctgaatactttccaagctgatgacttgagtggtggttagggaggagatgttttagggctgttctggagctattgaggtcaggtgtctagatactcccagcttgtctgttgaggagaatgctgttctcattgtgctgcctttggtggtactgtgtgtggctctttagatgtgrgtggaggtgagctgggggagttaatgagatcttttttaggtgcttttgataaagtagcctgcactacaggattcattgtgacttttttccttaacctgtgcatttctctctgctagcttttgctgtctttctcatgcctttgattttcccagctcctcttggttgaattaacataagtgctctgctatggtttaaatgtgtcccccaaagtttatgtgctggaaactcaatcctcaatgcaacagttgggatgtggggcctaatacaatagccttcatgaatgagttaatgttgttattgtggtaatagattagtaatcatagagtgggcttattataaaacagagttcagccccttttgccctcttgctttcttgcactctcttttccttttgcctgctgtagtgggatgatgcagcaagaagacccttaccagatgcaggcccctcaaccttggacttcctaacatccagaactgttaagaaataaaatttatttttttccttttcttcctcctttcccttctcctcccttttcttcccttcccctccctccctctctccctcccttcctccttccctctttccctctttcccttccttcctttccttccttcccttccttcctttccttccctccttccctttttccctccttccttccttttttcctttttataaattatgcagtctgtggtattcttttatagaagcatgaaatggacaaagacagactccattttcaagaacaagcacttttgtagtttctgagcgaattatgactgtaaaggaagttctataggtagcctcagatctactacctaggaagcatgctaccaagcagacctaggatctaggatttgatcaagtgctgggcaacatgatacctctgcaatttagcacctccctatatacctccagttggctcagcccatcaggactaaaactacmcctcatatcctagtgtctcttgtaggcagaagccttgcctaaaccctaagctgcttggctcacattctgtcttgtgctttttttgtaggggttcaaatatacacaaaagaaatgtgttgaacctccatgcacccaacccgcagattaagcagttacctccatttttccagatttgtttcatctgcttcaatctccctaaaaatttgtgtttgtacaggaaaaactgaataaatagctaattctccaccctacctctcatcttaagtcacttttcagagtagtaagttagtgacctagtaaccttccctctaatgaccagtagttttttttctgaataccattatgaactcacagattattgtttgcatttgatgtatttcaggccattgcagtctttattgttttggatgcttacattgtctcatccaggttaataattatctcttcaagttgactttcatgtctttttgacgtgatgycttttggactttgatggcttccttgctttctggcaaacaagatgttccaggatcaatatactgcaccatacatggagtcagccatttctctagggaaccttgattccttttagtagagaacacagtttgaggtcttggactgaatgacttttgtgaacctcctctcctgagactacagcctgcctccctgcatatagcccgttaggagctcttgctgggcaccaacagatctcctaaaactgctatatagttctgcctcactcttacaaaagattcatctcttgrgagttttgtgctctacccccagatgtggtctttctggttctgaagcttttgcttcagtcaccctgaattttgccagccctatgcatgctataccttggattgccaacttgccctcactgaagccagtttctctggttagaatagttgccccaacccatgcctaatactctagtaaacaaggttctacctgggcttaggttaacttttgctcctttgggccctgtgttctaccagcattccatttatctgaaactctccctcaccttaagaacytatctgttctttaatgatttactgctgcttcctgggytcraaagaacccagttcaggagtttctgttttagtttgagatcttataggcctgtctcatcaggttggtgtcagcccagctaggattaggcagaattgggtgggggctgtagtgcattttttgcacagcatgtacctgtctgactaattctctgtcttttctttccttttgcaattcatgggtcttagcatcttctgaatggtgtttagtaggtcatcctgttgatttcctgctagggagtagcatactctggctctgtaccattggccaagggacttaaggatagatgaagggctgcagttttgttaaatggaacaatatgaagagatggcattgtaaaaaaaaaaaaacaaaaaaaaaaaacaaacaaacaaacaaaaaaaacgcttggcagcagggcccatttgaatggttggtccttggctcctgtgttgatataggcagatccttgatgggaatttggaatgatcccaaatattgtagatcactggtacatcaagtcatcctcaaggttgtctgtgtaacagtcttgaatgatattttatcagtctttggagattctctgtatagggtttaatcatttagttatttcagttgagcctgtttagtttctttgcaaggagataagaaatgtgaaagagatgcagacattagggaaaaaagtcaggagccttgtttccccaccctctacttgggttctggaactggactcatmggtgagtagtgaggagctgggcccaagcacattaatcctagatctagctctgctttgcgctcgctccagttcttgtatcaaattcacttcaagccacccagagtagtatgtagaggagtcattcaggaccatgcttatacttcattatatcaaatgggagatccagtaatttatagcctgttatttctggagtctggagatggctctgcataagmtttgctgaagcaaattttattacattagaagagaacctagctggctgcatcctayactggaagcttttagatgctaataaggaggtcatgtaaaggtcacagaatgactctggaatccattccccmccaagaaagaataatgacattctatgttggcctcttttcatttccctttgattttaagtaataaattctctcctcacttcccagctgaacggtttgggagtctctattccctagaaagactctggtcacatacccatcagattaaattaggtgaaaactctttggccttcatgaatgttgaaggatttcaaagggctaatggaaattcttctagaagtaactgcaacgtccgccttccgggttcaagcgattttcctgcttcagcctcccgagtagctgggattacaggtgtccaccatcatgcccaactaatttttgtatttttagtagagacggggtttcaccgtgttggccaggctggtctagaacttttgacctcaggtgatccgcccacctcagcctcccaaagtgctgggattacaggcgtgatccactgcgcccagttaaacttcagtttttcatgttccatgcataggtcagggtcttagggagtgattcattctagcagaactccctggattttaaggcacgtgttccatttattaattgacaaaggaggcatatttctcccctggtaacccaaagatttaggtcattttcccagagactccatttccactgtgagggttcttggaaaactaagcagaggatgaggaaaagtctgtaaacaagcttgctggtctctccctatcctacaaaagagcatacctcttctgtaaccagaaggcccttttgattagtcaaggctggacagastgagattaggggggtgtgtgtgtgtgtgtgtgtgtgtgtgtgtgtgtgtgtcttgagacagggtctcactctgtcacccaggctggagtgcagtggtgagatcagagctcactgcagcttccacttcctgggctcaagcgatcctcctatttcagcctccagagtagctgggactatacgaatgttttaccgcacccagttcattttctaattttttgtagagatgaggtttcactgtgttgctcaggctggtcttgaactcctggcctcacgggatcctcctgccttagtctccctgtgggctgggattataggtatgagccacctcacctgacctgcgacgatttttcaacaatgtaatttctcttttacagagccacctaagctgaagattcccttgagaacaagtactgtcctgtggtttcatggcctttcttccatttgtggttcttgcgaagtggaatttaaatgacatcttatcaagatggataaaccctagtttcccagtgctggaatatagaaaatggatggacaagtaaatcccactcagcacccatagtccaggcatggggacctcaacacacctgagccccagacatcacctttcattgtgagtagctctgagatgacacttctgctgttcccaattccagcattaattggattagatagttattttatgaagaattttcatatgccacaatcctgaccatatcttcaagtgaacagaaaaattctattaaaaagtcaaccttctgtctcactctgttgcccagactggagtgcagtggtgcaattatggctcactgcagcctcaacctcctgggctcaagcaatcctcctgcctcagcctcacaagtagctgggactacaggtgcttgtcaccacacctcactaattttcccatttgtgttatatgtggattccacaggactgacttcgaaaacttgaatatgcatggattttggtatacacagaaatgggagagctggagctaatcaccccatataccaagggacaaattgtatctgtttttacaattatactgtaggagacattatgttccatgacaatggtartttttaaygacartttttaattgagtgaaattaccataaaaataataatagtagcagctaatatttactgagctgttactagatgcctataaatagcatagatttttaaattctccataattcttccttatttcacttaaccactctatcttaaattactcatgcttgcctcagtagcacacatacttaagttggaacaatagagagattggcatggcctctgtgaaagaatgacatgcaaatttgtgaagcattccatattttttawaaaaaaagaggaaaaaattactcccagattttcaccgtgtttgtgcatgtgaccttttgtttaggttgaattatatccaaagatgaaatttccaaaagtgagattactgtgagtcacagggcatgagcattcttattacccttgatgtaaattgcaaagttttcaggcatggtggctgtcagcctgtaagtccagcactttgggaggctgaggtgggaggattgcttgaggccaggagttggaggaggcagtgtaatgagtcactgtctgtatgatttaaaaaaaatttccaagctctatcctggaaggcttatatacattttaaacaccactagtactacaagaaaatggccatttcactgcaccttcgcccacacaggtattataatttaacaagttattttctgtgtgataaatgaaagacctcatattattactttgtcacccatttttttttttttttttttttttttttttgtgagatgcaggctcgctctgtcaaccaggctggagtgcagtggtgtgatctcggctcactgcaacctctgcctcccaggttcaagcgattctcctgcctcagcctcctgagtagctgggattacaggcacatgccaccgtgcctggctaatttttgtatttttagtagaaatggggtttcaccatgttgatcaggctggtctcgaactcctgaccttgtgatctacccgcctcggcctcccaaagtgcttgattacagctgtgagccatgcgcccagcctatttgtcacatattttatctttccttatgttagcttattagctttatttctttattgtcctttttttttttctgagatgaagtcttgctctgtctcctaggcttgagtgtagtggcacagtctcaactcactgcagccttgacctcctaggctcaggtgatccttccacctcagtagttgggactataggcacgtgccactatgcctggccaattatttttatttttttatttttactagagacgaggtcttgctttgtttcttaggctggtctggaactcctggcctcaagcaatccccccaccaccccctcccaaagtactggtattataagcatgagccaccatgcctggggtatctgtgtcttttccatttatttatagagttactttgtcttttactaattcaatgatctgtttaatcttttattaaattataaaaatagtaaatacttttaaataagtgaaaaatttccttcactctttagacccataatcttatctcaggaaataattgctattgagaaaatgggccatatccttcaagatacgtacatggtgattgaacatcacttcacattttcatattttgtggacatttgtgccaatacctattgatctatcttaatctttttcatggttgcataatattttattatatggatgtatcacaatttaccagtaccagtcaactgctggaggcatttaggctctttctaatatttgctttgagctctttatataattaaaaattaaccccctcagccaggtgtggcagctcatacctgtaatcccagcactttggaaggctgaggtgggagaacatcctgagtgtaggagatcaccaccaacctggtcaacatagcgacactttgtgtctactaaaaattaaaaaaaaaaaatgagctacatgttgcagtgcacacctgtagtcccagctactggggaggctaagactggaggatcacttgagtctagaaggttgaggctgcagtaagctatgatcacaccattgcactttagctttgctaagagcaagactgcatttcttaaacaaaataaaaattasatgggaatattgctcaagccctggaggttgaggctgcagttaactgtgattgcaccactgcagtccagcctaggcgatagagcaagaccctttctctaaaaataaaawaaaaattaaccttctatcatatttctgagtaacaccttccctcctacgtttctcctagaagcccttaaattttgtttttcacataccatttaaaacttttgagtgctgatgtttgtctgtgtcatccctctttttttaagaatgtctttttgtcacttctagctggacctaccatgaaagacttctgaatccaggaagagagactgactgggcaacatgttrttcaggtacaaaaagacttggaccgtaactcaaaaatgatcaaataatagtgcatgcatcaagtgcaatgggaagctcttctggagagggagagaagcttccagttaaggtgacattgaagccaagtcctgtaagatgaggaagagttatatgagagtggggagggaagggggaggtggagggatggggattgggctgggctgggatggaatgagctgcccaggcagggaaaccagcactatatagacctgaacaatgaagatggcacattttgttcagggaatggtgaattaagtgtggcaggaatgctttggagagacggtcatttgcttgtatggaattttgcccaagagacctcattacagtttctaattttttgatgttatcatgcatcactgcccttgtcagatagtatcatgatcacagtaacatcaagcataatatttcattgatcctcacaaaaacaggtgggtgccacagttatccccattatgtgctcaaaatgatgaagacttggggttaatgagcaatttgcccaagctcacctgaatattaagactgagtcaaatgttattctggtctgactttaatgcttgccttgttcatgagcaccgtgcattgcctctcctatgcagttaagcaggtagacaggtgagagaagagcccgtgtgatatcgggggaaattcacccctgatatttcatgtaggttcttttctattttccctgagtgtcggccagtctgagaaataaagggaaagagtacaaaagagagaaattttaaagctgggtgtccaggggagacatcacatgtcagcaggttctgcgatgccccccaagccgcaaaaccaaaagtttttattagtgattttcaaaaggggagggagtgtacgaatagggtgtgggtcacagagatcacatgcttcacaaggtaataaaatatcacaaggcaaatggagaatatatatgattcacatacccttcaattgatttatttattgaaatctgcaattcagtaggttttagaatattcacagagctgtgcattgatcaccacagtcacttttagaacctttcattatcctgtagagaaatccataccccttagccgctacctcctactctccccacctaccttcgcccccagccttaggcaaccattgattaatttttttgtcactatagatttgcctaatctggacaaatagaattgtacaatatgtgatcttttgtggcttttttccctcttagcacagtgttttcaaagttcctttatgtcatagtgtgtatcaatatttcattccttctatggcagtattccatggtagagacacactgcattttgtttatttgttcatcagttggtggatatttgggttgtttccatgtattccatgtattggtcattatgaataatgctgctatgaagattgttgtacaagtttttgtgtggacatatatttttatttttctgggatatatgcctatgagtgaaattgttgcattataggatgactgtacatttagccttttgagaaactgccagactgttttctaaagtggctacaccagttgggtgcaatggctcacacctgtaatcccagctacgcaggaggctcagctaggaggatggcttgagcccatgaattcaagaccagcctgggcaagatagtgaaaccctgtcttgatttttttaaaatccaattaaaatgacaagaaaagaaatacccaaacaaaatggttacatgattttatgttcccaccagtaatgtatgtgggttccaattcctccacatcttcactgacatttttttttttctagataggggcttgctctgtctctcaggccgcagtgcaatgatgccatcacagttcactgcagccttgacctcccaggcacaagtgattctctcatctcagcctcctgagtagctgaaaattacaggtgtacaccaccatgcctggctaatttttatatttttttgtagtgatgggattttaccatgttgcccaggctggtctcatactcctggcctcaagtgatctgcccacctcagcctccctaagttctggaattacaggctgccaccatgcccggccttcaccaacatttgccattatctgcttttttttttttcctttataccttaaagcagtataagaacaagtgtcttcaattataggaaacagtataatcccagggcattgggaggctaagacaggaagatgtcttgatgccaggagtcttttttgttgttgttgtttttgtttttgttgttgttgttgctgttgttgttgtttttgacagagtctcgctctgtcacccagggtggagtgcagtgatggggtccactgcaacctccacctcccaagttcaagtgattctcctgcctcagcctcccgagtagctgagactacaggtacacgccactactgcccagctaatttttttatttttggtagagtcagagtttcaccatgttggccaggctggtctcgaactccagacttcaggtgatttgcctgccttagcctcccaaagtgctgsgatacaagcatgagccaccatgcccagcctgatgccaggagttttagactagcctgggcaacctagcaagaccttgtctctacagaatatttaaacattagccaaacgtggtggtgcctgtgtatagtctctctccctctcttttttttctttctaactttttgtgacatggtctggctctgtcacccaggctgaagtgcagtggtgtgatcatggctcactgcagcctgaaactcctgggatcaagtgatcaatcctcccacctcatcctaccaagtagtagagaccacaggtatatgccacccaggtcttgctatgttgcccaggctggtcttgagctcctggcctcaagcaatcttctcaccttggccccccacagtgcaaggattacaggtatgagccgccatgcctggcccctaccctgcctattgagaaccaaaagaaggatccaaattctccttagctcaactcgagccatttcctgattgcttcatcagcaagragctggttattgggctgtccaggcctcccaagcagcacagaaatgaggtgaaggagttttcctgctgctccactctgtaaggagttggagggtgatgtttactcgtttgcagagagagatgccttgtaggcacctcaggatggagaggaccctgattccaatgtcctttttttctttagaaacaggaccttgccctgtcatttaggatggagttcartggtccaatcatggctcattgtagcctcaaactcccaggctcaagcaatcctaccatgtcagccttcccagtagctgggactacaggtaagcatcgtgacactcagtgaattttgtttttatttttttgtagagatggggcctcagtatgttgccacggctgaccttgaattcctgcactcaagggattttcctgccctggcctcccaaagtattggtattacaggcatgagctattgtgcccaccgtctctggttcttaaccttctgcctccctcttccagttttaaagaatgcttgtaattacatgggctctcctagatactccaggataatcttgttttaaggtcagctgatgagcaacattaattttatctgcactcttaattcccccttcctatgtaattgtgctgtgtaacataggacatgagcaattggtggcggcggtgggggttattactttggccaccacagtaactattttatgccaggtactcagctaagcattggtgaattaagcatgaataacacacactccctaatctccatccattcatgggaggagcacctcacctgccatgctcctgagaatctcggcagtcaaagaagtcttctatgaggaggtgatgccaaagcggacaagtgacagaggagtcgaagctagctaggaagagagtagaggtttaaggggaagcatattataagcagaggatatcacccacttcagagactcccagaggagaaggagtgggcgttcaaggggcagatgaagctcagttggactccatagcagatgaaatggagaggggcaagcagtgaggctgccttgcaaggcagggcagagcaggggctgttaaggagtttggacttaatccctgaggcaaggagaagtgatgtaaatgggggagtaacatgatgagattcatggattagagacatggctcaggctgctgtagagaaggcaccagggagagcagatggctcaatgggtgtgcaggatacctctcactgagtttagggaaaggtttttaaaacagaagaagtttgagtaatttaaattatgatgggaaggagctaaaagtgggggataggttaaagatacaggaaagtgggaggaagaactgacaagtgaggttccagagagggcaggagaagaggagattcccatagggggattaacactttcttttcttttttctttctaagacagggtctcactctgtcgcccaggctggagtgcagtgacacaatcttggctcactgtagtgtagacttcccaggctcaagggattctcccaccccagactcccaagtagctggaactacgggtgtgcaccaccaccacacctggctaatgtttctttttttggtagacacagagtctcactatttagcgctgattggtctccaactcctggcctcaagcgatcctcctgcctaggcttcccaaattgctgggattacaggcatgagccacaatgcctggcctctgctagttccatattctctagagttgtctttactttstgctagtgtgtccctcattgtgctgatcctctgtaaaaattaatacctttttttttttttygagatggagtttcactcttgttgcccaggctggagtgcaatggcgctatstcggctcagcgcaacctccacctgccgggttcaagcctcccgagtagttgggattacaggcatgtgccaccatgcccagctaattttgtatttttagtagagatggggtttctccatgctggtcaggctggtctcmaactcccgacctcaggtgatctgtctgccttggcctcccaaagtgctgggattacaggcatgagccattgtgcctggccgaaattaatactttttatattaaatttacatatatatacgttttttctttttgataccgggtctcacactgtcacccaggctggagtacagtggcacaacctctgctcactgcagcctccacctgccaggctcaagcaattctcctgcctcagcctcctgagtagctgggattataggtaagtgccaccacacccagctgatttttgtgttttttgtagagacgaggttttrccatgtttcccagactgttctcaaactcctgagctcaaagcagtccacccatcttgtcctcccagagtgctgggattacaggtgtgagccaccttgctcattctagtttaaactgttgagtggtttgtgtctcctgattggactcctacaaatacagaattgatgctaggaagggtaccaggagatagaygcatacagatgggatttgggaataggtttggttatccaaggagcagtgctgagctccttgctaatggggtatgggatgctggtgatttccaggaagtgasctcacaatgactcaagctaccacatagtgttgattgtgaaatgccagttgaagcatatgtcctgcgagcttrggggtgctacaagttgaccactgcagcagtaaagatgactctgaagaatggcatgggatggatcctttcraatgcayttgagcagcggtctccaaccacagggccacagagctggaggtgagcagcaggcgagtgaagggaaacttcatctgtatttctagcccctcccatcgcttgcatgaccacttgagctccatgtcctgtcagatcagcagcagcattagattctcataggagcacaaactctgttgtgaagtgtgcatgcgagggatctaggttgtgtactccttatgagaatctaatgcctgatattctgttactgtctcccatcaccccagatggacagtctagttgcaggaaaacaagctcagagatcccactgagtctacrttatagtgcgttgtagaatcatttcattatatattactatgtagtaataatagaaataaagtacacaatatatgtaatgcacttkaatcatcctgaaattattccctcactcccaatctgtggaaaaattgtcttccacacrttcactctgttttttggtagaggcagrgtcttaatatattgcccaggctgatctcaaactcctggcctcaagtaatacacctctctcagcctcccaaagtgmtgagattacaggcataagccaccaccttcaaccaagactttcttaaaccaaataaaaattaagtgagattwcttgagcccaggttgtcaaggctgcagtgagcctgattgcaccactgcactccagcctaggtgacagaatgaaactgtctcaaaaaataaaataaaataaaataaaataaaataaaaattaaccctttatgacattcccagtaactttccctcctaagtgttccccacaagtctttgaattctgtttaattttcacataacatttaagacgtttaagaacttatgtctgtctgtgtcatccctttatgtcaaaagatgtctttttgtcacttccagctggatctaccatgaaagacttctgaatccaggaagagagactgactgggcaacatgttattcaggtacaaaaagatttggactgtaagttaaaaatgatcaaataatagtgcatgcatcaagtgcaatgggaagctcttctggagagtgagagaagcttccagttaaggtaacattgaagccaagtcctgaaagatgaggaagagttgtatgagagaggggagggaagggggaggtggagggatggggaatgggctgggatgggatagcgcaaactgccctggaagggaaaccagcactgtacagacctgaacaacgaagatggcatattttgttcagggaatgrtgaattaggtgtggcaggaatgctttgtagagacagtaatttgcttgtatggaattttgcctgagagacctcattgcagtttctgattttttgatgtcatcattcatcactgtccttgtcaaatagtttggaatagaatgatcataataaccccaagcataatatttcattaattctcacagaatcacaggtaggtgccacagttatccccattttatgaatggagtgatgaagccttaggaataatgaatgatttgcccaagctcacctggatattaagactgagtcaaatgttgggtctggtctgactttaatgtttgctttgttcatgagcaccacgtatttcctctcctatgcagttaagcaggtagacaggtgacagaaaagcccatgtttgtctctactcacactcttccgactgaatgtatgtatggagtttctacaccaaattctccagtgctctggatattaactgggtatcccatgattttattctgacactgcctggagttagcacagaccccacaagttacgggctcagtcccacgagaccatcctcacttcagatgccaatggcaagtcctaggttgtcacctgtacttttgaccaacctgttacaaattgggggttcccataactctattcttgggtttaattatttgctagaacagtttacagaactcagaaaaacagtttattttctttttttctaagagagagggtcttatttttttgcccaggctggtgtgcagtggtgcagtcatagctcactgcagccttgactgcctgggctccagtggttctcccacctcatcctccctagtagctgagactacatgcctgcaccaccacatctggctaatttattttttgtatagatggggtcttgttgtgttgcccaggctggccacaaattcctggtctcaagtgatcctcccacctctgcctcttaaagtgctaggattacagatgtcagccaccacatctggccagttcatctcctattgctggttcattgcaaaggatacatttcagaaacagccaatgaaagagacgtacatgctggatgcagtggctcacgcctgtaatctcagaactttgggaggccaaggtgggagcatcgcttaaactgaggagtttgagaccagcctgggcaacatggtgaaaacctgtctctacaaaaaacaaaaaaataataataaccgggtgtggtggtgtgcacctagagttccaactactagggatgctgaggtgagaggacaccttgagctggggactggggaggcttaggttacagtgagctgagattgtgccactccactctagcttggacaaaagagccagaccctatctcaaaaaaaagaaagatgcccagggcaaggtaagttaggaggggcacagagctcccatgccctctgttgaacatgccaccctcccagcatctcctgtgttcagcaaccccggaagctccgcaaaccctgttcagggtgtttatggaggctttattatgcaagcatgattgataaaatctttggccrttggtgattaaggcagtctccagcccctcttcctcctggagttcagtgcatgaggctgaaagttccaagcgtctaatcatgtggttgcttccattggcaatcagccctcctcctgaagaaatctaggagcttgcagtcacccagtcatctcaacaacatccccaaatgcattcttaccatgctggagatcccaaagttcttagaggctcttgtgttagaaacctgggaccaagaccaaatattaaaacaaaagatgttcctgtcacatctatcactgaggtctttgtaagagctttagaagctctgtgccaggaaccagggacagagatgaaatatatatttcttttcttttttttgagacagaatctccctgtgtcatccaggctggagtgcagtgatgtgatcatagctcactatagctttggccttctgagatcaagcgatcctcccatctcaacctcccaagtagctaggactacacatgcatgtcacccatgcccagctcatttttgtagagtcggagtttcaccatgttggccagatggggtcttcttttgttgcccaggctggccacaaattcctgggctcaagtgatcctcccacctcatccttgtagagatgagatttagttatgtcgtccaggctgatctcaaactcctgggctaaatcgattgtctcacctcagcctctcaagtagctgggactacaggcgcataccaccatgttgggctaatatttatttttatttttttctagaggcgggggtctcactatgttgttcatgctagtttcaaacttcgggcctcaagtgttcctcctgccttgacctcccaaagtgttgggattctgggtgggagccmccatgcccagcaatyacaagggtctttataaaagaaagagrgtaggagattcagaattggagcaggagatgtggtgatgaaagcagaggtaagagagggagatttgaagatgcttcacttctggctttgaagatggagtcaggggccatgatccaaggaatgggggtggcttctagaagctagaaaagccaagggaacactttagagtctctagaaggaatgcagccctgctgacaccttgactttagccttaatagacctagtttgggtttctggcccctagaactgtaagatggtagatttgtggtgttttaagccactaaatgtaggaaactgcaaactatgttgcagcagcaagaagaaatgaacatgaagccaggcatgatggctcatgccggtaatcccagcactttaggaatttaggcaggaggatcacttgaggccaggagttcaagaccagtctgggcaacatagtaagaccttgtctctacaaaaaatgaaaaaattggccaggcatggtggctcacgcctgtaattccagcactttgggaggccgaagtgggcagattacctgaggtcaggagttcgagaccagcctggccaacattgcaaaaccccggctctactaaaaatagaaaaattagctgggcgtggtggcacgcacctgtaatcccagctacttggaaggctgaggcaggagaatcacttgaatctgggaggtggaggttgcagtgagctgggattgcaccattacactacagcctgggcaagaagagtgaaactctgtctcaaaataaaataaaataaaatactaaaaaatttagccaggcatgatggcatgaacctggagtcccagctactcgggagactgaggtgggaggatcacttgagcctggaaatttgaggttgcagtgagctgtgattgcgccactgcactccagccttggtgacagtgagatcttgaaaaaaagaaagaagaaagtaaagaaagaagaaatgagcatggtgggcatggggacagatggcaatgttaaatagaatggtcaggggtggcctcctaagtgaaaattgagtaaagacttgaaggaggggaaggagctggccaaggtgctgagggaagaggcttgtaggcagaaacaatagaataaagtgtctgaggtgtgtctgcggctctggaaggaggcccatggagcagacggagagagggagagaattaggggaagggggccagggaattgctgggtggagatcagtacagatcacataagccctgggaggttattcctggggctttggcttttactctgactcagatgggaactgcgggaaggttctgagcagagaggtgacatgatctgtctcccaatttaaaagcattstctggctgctgagttgagaaagactgtgggaagatgtgggtagaagcatgggggccaagctttggcaacatccaggcgggagatgatggtggtcctgaccagggycrtggtggtgttgagagatggtcagaggggagaagtaggggaggaggccagggagttactgggtggggatctttagtacatgttgaagacagtcaacaggatttcctgacagactggatatggggtgtgagagaaggcaggggtcaaggttgagtttgattgttactgaaattattaagtaattttaaaaaacactactgcctttcccaatcctaccaagtatgggatgctagattaaagaaatctcttcaggctcattgcagtggctcatgcctgtagtcccagctgtttggtaagcagaggtgggagtatcttttaagggcaggtgttcaagaccagcctggacaacacagcaagatctgctctttacaaaaatatttttcaaaattaaataaatgtagctaggcatggtgatgtgtacttgtagtttcagctactcaggaggctgaagtgggcagatctcttgaggtcaggagtttgaggccagcttgggcaacatagcaagacccctcactctacaaaaaaattaaaaaaataaccaggcatgggggcactcaactgtactaccagctactggggagctgaggcaggaagatggcttgagcccaggaggtcgaggctgcagtgagctgtaagtgcacagctgcactccagtctgggtgacagagcaggacctgtctcacaatacaaataaaaatacaagtaaaataatgaaatctcaagtcagagccttttggctctgcagcacttgcaacccctcagccgtgcagtggggtttgtgtcgctgggaatgaggagacccctgcccggtgttgttgcmtgtctaatcagtgttttaaaacatatattaatcggggtgggtgcggtggctcacacctgtaatcccagcacttagggagacccaggcggrtggatcacctgaggtcaagagttcaagaccagccttctctactaagaaaactccttctctactaagaaaatacaataattagccggacatggtagtgggcgcctgtaatcccagctacttgggaggctgaggtaggagaatcgcttgaacctgcggggcggaggttgcaatgagctgagattgcgccacttcactccagcctgggcaaaagaacaagactttgtctcaaagaaaaaaacaaaagtattatatcaacatgtaatggttttattattaatatgtgatgaatattaaatatttttaaaatcttgtattatatcaacatgtaatggctttaatatgtgatgaataatatttaaaaatttttgtcttattttctagttttaatataattatttacagaaagaaatagtcttagagttcttcaataaagttaaaaaatgtaaagggatgttagaccccaaaagattgagaatttctagtttagaaatattcagagtaagccacatacaacttgctacttgaactattttttttctttgttttttattttaggagatggggtctcaccctgtcacccaggcttgagtacagtagtgctatcacagctcactgcagccttgaactcctgggctaaggatcctcctacctgagcctcctgagtagctgggactgtagatatacatgacgatacttggctaatttttaaattgttttgtagacatggggtctcactttgttggccaggctggtgtcaaactcatggcctcaagtgacccttccacccctgcctcccatcctagaggtatgtgccatcacaaggagcacttgttcaattttctaaaaaaaaaatttctaaagtaaggctgtgggatgatggcaggaagataaaacagaagaataagttaaaatgacttattcacacatattcttttgatagcaagaagaacttttagtatatacattccttacaaacaaacaaaaggcagataaacaatgttgtataggaacttcaacacacactgtacaatattcccactttgctgacataagttatggaaatttcatggtttacttgagtgtcgctaccagtattttgcttctctgatcatttttatcaacttcctcatctgttaacttctctccaaggtatgtcatatcatgacatactgccgctgcacgaacatggccagtgtcttcctattaaacatgtagaatgctttcctaatttctctttttactctctgtctttgtgttttgcattttccttacttttattgtcagaaactccagaaagtcaatcatactaatttatcaccatttgctttattaatttatactttgcttatatggaattttgcccaacagacctcattacaatttctaacctgttttattttgttttgtttttttctgagacagggtctccctctcttgtccaaggctggagtgtagtagtgctatcacagctgactgcagcctcaaccttccaggctgaagcgatcctcccatctcaacctcccacgtggctgagactataggtgcttgccactatgcccaactaatatttggaattttcctatacgtggattccagaggggtgacagcgaaacgtgagtaagcatggattttggtatatgcagagatggggggctggaactaattctgtatactgagggacaacagtatatgtttttacaattacgctgtaagatacatactgttgcatagccttgaaaataataatttttaattgagtggaataataatattgataaaagtagcagctggccaggtgtggtggctcacactggtaatcgcaacactttgggaggctgaggcaggaggatggcttgaggccaagagtttgcgataggccttggaaacaaagggagtcaccatccctatagaaaaatacatgagttagcctagtgtggtggcatgttcctgtagtcccagctacttgggaggctgagctgggaggatcacttgagcccaaggaggctgagactgcagtgagtcatgatcaggcctctgcactccagcctcagtgacagagtgagaccctgtctcagaacaacaaaaaagtagcagctaacatcaactgaccttttaccaggtgcctattgataccatagtttaatttcttataactgtttcttatttcacttaccaactctgtcttcagttactccccagatttttactgtgtttgtacagatgaccttttgttgagattgaattgtctccccagaagtaagattactgtgagtcatggtgaatggacattctccttacccttgatgtaaatggacaaggttttgggtgcctcccagctataatcttagcactttgggaggctaagacaggaggattgcttgaggccaagagttggaggaggcaatatggcagtatggtgagaccctgtctgtattatttttaaaaattgacaagctttaccckggaaggcttatacacaatttaaacatccctcatagtataagaaagtgcccatttcactgcacctttgccagcacagggtattataatttmrtaagtcattttttgtttgattattttaaatagataaaagacctcatattactttacttgtcacatttcaacatcttcccttagcttattagctctatttcttttctgtctgtaaatggttgttgttgttttgttctttgagacagggtcttgctctgtcaccaggctggactgtagtggcataatcatgcctcactgcagccttgacctcccaggctcaaacttcagcattccgagtagctgggactacaagtgtgcaccaccactcccagctaatttttttctttttttggatagagacagggtctcactgtattgtccagaccggtctctagctcctggccttaagcaatcctcctgcatkagcttctcaaattgctggaatttcaggcatgagccaccatgcctggcctgggctagtcctatattctctagagttctctttactttgtgctagccaatctctcattatgctgttcacctgttataatgaataattctctgtattaaattttaccactttaaacttttgagcagtttatgcttcctgattggactctaatatgttaggaagggtcccaggagataaacccacacagatgggatttgggcataggtttggtttcccagggggcagtgctgagctctttgccagtgggaaatgggatgctggtgatttccaggaagtgacctcacaatgactcaagctaccacttactgttgattgtgacgaaatgccagctgaggcacatgccttgggagctaagtggttgctgcacttgaccactgtgaagactggtgtgggaagggttgttttggatgcacttgagcaggggtccccaacccctgagccatggagccgtaaggagccacacagcaggaggtgagtggtgtcgagtgagggagtgagggaagcttcgtctgtatttacagccactcccctttgctcacattcccgcctgagctccaccttctcagatgagcagcagcattagattctcataggagaacgcaccctgttgtgaaccgtgcatgtgagggatctaggttgcgctgtccttatgagaatctaatacctattgatctgtcactttctcccatcacgctcaggtaggaccatccagttgcaggaaaacaagcttaacacgcccactgattctacattatggtgagttgtataattattttattatatattacagtgtaataatggaaataaagtgtctaataaatgtaatgtgcttaaatcttttggcccagctcctacctcccggcagcctctccaggcccagaactttctccagtcagcctccacagaccaagctcatgactcacaatggcctatttaggcccataccctacctcacggcagtctctgcagatgaggctactgcctcacaacagcctccacaggcacagctccaccgttacaatggcctctttagacccagctcctgcctcccagccttctctccaggccctgagctttctcaagtcgacctcaccaggcccagctcatgcttcttggcagcctctccaggcccagctcctgcatcttggcagcctctccaggcccagcctctgcctcctgtcagcctctacagtcccaacatctgcctcacagcagattcttcaggcccagtatctgcctcactgtggaccacccaagccaagctcccaacctttcagcagcttctacacacccagctcctgccacccagtggcctctttaggccaagctcatgcctcacaagggcctttccaggcccaacttttgtctcatggcaaccttccctggccacattcctgcctgtctcccagcagcctagacaggcccaggtcttgcctcacactggcctgtctacatccagctcttgcctcacggtggcctctccaggcccagctcctgtcccaggacgtcatctccaggcccaaaacttcctcaagtcagcctctctagtcccaactgctgcctcctggtggcctatgaaggcccaaaatctcctcaagttgacctctccaggcccagctcctgcctcctgtcagcatctacaggcccaacctctgcctcatgggggcttctccaggcccagctcttcctctgggctgagtctacaggcacaactgctgcctcacaacagccttttttggcccagttcctgtccagctcacagcgaccaatgtaggcccaaaacttcctcaagtcaaactctccaggcctgccttcttcctggtggcatgaacaggcccagctttgacttgagaacagcctctgcaggccctgctcttgcctcccaggggcttctccaggcccagctcttgcctcatggcggctgccccaggccaagtttctgcctgcctgccagcagcctcaacaggcacagctcttccctcacagtggcccatttaggcccaactcatgactgtcgggccatttccaggcctagtgcctgcctcctggctgactcttgaagcccaaaacttcctcaaatcagccttttgcccaacttctgtctactgtcggactctacaggccagcctctgcctcacagtggaccctccagacccagatggtgtctcactgtggcatcctcaggcgaagctcctgcctttcagcagcctctacgggcccagctcctgccttgcaatggcctctttaggccaagctcatgccccacggcgacttttccaggcacagcttttgccttttgcagcctgtccaggcccagaatgtscttaactcggcgtckccaggacragctcatcctcccagtgcgtctacaggcccgtctcctgcctcacaacaacctcctttggtccaamtcctgctgagctgcttggcagcctctgtaggccacagagttcttaaagtaaagctttccaggcccaccttcggcctcccggcagcctcagcaatcaaactattccctcactgcggccaccgaaagccaagtttctccctgcctcacrgcatcctccraaaactgagcatttgcctcacggtggcctccccaggccacgaatctgcctgcctcccaggcagctgctgcctcacaatggtctctttaggcccagctcttgctaaaagacagactctccaggcacagctcttgcctcctggcaggctctgcaggcccaaattctccaaaagttggcctctcctaactcagctcctgcctcatgtcggcctacacaggcccagactcttaccacacagtagaccctccaggcccaccacttgcctgagcatagcctcctaaggccaagctcctgcctttcggcagcctctacaggcccagctcctgcctcgcaattgcctttgtaggccaagatcatgccgcgaagtggcctttcctagcctaacttttgctttttgacgcatactccggtcccaaaacttcctccagtcagccagtccaggccaagctcttcctcccaaaggcttctgcaggccaaaatcgtcctgaagtcaccctctgcaggcccagctcctgcctccaagtgctgtgtaggccaagctaatgcctcacagcacactttccaggctgagcatttccttttgtgcatcctctccaagccctgaacttactccagttggcctctccagaccaagctctccctcccagtggcctctacaggccaaaattgtcctcaagtsagcctctccagggccaactcctagctaccggtggcttctgcaggccaaaatcgacctcaagtcagcctcttcacacccagctcttgtctgtaagtggcctctgcaggagcaaaactgcctcaagtcggcctctccaggcccagcctcctgcttcccgagggcatgtacaggcccagcctctgcctcacagcagactctccatgcccagctcttccctgtctgctgcctctccagtccaaagctgcgcctgcctttcggcaacttgtacgggcccagctcctccctcacggtggcctcttttcgcccaactcatgcctcttgcaacctgcccaagtgtcagctcctgcctcacactggcctcttgaggctcagctcatgcctctcgtggcctcaacgggcccagcccctgcctgtcggcggcctctacaggcccagcctctacctcacagtgggctctccaggcccacctctttctcaccgtggcctcctggggcaatgctccccgctctcgggagcctctgcgggcccagctcctgcctcccagtggcctctgtaggccaagcccgtgcctcagggcagcctttccaggcctagcgtttgctgctttgcatcctctccaggctctggacttcctccagtcggcctctccaggcccagctcttcctcccggcggcctctgcaggcccagactgttgtcaagtcggcctgtccagggccagctcctgcctcccggtgccctctgcaggcccaagtcgtcctcaagtcggcctccccaggcccagctccggcctctcggcggccgctccaggtgcaaaagttcctcgagtcagcctctccaggcccagctcctcctgcctcccagcggcctctttcggcccagcccagctcatgcctcccgrmggccttcccggcctcctgcctcccgaaggcctgcacaggcccagcctcagcctcacagcggactctccacgcccagctagctctcgcctcactgcggcctcccaagtccaaagctcctgcctctcggccgctttggcaggcccagctcccgcctgccagtggcctcttcaggcccatggggctcattcctcacaacggcctttccaggcccagtttttcccttccggcggcctctgcggacccagaacctcctcaagtcggcctctccagacccacttgcagcctcccggcgtcctctccgggcccagctcttcctcccggctgcgtctccaggcccgactgctgcctcccaacaacctctttggactcagcgcctgcgcatctcctggcggccttggtcggcccacagcttcctcaagccaagctccccaggcccaggtcaggcctcacggtggcctctccaggatcagctcctgccctccgatggcgtctccaggccccaaatggtctccggtcagtgggctcctccacgcccagcttgggcctcccggtgacctctgcaggcccaagtcgtcctgaagtcggcgtctcccggccctgcctcccagcaagtaagcaagctcttttggctcaactcctgcccagctcccagccgcctttgtaggccccgaactttctcgagccaagctcttcgcgcccgcctactgcctctcggtggcctgtacaggcccagctctggctgtagaacagcctctgcaggccccgctcttgcctcctagggacctctccaggcccagctctcgcccccayggcggcctcccggggccaagtccctgcctgcctcccggcagcccgcgtgcggcccagttcctccctcacggtggcctgttgatgcccaactcatgcctctgacaccctgcccagaggcgtgagtccctgcctcacactggctcctcccacgctgagaggtcggcgtgagccccttgcctcacaccggcccctcccatgctgagagaggtccgcatgagccccttgcctcacactggcccctcgcctcacactggcccctcccacgctgacaaaggtcggtgtgagccccttgcctcacactggcccctcgccttgcaccggcccctcccatgccaagagaggtcagcatgagccccttgcctcacagcggcccctcccacgccgagagaggtcagcgtgagcccttgcctcacactggcccctcccacgctgaggtcagcgtgagcccctgcctcaacaggccactgtgagggaggagcagggccgcacgcaggctgccgggagcaggcagggacttggccgcggtggggcgagagctgggcctggagacgcccctgggaggcaacagcggggcctgcagatgctttctgctgccagagctgggactgtacaggccactgggaggcaggatgtgggcctgaagagcttggctgcagaaacttcggggtctacaaacgccggcgggagctgagccaaaagagcttgcttgctgggaggcaggagctgggccgagagatgcagccaggaggaacagctgggcctgcagaggccgccatgcgggaggcagaggccgggcctcctcaagtcggcctctccagacccacttgcagcctcccggcgtcctctccgggcccagctcttcctcccggctgcgtctccaggcccgactgctgcctcccaacaacctctttggactcagcgcctgcgcatctcctggcggccttggtcggcccacagcttcctcaagccaagctccccaggcccaggtcaggcctcacggtggcctctccaggatcagctcctgccctccgatggcgtctccaggccccaaatggtctccggtcagtgggctcctccacgcccagcttgggcctcccggtgacctctgcaggcccaagtcgtcctgaagtcggcgtctcccggccctgcctcccagcaagtaagcaagctcttttggctcaactcctgcccagctcccagccgcctttgtaggccccgaactttctcgagccaagctcttcgcgcccgcctactgcctctcggtggcctgtacaggcccagctctggctgtagaacagcctctgcaggctccgctcttgcctcccagaggcctctccaggcccagctctcgcccccacggcggcctcccggggccaagtccctgcctgcctcccggcagcccgcgtgcrgcccagttcctccctcacggtggcctgttgatgcccaacgcatgcctctgacaccctgtccagaggcatgagtccctgcctcacactggctcctcccacgctgagagaggtccgcatgagccccttgcctcacaccggcccctcccatgctgagagaggtctgcmtgagccccttgcctcgcaccggcccctgccatgctgagagaggtcggcgtgagccccttgtctcgcaccggcccctcccacgctgagagaggtcggcctgagccccttgcctcgcaccggcccctcccacgctgagagaggttggcrtgagccccttgcctcacactggcccctcccacrctgaccccttgcctcacaccagcccctcccacgctgacagaggtcggcgtgagccccttgcctgacactagcccctcccacgctgaccccttgcctcacrccggtccctcccacgctgatcccttgcctcacaccggcccctcccatgctgacagaggtcagtgtgagccccttgcctcacactggcccctcccacgctgatcccttgcctcacaccggcccctcccatgctgacagaggtcagcgtgagccccttgcctcacaccggcccctcccacactgacagaggtcagcgtgagccccttgcctcacaccggcccctcccacrctgacagaggtcagcgtgagccccttgcctcacacyggcccctcccacactgacagaggtcagcgtgagccccttgcctcacaccggcccctccacactgacagaggtcagcgtgagccccttgcctcacaccggcccctcccacgctgaccccttgcctcacagcggcccctcccacactgamcccttgcctcacactggcccctcccatgctgagagaggtcggcatgagcccttgcttcacaccggcccctcccaggctgagagaggtcagcgtgagcccctgcctcaacaggccaccgtgagggaggagcagggccgcacgcaggctgccgggagcaggcagggacwtggccccgggcggccgcggtggggcgagagctgggcctggggacgcccctgggaggcaacagtggggcctgcagacgctcttctcctgccagagctgggactgtacaggccactgggaggcaggatgtgggcctgaagagcttggctgcagaaacttcggggtctacaaacgccggcgggagctgagccaaaagagcttgcttgctgggaggcagggggtgggccgggagatgcagccgggaggaacagctgggcctgcagaggccgccatgcgggaggcagaggccaggcctctccagacccacttgcaacctcccggcgtcctctccgggcccagctcttcctcccggctgcgtctctaggcccgactccggcctcccaacaacctctttggactcagctcctgcccagctcccagtggccctggtaggcccacaacttcctgaagccaagctccccaggcccaggtcaggcctcacggtggcctcgccaggctcagctcctgccctccgatggcatctccaggtcccaaacggcctccggtcggtgggctcctctaggcccagcttgggcctcccggcggcctctgcaggcccaaatcgtcctgaagtcggcctctccaggyccagctccagcctcccggcagcctctgcaggcctaagttgtcctcaagtyggcctggaagtgggcctggaagagctrcaagttggcctccctgggcccagctccgtcctcttggcctctccaggtgcaaaacttcctcgagtcagcctctccaggcccagctcctcctgcctcccagtggcctcttttggcccagcccagctcatggctctcagcasccttcscaggccccgcttttgacttttggtggcctcttcaggcccagaacttgacctccagtcggcctttgcaggcccggcttcctgcctctcgaaggcctgcacgggcccagcctcrgcctcahagcggactctccacgcccagctagctctcgcctcactgyggcctccccagtcgaaagctcctgcctttcggccgctttggcaggcccagctcctgcctgccagtggcctctttaggcccagctcattcctcacaacggcctttccaggccccgtttttcccttccggcagcctyttggcctctaatttgtttatcttttgtgtataaatcccaaaatatggaattttggaatattgctaccattatataaatattttcgtatgtaatttatttggagtgagtttctgcaccaagcctgaattttttattttattttccttattatttggtgttaaacaggtttaatgacggtcatggcaactttttggcacaatgaaaaataccacccatgatcaacgtgttctgttctggggaagggggcaaaggcagggtgaatcactttcttaaaaagtacagctcaagttgggagtgcagaggaaatggggagaaaaccctcccgctgcctgtgtcgaagtgcaggagcccccacccccatactcacctgagtccagcccctctggggaaagaaagggtgcatgaactccccctattccacaggcgcctccctgtggcccaaggccctcttcacactccatcttgtagccccagcaggagctattttccgaaaagtgaaaagctctgaaggtcccacacttcatggtatgtacaggggctcggaggagggaaactgcccagctttccccggcacagctgcagggctagggggtatatataagaggagcaggccttggccaggtgtggtggctcacgcctgtaatcccagcactttgggaggtggaggcaggtggatcacgatgtcaggagatcgaaatcagcctgaccaagatgatgaagccccatctgtactaaaaatacaaaaattagccggacgtggtagcgtgcacctgtaatcccagctacccggaaggctgaggcaggagaacccagcaggaagaggttgcagtgagccaagatcgcatcactgcactccagcctgggcgacagagcaagactccgtctcaaaagaaagaggcaggccttattctgtcccagactgaaaggattaaatggctttacccaggagaagataaccatcctgccctccattgctacccccacatactgtccatgttctcagggggtactgtgagtcctgggatctttctttggggtcgcccacctgcctgtggtagttatggagacccccaggtgttgaggcagggctggggtgtccccttccagccaggctgtcaaggccccaactctggggcagaggcagtggcagggcagccagggttgcgccagagcctgagcagggtgaggtggggtcagacagggctgggagtcagggcaggggcagcagcagtggacccgctatgcacacatcttcttctccaaggtttgtgtgcagaacatcctgctcatgctgccccagcagcttcagttggcacctgctccagtccagcctctgggacccatgcagcggctcccagcggccctgcactcaccaccagcatccgtttcacctgcagttgaagatccgtgaggtgcccagaagatcatgcagtcatcagtcccacggagcagcccgcgaggctgaggctcctcccactggaccgccccccaactggcaccactgctgcccctgcctctactctcagcctcacgtgactctcgggcagaggcagtggtggggcagccagggcagcgtcagagtctgagccaggtgaggtggggtcaggacccccacagggctgggagtcagggcaggggcagaacaaaccttggaggggaggatgtgtgcatagtgggcctggagggcggctgtggcctagtggacaggaagaagcagtaggcctggaagagctgcatgatcagggccggcactggtccagggcacgtgcagtgaagacactgccttctcggtctctggttccctgagcccgtcctcggcttctcccacctgtacaggcaaaggggaagctgtccccatcacacatcgtacacttgtgggtgttgggctttgggctgcagctggagcatcttctcatcttgcatttgagcgtggtggggtcctccagtgcgggatccatgtccgtggggttccctctgccctgacccccaaagcccagtcagtttctcctcttcaggctctgccccccgggtggctcagcccagcttctgcctaggaaagccttagtgttgggagggaccgtgatgactgaggggcctggtagctccaggttgcccacactttcaggtctcttgcaccagaaggtggcaggatccattgggaggaaacaggtcgccttggaaggcgtccctgggcccccatccccaggggtgggggccatgggcccactctgctgccctgaccagattcctgggctttgaaggctcctgggcccagtaaggaggtgggtgccaaggttgaggaggaagcataggagtgtgtaggaggaggacggggtgggaccatagactttgccaaaaactgcaggtggatcgggggaccctgggggctcaggatccagcaaggggcggcaggagtaaaggaatgacaggtgcaaataccttcccaccaaagcccttgttgccctctggctcctccccagagtcgtccccactctcagtcggtcacccactccttgaacttgagatcagtgtcagtggtgctaaagccgtcatcagcaatgacatcatcacgccctcctcctcatggatgaccatgggctcctcgtcactcgctgtgtcctcaccggccatgtgctgggaatgagcagctcaggtgggcagcagcagggctgcccactggtcacctccctcaccaggggctgcaaagtggcctggagctccatgctgagtagaaggctttgggccagagtatgatgcagtgccagacaccacctgtgtcagttcctgtagtgcctgacggtctatttccctgccgtccaggctgtgtaccctgctgtgggagaaggcttgggccaggctgagccaggttccctgactgtgtgcagccgtcctgccccacagaagctgctccttggtatccgagctctggagtgtctgggccgcaactgacaggcgttcagaggacaccccaggggcagtggcagtgcccgtctctgatatgctccgctcccacgagcccttgtacactcctgctagcccctggcttgtgggcttggcctctgagctggacttctttcggtccttgttgcaagtgggccaccttcacttggaaggccaggtcgtagcacttctgcgtctcattgggccccagggtgtaccaccgcttgctcaggatctggctgacggtccagttatcctggttggggtgaccctggtgcgccctgccagagcctggtgccgcttgctgaagatcatgaccaccactcatgggccaccggatgtggtccttgtcccatttgttggggctgcatccatccttctcagaagatgagtcctgttccttgcgcagggcactgagggactgggcctgacatcatctgagtggtagaggcaactgggtgtcaggggacatgacggagaggaaagcttcatcgtggtcattctctgtctcactgtccagcagggactcccctgaggggcccagggctcctcctccatggtgggaggtgggcttttaccaggttccaccacccccaaagtgtgtggggttccgggccctgggctttcagggcaggtggctccagggggccgcgcagggtcaacactccctgtcccacctggtggacgctcatgagcaacagctgccaacttggcaggttgtttgctctggttggaggccactgagtgactggcaggttgccgggcctcgtgtggctgcagggaggggtcaggaaggggacggagtaccaggggaacatggccacagagcgaggttccacattcctccacatgaacatgctgacgccacgagaggcctcgctggacgcaggcctgtgggccgagtacttggtccgggcagggggttcctggcaggggctcacacctcctcagccccctcctcagccaaggtggcttgggcccagagaaggaggggttggagaggagcagaaggccaggcctcatgttttgtttttttttgttgttttgttttttgtttttgaaatgtagttggactcttgtcacccaggctggagtgcagtggcacgatctcagtggccttcatacctggctaattttttgtatttttactagaggtggggtttcaccatgttggccaggctggtcttgacctcctgacctcaggtgatccacccacctcggcctcccaaaatgggattacaggcatgagccaccgctcccaacttcattcatttttacttgaaaaactcccttaagcatttttttaaggtagatctagtggtcctgaatgccctcaactttgtttgtcgaggaaacacgttatttcttctttctttctgaaggacagctttgtcagacatagtattagttgctggcagtttttttctttcagcactttgaatgtattattcgattctgtcctgacctgcaacgtttctttaacttttgactatttgattatattgtgacttgttgagtatctatttggtttgaagctctttaggaatctttaagcttcatggatttagatgtctaaatctttcccatgatttaggcagttttcagccattctttaaataagctttcttctcctttctctactttccttctcaaactcccataacctgacaatggtttgcctaatggtgtcttgttggctttcttttctctttctcttttttttttcttttttttttttttttctttgagacagagttgtgctctgtcacccaggctggagtgcaatgtgtggtctcggctcacattgcactccaacctccgcctcctgggttcaagcgattctcctgcctcagcctcccaagtagctgggactacaggtgtgtgccaccacacccggctaatttttgtatttttagtagagatggggttttgtcatgttggccaggctggtcttgaactcctgacctcttaatctgcctgcctcggcctcccaaagtgttgggattacaggcttgagccaccatgcccagcattcttttctcttttttactccttttttctttgtcctctgactggataatttcagaagatctatattcaagtttacagattatctctcctgttgaagtttactattgtgttatatcgcccagtctggtcttgaactcctgggctcaagcgatcctcccaccttggcctcccaaaatgctgagtttacaagcatgagccactgcatccagtcagtcccagcactttgggaagctgaagtgggaggatcacttgagctcaggagtttgagaccagcctgggcaacatactgagaccttgtctctatataaaaaaaaaaaaaaaaaaaattttgggaggccaaagcgggaggattacctgaggtcaggagttcgagaccaggctggccaacatggcaaaaccccatctctactaaaaatacaaaaattagccaggtgtggtggcacacgcctgtagtggtggtgcatgcctgtagtcccagctactcaagaggctgaggcaggagaatcacttgaactgggagatggaggttgcagtgagcccagatcacaccggtgcactccaccccgggcaacagagtgagactccatcttataaaaggaaaaaagaaagaaaagaaaaattccatatctgagtgtttactcctgagtttttgagattgttattaagatcatgctctactgtgatgatttgggtttgtttgataatcagaaaaaagcatattcttttgggtgttcagccacactgtgctttggtgtcacaactgcacattggtttcacagctgcacgacaagttcgagcatcttaaaatgattcaacaggaggagataaggaagctcgaggaagagaaaaaacaactggaaggagaaatcatagatttttataaaatgaaagctgcctctgaagcactgcagactcagctgagcactgatacaaagaaagacaagcatcgtaagaagcaatagtttctgttactattctgagagccttatcattctacatcccatcttcctgtgagattgtctttgtagcatttaactctaattgcagttctcattttaaaaattggcttgcttattgtttattttccccaactaaagcgtgaa

SEQ ID NO: 96546 - DNA, 14064 bp, Homo sapiens
caagtcagagaggtgtttcctctctccccgctttcacattcaccccaccccaaatcatggagccgaaataaacatctccttcaagccagatgagaccctgtcctttctctggccatgggccagactggaccctgttctcccctcccacccttgaggatcgtgtgctgggtaaagggtaaagagcacagtcacagcagcggcagctggagggtgggcagcactcgctttattgtccagcattccacatggatagacgcaggacagcaggccagggtggtgggctaagaggcagcctgccgggcctgatgctgctgggcaaaccgctgcatccgctcctcgagctccggccgaaagtggcggatcagaccctggggtcggtggggggaccatgtgaaacagagtccaaaaatcccccaacaccctgggcccttgatgccacccaccctccgtgctacgcagaagggtggtgaatacctgcacaggccaggcggccccgtcacccagagcacaaatcgtatggccttctatctgcttgctgatctcccacagggagtcgatctcggccggccgggcatcccccctcacgaaacgtgccatcaccttgttcatccagtccacacctgcagccacagccacaagagagggcctgatgatctccccagccaggatgtggggcggcgcttgagggctgcaggccacgtggtggggaggaggttaaatgaagccacagcaagcaagcccccaacctgcccgatgctcaccctcacggcatggggtacactggccacagctctcgtgcttatagaactcaatgaggcgggcgatggctttcacgatgtccgtctgggtgacgaggggcaattagcaggcacccacggccagacagaagcctgggcctcagccccctagcagcagcccctcccccagttccagaagctcttcccagcccacccagcgttctggcctcctccagcctccctgggccccctgtgctgcccagactccggggtattctcctcagagcagccttcctccctcctcttccaccttgctttatctcaggctgcaggaactgagacctgagtgctggcaagagggttttctgggaggcccagggagggagacagcaaccaggagggcagggaccagggctggtgtgtgaacccttaccgagcggtccatgacgatcaccgcagctgtgcccaggcctgtctgtgcctgcaccagcgcatcgaagtccatcagcaccgtctcacacacagacttggggatcagtggggtagacgagccgccagggatcacagcaaggaggttgtcccagccgcccgtgacaccccctggggccccaagtcggtccccaaagggatgcatggtcagggctggggccggcacacctgcctagtcctgagcccaggcccttagtcagcccctagacccagccccgtctcctgagccctcccgcccaggctctctttgtggacacctgcccccactgcgcacccccccaccacctggctggccccaggccttaccagcatgcttctcaatcagttctttcaagggcacagacatctcctcctccacagtgcaagggtggttgacatggccagagatgttgaatagtttggtgcctgagttgcgttctctgccaaagccagcaaaccaggtacctccacggcggcagattgtgggggacactgccactgtctccacgttggccacagttgtggggcagccaaacactccttcagggaaatgggaagagaactggtggctgctagggggtggggcaagtttcctggcagggaggtgtgtcccagggtcctgcacccatggcagagcccctgctctaatatccccttatcattcttatccctgctggaccccaaactccagagatgcccattgccttgttcaccccatgcccttagcctcagaacaggcactgtgaaggtggagccacagagcagcactggtgcggcggggaccgaggcaggaggagggacagcaggcggccctgggggagcctgtgtgttgttgccagcctactctctatctggccccagccgggaagccactcagaaatccctaagaacaatccaaagggagcctagccagatcccgggtgtcacaggacacagtctgacccagggttacgccaggccttacccacgtctgcggggaaggggggcttcaggcggggcttgccctgcttgccctcaatggactcgatgagcgctgtctcctctccacagatgtaggccccagccccgcgcaccacaaacacgtcaaaatcatagccagagccacaagcattcttgccaatcagacctgcctcataggcctctcggatggccacctgcaggacaaaggtgtgagtttcccagcccacccccagcccaggagtcagcctataacttcaggagtcatgaagcccttgaaggcctcccacggtgaagctcctaatgctcctggtataaaaaattttgctagcttagtaaaacgaattggaaaacttgactatgatctggaacagataagcaagaaggaacacataagtaagctgctttgctgccaggaaaataaaaacgaagtagctactatcaggtctcctaactaccctagtctgtaaaggaaaaataaaagtctttataaaattaaaataaaaatgtaattgcctatatccttattgccttaacctattttatttttctatatttcctacagatataagtattattcatagttccaagcaatgaacataatgtattttctccaaataggaattgtttatattcataattattccgctctcttgctaaacacatagttccacttaggttttttcttcttgctacttgttttataaaaaatactatatttttgaagcaaaaaaaaaaaatttacaccagcagcattaggagccctggaaggaggctttgggagccaagtcccatttgggatgcatgcaggactggccaccactcccccagttcaaccactgacagaccaggtactaacacctcagaacaactgtgctgggtgaggggtgtgtgagtgcacactgaacaccttctcatctgtctacatctctccctacccacctgcagattggaggcctcattgtagaattcccctcggatgtagatataggcagcgcgggcgcccatggcccggccccccaccaggcagccttccagcagcttgtgaggatcatggcgtaagatctcccggtccttgcaggtgcccggctccccctcgtctgcgttcaccaccagatacttgggcctgcaggggcccacaggtcagacaggctacagggccatcaggactgggtcttcaactccatgccaccccactccacccagggaggcctcaaagatgtctcctctgacagccaatcctttactgccctcccaacatgtcccaggggctctgcttgctcaccaccaatgacagggagctcactgcctattctgtctttgggtggctatgaccacaagaaaggtcttcattcagctcatccaaacatctctccttgtgtctgcccctgagagccagattctactcttggtgacaaagagcattcctcaagctctaccatcaaaaggaggtaaagcaggtgacatttatcatttgctttatgtgccaaccagcatacaggccaaaagctgtatgaacattatctctttaatccttgcatgatatcactgtacctatttacaaaaaggaagctaaggttcacaaaggctgggaaattgcccaaacctctatgattaggaggcagagctaggatttgaactaagtctgcctgagtcaaaatcatgtgttgattctgctacataagtctcccctgtggaagtccacagagtaagtcccatccatttaaggcctgggaacatgtgcccacctcattcatgctaagtttctaaggaaagagcccaaaggcccagggaaaccccagccacccccaaggtctctcccacagccacatctgccccgcccccacacacacacctgccatctgagggcttattcatgaagctccacttgaggccagtggggaagccagcgcctccacggcccctcaaacccgatgtcttgatctcgcccaggatccagtcgggccccttcagcaggatctcctttgtcttgtaccagtcacctcgactcagggaacctttcagcctggacagaatagggaaggcaatgaaggggacaccttgctccgggacccaacacactaagggcactgtctcacctccagtcatggcggccgtacaggttggtgaaaatccggtcttcatccttcagcgagccaaatgaggttttcttgggtgctgtctagggagacaaagggtcaggaggcccagagtgctctggggccatgagggattgggccagaagctacagaatcttgggtctccctatttaggaggggctgggctagggctagggaagcatctatagcatcatagataccactgccacttagtaagcattttttttttttttgagacagactcttgctcttttgcctaggctggagtgcagtggcgtaatctcagctcactgcaaactccacctcccaggttcaaataattcttgtgcctcagcctctggatagctgggattacaggcactcaccaccacgcccgggtaatttttgcacttttagtagagacagggtttcaccatattggccaggctggtctcgaactcctgacctcaagcgatccgcccgcctcagcctcccaaagtgctgggattacaggcgtgagccaccgcgcccggccattagtaagcattttgtttagcaggtactggatggaagcattttacatccaaaatcccatttcatcctcataagaactctgataggaacgattttctctgtttcacagaggagaaaactgaggcttggagcaaaaggagcttatggaaggtctcacagtcaaaagcagcaggtccaatttgagcccaggtctgtcggtggccaaacccacagctgcatcacggcaccacacagccccacaagccgagtgtggcggcttggccctttcccggcctggctcccctgctggaccaaaacttgggtaggccaggggccttttatattcctacctcggccgaagaggcgaaatgtgtttactgatgggaaagaaatgcctccttaacacacaggtgatggaggggctcacttaggatgaaatgaggagccccacgacccagtggagagcgcaccagctgagggcgacgggattcccatccttttaagagcacttttcagccacttcagggcgcagagcagtggacgggaaatcaggaggtgcgcatccctaaatggggcaatgaccccttcacgccctacaaggctgtgacaaggagagaatgaaagactaggggtcttcacaacctgcaaaacttccgccaggccgaggactgtaaaacaagggaagccagcaagtcagagggtcaagggagtcggccccgcgttgggacccgttcccctacttcaaccaggccggagcgggggccttcccgcctggcctggggagaagggctctccagaggccactacagaccccagggactgctcgtgcacgggcgcggccgcgacacccggccccaaacacccgtggccccagccaggctgggcctcaccgtgtcgccgctgaaacgcacagatacccgcgcgggaagcgaccagccgagcagccgccgtgttgccagcatcgcggcgggccagatgggtcacctcacgctgtcaccttcatagcactgaggctgaggaactggcgcgatagagacgctaggtggcgcgcaggaaagacgtcacgcgcccgacgccagcgccgcgcaccggtatcgctgcgccccttcaacttcgccagcggccccgcctcctcgggggaggactgagaggccagtgccttggcgccggggcttctgggagatgtggtcccaccggcctggggtccgccttcctccctccaccgggctggcatttagcggtggctgtccccaccgctcgctctttcgctccctccttagcycgccggctcccagcctttgatgccacaagtaaacaaacctcgcatgtcgcmttctgctgggtcctggtgtgttccactttctatagattcggcgtttagtgtgcacctgcggtatgcatcggtgtatcatgggaggagtgaaaagtcaggcaggtcatagcccgatcctcatgactacgttgcaattattctgcccagtgcgagccctgccagactgtgggcttccccaccccgggcgtccgtgtgctcgaggaaggattgcagactccaaggcagggggttgttcgcggagttcttcccagagggcctgtcacggaatcctaggctggggtgaggcagagaggatgcagatggtcagtgcacggcacaaactcttgctggcgccgctgagttctctcagctcttgtcaggagagtccagcactttctgcttctgcccaaaatcctggcatggtccctgctgcttttggaatcagccactggtccaggatttaagggctctgcgaccccgtccttcgccagggtcatcacgcccaggccactgctgtgaaccccacccccgtcccccaagacccctttctgccgtcattagactttagggcgtttgtgtggctgtccccctccctcggttttcccctgacctgaggaggtccctctgtcctttgccttcccaggaggtcttggaagcctgatgaactcgtctttttcagtttcctggaaccctctgctgtggtcctcgtgataagagtgacctttttggcctgctctccccagctcttttccagtcctcatggtgaggaaccatctctgttcttttgtgctgtaatcatccttcctgatctctctaaaacgtgctgtttacaaaactcctttgcagctattttctcacataccccacagcagccccacaaggtgttcactccattttgtccacgaaaaaactgaggctcagggggattttgtcctttgtctgtgggcatgaagctgctgagtggtggagctggactggaatctaggcctttcttcctttccacagtgccccgcacacagcaaacccacagaacaactgacacgcatgtgacagtcactgtggacgtcagtgacattcccaagagaggcaccaagaaatctcttccctgtctgaggtttcccagacagatagagtagtatcaggcccagagcccaggagtcctggctgccagccgcaggcyccctctcttggtcagggaaagaggttgcctaggcaaagctggggattacacagctaatccgggctcagacctgagtcctcggatccctccctttggggcagaagaaggggggcaggtcagagccagcccagcgggtggattccttcctcatctgtctctaactgggtcaaaggaatacaggctgagggagatgcaggttggggatgctggggacaggagatgctgggcatgaggggggatggaaaacggagagtgagggaaggatcctctgttcattcagtgccaggctctgggccaagcacttgccatgtgttacctccttaatcctccaaaactccagcctcaggaatgatgagccctgttttcagaagcagggtatcagcattgctgagtggcctgcccaggatgacacaactgccagaactcggcctgaggtctcctaacaacaaatcccccactggtccccacccactggagcacctacttgccaggcttctcaagcgaagaaggagatccactctgatgtcatctcccaggagccttctctgcagcatctcaggtcctggctctcacctcctcagcacccatcccatcctgtgtcactctgtatatcagcctccccagccagcctccaggccacaagccaagaggtatcaagggctcctccctgtcccactggccccacatccactgtgtctatctggtcaactttaccttccaaacattccctgcacagtgatagatggctgtggccctgtcatctctcacctgaaattaacaatgtatccttggggcctcccaccctcacatcttggctcctccagccccttctctgcaaacatggaacagtgggattattataaatctcagacccgttttgcccctttcctgcctgagagtttttgtggttccccactgccctcagaacaaagctcaagaccctttggcctggcattcaaggtcctttgtgctgccacctgtcaacctccccagttccagctcctttggctttgcccatacaagctggatctgcaccagaggatctgtcttcctcccaacttggccctagtcctcctaggagccctttggacgtcacctcccccaggaagctttctgcaaccaccctacaaccgtccctataaactttataaaaccaattagtgtggggaaaagcaagagagatcagattgttactgtgtctgtgtagaaagaagtagacataggagactccattttgttatgtactaagaaaaattcttctgccttgagattctgtgaccttacccccaaccccgtgctctctgaaacatgtgctgtgtcaactcagagttgaatggattaagggcggtgcaagatgtgctttgttaaacagatgcttgaaggcagcatgctcgttaagagtcatcaccactccctaatctcaagtacccagggacacaaaaactgcggaaggccgcagggacctctgcctaggaaagccaggtattgtccaaggtttctccccatgtgatagtctgaaatatggcctcgtgggaagggaaagacctgaccgtcccccagcccgacacccgtaaagggtctgtgctgaggaggattagtaaaagaggaaggaatgcctcttgcagttgagacaagaggaaggcatctgtctcctgcctgtccctgggcaatggaatgtctcggtataaaacccgattgtatgctccatctactgagatagggaaaaaccgccttagggctggaggtgggacctgcgggcagcaatactgctttgtaaagcattgagatgtttatgtgtatgcatatctaaaagcacagcacttaatcctttacattgtctatgatgcaaagacctttgttcacgtgtttgtctgctgaccctcttcccacaattgtcttgtgaccctgacacatccccctcttcgagaaacacccacagatgatcaataaatactaagggaactcagaggctggcgggatcctccatatgctgaacgctggttccccgggtccccttatttctttctctatactttgtctctgtgtctttttcttttccaaatctctcgtcccaccttacgagaaacacccacaggtgtgtaggggcaacccacccctacaaattagggaagaagtagggggaaaagatgaaaataaaccaagcctgcagcatactcagtattcatcatgaggtcagctgctctctgacctgcttcctcatggctggttggtgcctgttgtcccggagtgacaaagaccctagattatagctgcccttaactgctgtataaataacaacttgaacatgaaatgctaaattttccttttgaagtattccttcagatcctgcatgctgataaaactactgactcaactggtccccatgaggagctggctcaccaaagaatgcggtttccaatcccaattatttcatgccccttgcttaggcaatcaacaatcccaaatttccagccccttgccctccacaatctccttaaaaaattcagtccaaaactccttggggagatggatttgaaggtctcctcccatctccaaacttggtgccctgcaatcattaaactctttctctgctgcaaaccctgctatctcagtgtaattggtctgttactgcatacatatgggcatacaaacctgttggtcctacaacaaccccatacaactatcttgagcacctattgtcaggcccagtgtgagtaaggcacgatcagatcttccccaacccccagcatagagcttctcaagggagggacttactcaatattgtaatcaaatattatatttgaaaaatgaaaaacatcaatttttttcctgtgtttgaaattgaagaaataccaaaaaagcaagaagaaagtaataacattttatgaccatcctgacaatacctgttactgtttctaggtgattttttttttaatatttatttattgagatggagtctcgctctttccacccaggccagagtgcagtggtgcaatcagctcgctgcaacctctgcctcctgggttcaagcgattctcctgcctcagcctcccaagtagctgggattacaggtgcacaccaccacacttggctaatttttgtatttttagtagagacagggtttcaccatgttgaccaggctggtctcgaactcctgacctcaggtgatccacccacctcagcctcccaaagtgctgggataacaggcgtaagccaccgaatctggccaaattgttactttttctcgaactcgtgaactctcggctcactcatgcgccaccgcgcccggctatttattttttttttttagtagagacagggtttctccatgttggccaggctggtctcgaactcctgacctcaggtgatccgcccacctcggcctcccaaagtgttgggattacaggcatgagccactgcgcctggacatatactctgtttttgttttcacttcatattcaggaagggggatagagatattagcttttgcttggacatgaaatttaggtatgatctaaaaatttaagagtaatcactaaaaataaaagtaaaatgtgtaacttccaatagtaggggagaagggactagcacaaaaacctcaattcaactgaagacaagaaaacaaagtaaagaagaaatacagggaaagaatgctaaataggaaatacaggccaggtgcggtggctcacgcctataatcccgacactttgggaggccgaggcgggtggatcacttgaggccaggaattcgagaccatcctggctaacatggtgaaaccccgtctctgctaaaaatacaaaacattaaccgggcatggtggcaggtgcctgtaatcccagctactcgggaggctgaggcaggagaattccttgaacccgggaggcagagattgcagtgggccgagatcgtgccattgcactccagcctgggtggcagagcgactccgtcttaaaaaaaaaaaaaaaaagtttttctagtttttcttctctggtcttgatgtgtttgagaaagacatagtgggtttcaggttgtatcctgctgtcttgaactggaaatcttttttttccatgaatttaaactggaaagagtaaagtctatcagtcacggctggtggggcacgcaaaggacaaggtgaaagtatttaaggcaagcagcacaatgaatgacgcatcaggcccaggcctctctccctgctggcccagctcaggggccatggaataccctccgcgccgccatcctggtgtggccactctccatcactctgccagggtctcagggtccctctttggcatataccatcctgatgcattagacatggtctgcagtttccatcacggaggaccagggaggtcttgggcatacacagaccccaggtaccggtatcagtcccctgggtccggtcctgctggcgcctccctgcagcaaactcacatccggaaacccagaagatcaggtctaggtaacgattgtttctgcattggtcctttgcccatccccctgttgtcacctgaagtcttgcctataccccctttgtcccttaacacaaaagctcttgtcccttaacacgaaagctctagtctcttctttttcactcctcatagtccttgatggctatctgggatgacagacaccaggaaaagcttacacaccccttcaacgccccttctaagctgtgagaaatgtgaaactcgtcttccccattcctcaatggttcaggttttagaaatgtcaggcctcatcttataaatcagcaaaaagaaaaagaaaaagactgttgagtttttatgatcagaaacaggttgagcagttgtcttctattacattttcttcctcctggggccactttgcaccttgcaaagacaatttcctcccactatgcaaaactcaaagccacaaaggacattgaaggggacctctgtggctgcagccggtcatgaggccatggccagtatttatggcttccttcctttatcgtgcacccacagtccccgccagttggcccctcagctgctgggaggatgggggagccaggctggttcacagggctttcaccaggtggatgacttaatatcataaaagtgtcacatcttcaaattaatctgtaaattcactgcaaattcccatcaaaatcccaccagggcttttcatggaagtgggaaagctgacaccaaaatgtatatagaacaacaaagggccaagaatagccaagacaattttgaagaagaagatggggtgggtggtgggtttcgccctggcagatagcaagactgattctaaagccatagcaatccagtcaagtagaccaatagttcttacatatagtgcatctttatcatcattcgctagatgttctgcaattttggttttgatttcttctttgacgggagtcattttaagaaagatttataaatgtacaggggttagggggattttgtttcccggttttgttatttttcattttattgcctcataatgaaagactgtcatctgtactatttctctccctctccccacccctcttaatccctggaatgttctaaaatttcctttaaggcataatacataattattatagtaaatgtcccaagagcaattgaagggtggtgcctctctgctttcctatggcagagtttgaaatcttatttaaaactgccagagtccttgtctatctgtgagcttttgttgtataggtgcccagatatgttacttggtgcacagatgctcttaactgtagtcacttgagatgtgtcctactttctttctttcttcttctttcttttttttttttttgaaacagagtctcgctttgtcgccgcccaggctggagtacagtggcacgatctcggctcactgcaaccttcacctcccaggttcaagtgattctcgtgcctctgcctcccgagtagctgggattacaggtacatgccactgggaccggctaatttttgtatttttagtagagacaggatttcaccatgttggccaggctggtctctatctcctgacctcaggttacctgcctgtctcagcctcccaaagtgctgggagtctcctactttcataagagataaagtgtgtatttagatggaatgtgtgttttggttttcatggtctttgtggcttttggggtattctgaaggattagtgggaatcccagctccaccattaaaaaccacaggtcctccctcttcctgtcaaatgttgcaaatatttcctttatcatctatctgataatctaataaacaataatgatcattgtacaagagaaaacttcagataaatgcatgaggtgatggtcacactaaatatcctaatttgtttgtttttgagacaggatctccctctattacccaggctggagtgcagtgatgggaatatagctcactacagccttgacctcttgggctcaagcaatcctcccacctcagctccaaagtagttgggaccacaggcatgaaccaccacaccccactaattttttaattttttatagagatggggtctcataatgttgcccagggggaccttgaactcctgggctcaaacaattcttccgcctgggcctcccaaagttctgggatgctagatgtgagccattatgcccagcctacctaatttgatcattataaaacacatatatgtatatggaaccaccaaattgtactccataaatatgtacaagtacaatgtatccattaaaaatttaaaaagagaaatcttttgttttgatatagttaaattcattcatttaggggccttatttaagaaatctatctcggtttttttggtggagacggg

SEQ ID NO: 96547 - DNA, 14601 bp, Homo sapiens
attactgggtaaatactagagctgtgcaagctactgagcaaattccagaatgttcttatgtatgttaaaggaagataaattatggctcacaaagaatttaaaatagcatgggggaaatactttattataatgtcaagctggcatgagtcaggaaataaatgggatgacagtagtcaccttatccataacagaattacctgggaagtgtccgagagatacatgccaggcacacattaagaactcagtaaaggaggccgggctcgggagcgcacgcctgtaatcccagcactttgggaggctgaggtgggtggatcacttgaagtcaggagtttgagaccaacctggccaacatagtgaaaccccatgtctactaaaaaaaaaatacaaacattagcggggcatgatagcacttgtctgtaatcctagctacttgggaggctgaggcataagaattgcttgaacctgggaggcagaagctgcaatgagctgagattgcaccactgtgctccagcctgagtgaaagagtgagactctgtctcaaaaacaaaacaaaataaacaaaaagaacccagtaaaggaatgcgggcaaggattcttacttacaagcatcatattttgggacctctgtgcaggtctttacaatcttccccactcatcattctttcagcccacgcatatttactgagcagctgcaatgggccaggtaacgtttgtgggggctaagtctacagcagggaacaaaacagatgaagggagctgaaattctaggggaggcagagactatgcaaagaaatgagtgtgtagaggtcagctgatagggaggaacatagagaggctggagccggggacaactcgcagcggggtgtggtgtgcacaacacctgcccacacgctgcttggtatatattccgtggtgaattccatcttgctggaggcagccccctcttctggcaccacagaagtttctgcgtcttgacacttctgccttcaaaatgctcctagttgttccactttcaactgaaacaatttagatcatcaggactcctagagcttctcacaagtcactgtgaaaagctgttgggtatgggcccacctaggacctttcctgagccaggagctcatgggtttggacccctgttcagcagaaacatgaatcccctgcagggaagcagggtctctggcagcccaccccaccatagcctccagtctagaacaaaaggacatttgcttgaggtatcaaaagcctcaaaaagtgctctttccttctactgcatacgtaattccccttttcggagtctattccaggaaatggctcaatgtgcagttttgtgcccaaagatgtttatcatgttattttttgtgggtttttttttttttttttgacagagtctcactttgtcgtccaggctaaagtgctatggtgcgattccagctcactgcaacctctgcctcccaggttcaggcaattcttgtgcctcagcctcctgagtagctgggattacaggtgtgcaccaccacacccagctaatttttgtttttgtgggttgtttttttttttttttgagacagtcttgctctgttgcccaggctagagtgcagtggtgcaatcttggctcactgcaacctccgcttcctgggttcaagcaattttcctgcctcagcctcccaagtagctgggattacaggtgtgcaccaccacacccagctaatttttgtttttgtgggttgtttttttttttttttttgagacagtcttgctctgttgcccaggctagagtgcagtggtgcaatcttggctcactgcaacctccgcttcctgggttcaagcaattttcctgcctcagcctcccaagtagctgggattacaggtgtgtgccaccacacccagctaatttttgggggttttttgagacggaatcttgctctattgcccaggctagagtgcagtggcgtgatctccgctcactgtaacctccatctcttgggttcaagcaattctcctgcctcagcctcctgagtagctgggattacaggcgcctgccaccgtgcccagctaatttttgtatttttattagagacggggtttcattatcttggccaggctcgtctcgaactcctgacctcgtgatccacccacctcggcctcccaaagtgctggaattacaggcgtgaaacaccgcccccaggcctatcatgttatttttaatagcaaaatgtagagagctcctcctgcatgctccacattaaggaaattattaattaaaccatgatatgttaaaatatctgttacaggacagaagttttcaatcattaataatgatcatgaagaattttaaataacacggaggaatatctactacactgttaaattggaaacgaaaagagaaaagcatttcagaattataattccaattttagtatatgttaacctagaggaaccaaaatgccgtgaaagaaaacagtatgaactactaagataggtactttctgggagagtggtttctgtaggattttctgtttctgtcttgagcttttatacttttctctgttttcaggatttgtttcagtggtcatgggttacttttctgaatgaaacttccaaacttccaaacaaaacaaaacaaaaaccttaaaaatggtggtgcctttataatcttctccagcagcccaactctgggcagaaagcctcccagaagtctttgacgtgagcactcccaagagctatatagaatggggaagccatctaagatttaaaattctattcctagaagcttatacccaaagcagagaaaaagtaggaagcaatatagaaagctagcaggaaggaaagttcagaggatgtggaaaaacgcagacccagcaacattttttaaaaatctaaaaaaaattgcaaatggcttccctggaatggtggctcaggacactgcccctagatgctgaggctctccaggcacagaaggttccctgctttaattcaaagccccatcacaggcacagtgtggtttgatctctacccctctggagatgtgttgcaattccaagtcatagctgagggtctgaggctcagagaggtcaactgacttgcctgaggccacacagcctgtgtggggcagagcagtaagtgggaccttaagccttctgatctgactctcagagtactttaccctgtaccccagctggtccagggtgctgaggcgctggcacagaaaagcctacgttcatatccagcagagtcacctggtggccgcagggtcttgctagttaacccctgagatcctgggtttcatccaaaaactgaagacaaacataacactggcctaaggggcacagtgttaagcacgtgacactccacaagcacacactaaatggacacactaattactgtcgttattttgccaccactatcctccctggagtacaatccttctctggcctcctggtgtgctcccaacaccctcaccaggcgagggaaggggctcatctcactgtctctgtccctagagccgagggcagagaaggtgctaagaaaatgagcactgtggggaagagacagggatgaaatctctcaagaagagacagccttgctgggggagacattcagcacggtgtttctaaacttcatggagtttctggacaactgtgctcaattcacttctaatttcaaacagatggggctgcgctctgtcactcccacctggcccagggccctggcgagcagcaaggggcctctcccttctgccctgctgagaggggagttgcgtggcttctaagagcaggggaagtgggtcctaactcttctgtggggggttgctaatctcccaaacaccacagagaacatgggagactggagggtccaggtctcaattcacagacactgccacacccccatgcacacctctgtcctagcacaagtcacaaaggtgtgcagctgttgctttctccacccttagaagcagtacagagattccacagccaaaccacctgagcctcaatctggctctgcccactttgctgggcaccctcaggcaagtaactcaacctccctgtgccttcatttcctcctctgtaaagtgaagatggtgatgcttaaagtggcagctacttcaaaggggcactggaaggatgcatcaggagttcctgcagagcatttagaagggtcttattgcagatggaatggccacttgtcctgctctgtgacaaagcaaagtcgactctcatgggactctcaggacctccctggaggcctgcaagaggtcagcaccattcctaggtaccagatttatgaccaattgagaaatgtctgttgagcttcttgctggagaacaagtacaaacggactggcagaaggctgggtatgggagccacaagggtctctatccctcgtcctcgtctctcgaagtgggagtgtattttttcacccactggatgttgtgacacgctttagccaatggaatgtgggaagaagtgtcaagatgccagttcagaaccataatcataagagctttgtgtccttcggggagcttctgacctccattatgagaaaaacatgcttcaggcagcctgtgaccctccagtcagggccaactcaactcaaagactaagccagaaccaccacatgtgacccacagacctatgaaatctgaatgaatgctcttatgccatttcatggttttgttacacagcaaaaactgactgatacactctctctgctcaattgctcctataccttgactctcgctggccctctcagctcaagcaaagcctggaacaataattaaaaaacctacctcttaagcttttaatgaagactgaatgagctattattaccccaatttttcagatgaaaatgtgaaacacaaaggagttaagaacttgtgcaaggtctcccagctagaaagtggtagagccaggacacaaacccaggcattgtcccctagagacagagctctcaacaaccaggcaacactacagccccaggtgagaccagcattttgcaggtgagcagatcctgatgtcacaggatccttgggtgtcactttgccagccagacacctctgtggccagcagcgccttctacctgagtattgctcatgcctgctgggctcatgtcacccacttggcccaataggttgtgctcagcttatgctaccagcctagatcacacacctgctaagggcaagccaggcgtgaagcagcaaggggtgtgtgggtgagctagcacagggtccagccactgtgcacagccaggtacgctggttgctgcgacaggatggacagctccgggcactggcacaggtgccagctccatgtgagtctgtggctggaccagatgtaccacacatggcttctgctgcaggcacccatttctggacccatgtctggatgaagaagcaagacagctgccacattcctaagtaacacatctagaaatgttctaggagaacacggtggcacccggaagcttggagacaccaggaactgtgcagtcccaaagaaggtgtcacagccctggcttggggagcccctagatctgggcttcccaacgggccacagctcttctctccttcttgtcacctgcaacgtggtgaatggagggaggagggtgtgtttcagccctgtttgtgttacagctctttcagtcccaccattcagcgggtcctgagttcttgtaccatgtccaggaagaatgaggtatgcagacaactggagggtgagcaaggcagagaggagcctcactgagtgacagaacagctttcaggagacctgcagtgggtagctcgtttccacaggcaggtcgtcccagtgaatgtcaagctttcagcagagaagacacatagtgggtagctcctttctgcagttaggtcatcccaaagagtcaaggagacccagagtgggtagctccttcctgcagctggtagtcctgacacctacatgtctggctgagtccagggtttttatgggctcagaagggaggaagtgtgtgctgattggtccatggatggccatggatgggcttggataaagcaccataagttcttcctytaggccatggactccccctggaactggcagcctggcccccaggcttcaggctgtccytgggttgaaggtggtgtttcacctgggacctgcccctttctgcccaggagcctgtctgcctcctgctaccatcaacatggcatccacagcacccaggctgtgcatgctgagggacgcctgcaggcctgcactgagctgccctcagtctcctcttggcttccctcctgtgcctgtcggtgaccaaastctggagggggccaagatgacaggggtctggcatgtcaacaccacccagagtacatacacacccagctgggttgcgacagcacccaggctcagtttcaactttgctccaaaaatcagagtggacactgggagtggtgagatgccagggagcgggagcaggcaattacaagcctgcatgacaggggggcttcctgggtccccaagagcagagggatgcctgggtccagagctgtggctaggtagctgcagctgtgcctgggagctcagggctcctgccctgmcaacttgatagaaggcagggttcccacctgttcctggtccctgccagctctgtggagcatgcagccccagctatgcctcccctgctgcagctggcatccccacagcagctgctccagataggccactgctgccatcactgacaattctttcagctcacaaaggtagccatgaattaggaaagttgggtcaggctccaggcagcctgcgttcaggcaagctcaagagctgaggatgcccacctttgcaaacatggcaactctacccatccctgtgtctcctagacactagagcccccaccctctgctattattctaccatactcattccccagccagagtctgggacctgggctcctgcagataattctacatcaaaaacaggggaagtagaaaagttcatgaaggctcctaagtctctccaaccacccagggccacaaaatccatgtagaggcctcatgaagggttttgtctaatcaaatagtttgctccaaccagccagcatctttcttttgatctagatgtctgtctccatagaaaaggacatctattgagggtcagggacctaatggcttgtgggttcctgagatacaattatgtgttacggagaaacaaagaaaattttgagacttttaggcaacagagaaaccactgcaaaaccctgtaattacagggcaagaagaaaaaagtgagctgccacagtgcctggggtagaaatagcctgacgttgcttcctggatggacctagaatgttgcacaaggtgacgtcagagtggttgcttagaagagaggtcattggatgcagttttccagctgagtacagtgggtggggtgcactgttgttcctggggcagagtgggcgagggagctgtggggagagatgaggaagcaggacaggaaaccacatttgctgaaggccaagggctgtgacaggcagacactgagacatatcgctgcactcagttctcagaacaactcagygaagtcaggccttgtacccctagtcactagacaagaaaacagagggtcagagaggtgaggagacttgcccaagctcacctgatccctgayctgactgattgmaggcccagggcacccatccatgctaactaaggtgcaagttcgtactgtcacttctttgtgaaggggctgctctttaacaaaggataaaatgagaggttgttctactctgaggggaggggaggcagagagaaagaggggagagacttgcctctgtttgcctacaggtgccaagccaaaagaggggcttgagcttgtggagaaagcattgagttggaaatcgaatcacccagcttcarattctgcctctactaatgccatgtggtctggggccaattactttagttctctgtgcaacagtgtcggcatcgggagtaaaggggttgaggtggtggggtgaraagtgtccactcttggtccctgcaagtctgaatcctttacactgcatgtcagcttagaataatgacggttatgagcaaggagcctggaatcagattgccaggttcaaatcccaactttgccctaagctacagtgtgacgtcaggcaagccacagatctgtgactcagtttaccctgtgtaaaatgaggataatgataatattcacaacctaggttgtcatgacaattaaatgacatcatgtgygtgcaaccaaaatagcatttggctcatcctaggcacgggagaactatatgccaggactcagcccatggctcacgcagagctggagaagatctgggggaaggaaaaacagcttgcttgctgggcggtcccagactgcaaggtctccacctaccccagctcgcatcataactccttgaagtcaatccagatgggctctggccaccccaggggactgagcccattcccatcgagagctcattaaaattacccagaaatgggctgggcgtggtggctcacgcctataatcccaccactttgggaggccaaagtgggcagatcgaagtcaagagattgagagtatcctggccaacatggtgaaacctcatctctactgaaaaaaaaaaaaaaaattagctgggtgtggtggcgcacacctgtagtagcagctacttgggaggctgaagcagaagaattgcttgaacccgggaggcggaggttgcagtgagccaaggtcacaccactgcactccagcctggtgacagagcgagactctgtctcaaataaaagaaaaaaaaaattacccagaaatgacgcacttggagaaacctatttagtttcactcctagggcccccagagaccacaccaagccccttgccagcattttgtgcctgcagggaaggagcaggacctagcctagattgctaagctcagtacctacagaatttccattcacttgctcattgatttattcacatatcctgcatgcctgtcctgtgtcaggcactgtgctaggcattgagggcacaatcctgactgcaggacagtctgtgccctggaagagtctctgtccagtgatgggaacactagtaattagcaattaacaagtacattgagctatacaagctgtttccctctacagcctacactgagtcaagaccaggggtcatcgaatgacagcccacgggccaaacctggccttcccacctatttttgtaaatgaagttttgtggaacacaaatacattcattcatttatgttttgtctatggctgctttgtgctacaacagcaaatgtgaatagtcatgagagatatgatttggcccacaaaacctaaaatagttactgcctggccctttacagaaaacatttgctgcccctggagctagggtattagggctccaagggtaggaccacatttcccctctccaccccagggctttgcattcgcagtccaatgtgaccagatgaaaacgtgtcacaagacggggcatcagcttcccaatggagatggtccttcccatgagttagcaagggtcagtaaatacacttgctggatgaataaacagaaaaaatggcatttctggtagaggaatcagcctgtgctaagacacatggggctctgcaactaacaagctagtagagaaacacagcacaggtgggacaaagcgaaccagtggtgaccgagcagagcatacacagatttgcagacagctgggcagggccaggcatacggggctcgcgggccaacccctgtggtgatgggtcctcccaccaatgggaccggctttctagccctcttgccacagtgcttaaggtgacgcagatggagaacgactaggtcctcgccctgtggaatttggcatctactggaggaatatgtcaggcaaatgccagacagaaagtgggccagagaggatgcggcagttctgatgaagaagagagatgggccttgggagcttataggtcgaaggtgctgctaccgagcaaatgtacaaggtcgtaaaactcaggacctgctggctgtcccttatggtgggatggaaaattgagaggcccagctaacaggggaggcagacaggcagacagatgaactcccacctgaaggtgaggacgccaggcgagagctaacatggaatatcaggggacccagaggaggggctccgggccccatggtgggctctagggtagatggccagagaagcctaggaagtcagcaacaggaagtcactgcagtccagcaaggggcagttttaccttggaggcatgtcatgtcaccaaaggtcaacaagaacccctctggtctggccacccccttctcatctcatttgcccactagcccctcatgcactgcccaggttcccagactctcagttccctgactcaccaggcatagctttgtaacccccatttgagggctgtcccccagacacccacgtggacaaggttcttgccttcctcaagtctctgctcatctttctcttctcagtgttgctgaccccgggcccctctgctgccagcgctccccagccccccgcccgctcctttctagcacctgttctcctacacatcatgaaatctcttatttgttaactttgttatttattagaagtctccttgactgaactgtaggtttcgcaaggaacgtttgcttgtgagtttatggaagtgtccccagggctctgaaccctgccccgcccttgaaggcattccactgacatttgataattgaattaatgaataaactagagcagggggggtgacatggtgggtcttgtcctattcagaatgccttccaggtgagcatcacgctgaggacctggacgcacagcaggcactcagaggacaaggagccagtgtcctgaggccttcttttttttttctttatttttatttttttttttttgagacagagttttgctcttgtggcccaggctaaagtgcaatgacaccatctcggctcactgcaacctctgtctcccaagtacaagcaattctcctgtctcagcctcccaagtagtttggattaaaggcatgtgccaccacgctgagttaatattttttgtatttagtagagatggggtttaaccatgtttgtcaggctggttgtgaactcctgacctcaggtgatccactcgcctcggcctcccaaagtgctgggattacagacatgtgccaccgtgcccagtccctgatgccttcttagcatactccaatgctgtgctcagatcactgacaccaaggcttttgttgttgttgttcttgaacctatgagagttttcaaaggctaagggaatgcacatgcctttgtaaagctcatatggagagcttccagacaaaaagcatttcgggaaaagcatcctgtgtgacaggaggagcagcctggggtttctggggacttcctggggccagcatcgtgggttccttctttgatttctgtggtgcctggaggcagatgttctccatcaggcagctaaatgaagacagttgcttcatcagcaaagggagggaaagaagatgaggagtgtggtcaggagttgtcagaaagcccttaatccggagctccggtgacacaaagaggtgagggcaggggtccgcagactcctggagccctaacagctgacctgtatctggactcccacatttatgattatgctctgcagcaccccaaacacagcagtggctgtcccccgctcttagtaggggatagaaaagctgccttaagaaatagctcttacacattcatatttttagaaataatgtgaaatgggtgacttttgctatagtaacatttgtgatttttcaattggttttagtatatgtaatatatatatagcataaatatacatgactatatagtacacacacatatatactcacacatatagtatatatacattatgtatgtgtacatataaacacatgtatgtatatagtatgtatgtgatatgtgtgtgtagctatagatacataacctgtatagcgtttaatatgtacctggctgttctaagagctttaaaatattaactaatgtaactcttacaataatcctacgagtagctactattatcccactttacagaggaagtgaggtgcagggaagtgaaatctcttgtctatggtaacccagtgggctgcaagtggatccaggatgcagttcctccctgccacctccctgaccccaggcagcctgcttaaaaagccatgttcttctccagtgaaaacacatggacacagggaggggaacaacacacaccagggccagtcagggggtgaggggagggagagcattaggacaaatagctaatgcctgcttaaaacctagatgatgggttgacaggtgcagcaaaccaccatggcacatgtatacctatggaacacacccacacgttctgcacttgtatcccgaaacttaaaaacagaaaaaaaaaaaaaaaaaaaaaaaagccatgttcttaaccactgtactgcggttcgtaaaactacgtttcagggatctctgagtcattaagatacttctggggaatccatgatatcaaagccattttcataatgagacgaaggcttcatttactctttcacactcattctgtcctgcatgtacagtagagctccccagagacaaatgacatctgatttcacgaaagactgaatacagaggcagagatgaaaacccagctgttttcctttaagccagatagtaaagggatctgtaaaataataccactcttctaattttgttgttgttgttgtttgtttgggtaagtagttattttttcatgaaaatgtcatttatgggatgggcacagtggcttacacctgtaatcccagaattctgggaggctgcggcgggtggatcacctgaggtcaggagttcgagaccagcctggccaacatggtgaaaccccatctctactaaaaatacaaaaattagccgggtgcagtggcatgcacctgtaatcccagctatggcaggagaatcgcttgtatctgggaggcggaggttgcagtgagccgagattgcaccactgcactccagcctgggtaacagagcgagactctgtctcaaaaaaaaaagtcatttatgttaccatatgatagattctttattgtgatttttcaaatgaagtactaaataaatattgaaataattcctcaattttaatatagaatatgatacatattaacagataaaagccatgacatcaaaagctacttgggaccaatcaatagtaatagagtgaaaggctcatcctcgagagcaaaaactttggggcggctcgtgtgatgccatactctgctgttcctcagtaccgaatgtccagtggtgttctgaggaggacacgtttagcaatttgccagaactgttcttcctgcccttgtgcaggatctatagcatccttagccctcacctacaaaatgccagaagagtccgcaggtgctgggacagccacatgctcctccccagcgtggagggggtgatagtttggggacgagaagcatagctttggagggctaacttctgcttcactccttctctcactctttcccatattcattcgttgaaaccactaaggtactaattaagtgccgggctggagctgaaggagtaggtataaattaattagtctttcttgactacgtttccttcagaggaattactcaggggccatggttctctgaatttccgctggatgctggaattcctggaatccctggatttccatggaatgtgggccttctagtcccccagcgcccccgcagtccaatggcactctgaattccgtggagacccatagaattccaaacctcagagttgtgtaaaattccttaagtctgtggtaccctggggaccagagagaatgacgtgcaggtgttgcagacacccaggatctcatgatccttgtctgtgctatttttccccgtgaattaccaacaccctaatttttcaaatggacttgaggtgagtcatgggctctagtgcaggcatgggctctcgagcagcctacacacaggtgtgagagctcaccccgctccccaccaactcaccgcacattagtccccaagaaatgagagccatgagaatgggctttctctcctatcaggagcgagttcctctgtctgaacttcctgtcttttcatccgtgtgtccatccctcccagctccccattcctccctgacttgcactctgtgccccattggaggcagatccacttgcccgtcaaacaatcccactgtggctgtatcctgacctttgtactgctccctgtcccagcctcaatagggatccccttccagctcttgttcccccatctccatctcccttccactcctaatttcacagcaaagtcacaatgggtaacaggtggcaagaaccttcaaagcgttttcagtatctctctcctgggaacttatcgaaaggacatagttcaaatgacagaaaatgctaaaggcaacacggtggtgtttgtgataatgatgatgatgacatacgctaatatgcaaataagcagcaacagggagagatgagtacttaagtatggcacttcctcttgatgaaatattaacacaatacaaccatatagcataattgtttggggcaattccagaacactc

SEQ ID NO: 96548 - DNA, 21581 bp, Homo sapiens
ctgtgaggacacaatgggagccacactcaaattgccaccccaaaggtcgtcctgaaaggttatgaggtaagtccacacatcaagtcctgacagaaggccactggtagctgcaaagatgtcacaggcctctacccacagctccaaagacagaagaggtgctgatcccaaatcacctgcaggagtttgttccaagcagcagcacctttcatctaaatcagaacctctagagggacacacaaatggtaagtgtccctagcccacatcagagacacaaagaacacagaccacagaggcaggtcccaatgcacctgttcccatcaacagtacttcccctcaaggaagtactgcaaaagagagaagtacgagccggggctttccttaagctactaaaaggctcatcacccactcctcttccacctccagaggatctgggcttctcggcaatcaggggacaagctgtgctgccctcacttggggataacctgctgcttccccacgtgctctacctccagctctgaatctgctccaacttctgcaggcagcctcacctcattgatctgtctccgctgagctgaaatgcgcttctgcttctgtttatgcaggtgctgctcccgcctcctcacgtagtcctcggaggagtaggccagcgggttgtggaactcgtcatagccctcgtccatcatgtaccaatcccgatcggcttgctgcagggcaggaggcaaagcaagggagtgagggacagatcaagtttatgcacgagacatggccaacagaagaagggacgcttggtaggaagtcactactgcagtggagctacccttgtgaggggtgcaggagaggcctccctgcagacacatgccatctggagaaccacagtgggcaactacacaggactggagggcagcccatcacgatagcacttcttagatttaccacatggtggcaccaacacataacagaacagttaggtcagcctactgcagtgagtgacagggttcaccgtgccgtctatgcctctgcaaagagactccagggcattgggtctgaacagggctcaggtgtaccctcatcaaagcccagtcctgctagagggtcacccatctacagacggccaccagccccgatcagcccctcagaggtataaaactttaccctctggtcatcttcccactgctgccgctcctcctccgtgtcaaatgaaattccttcttcgccctcctcacgtcttcctggaggagcacaggaagcaggtcagtccatgccctggcctgtccccagcggccccagacagatctgcagggccatgcagctccagaagggcagcccctgctcatcctcgctagggcaagcaagcctgctcttctgcctgctgccccacaggcctcacctcggcccctggacagacgcggggtggaccccaagtgtcttctgtcatcggcccactcgttatatttgtaggagggagttggcagaggcgtgtcatccgagtacttgcccctcacagacctgggaacagcagcaccagcatcacaaaactgtcactgagctaagccacgtcctcctggccaccatctgctctccctgccgaggctccttaccgcccacccagcgaaactgggctgctctgcccagaacatcacctgtctcgatctcgagtggacagccgatggctccgctcagaatcccgataggaaggcgtcggggagggcgattcccactgtgagcgccttgaggagccatagccactgtcctcttcctcccaggtagaccttgaaggggtggctgcatctgggccacaaaagacacatccacaggaaacatctcacttaaccatgacatggtctagaaccagttgccaaaagtcaattccccaaatttactccttttactatttctaaaccttgcatgtatctataacggttaagatcggttttgacagtttttaaagatatctcaatttttaatggtccaggatgtatttttcctttttttctttttttgagacaaagtcttgctctgtcgcccaggctggagtacagtggtgtgatcttggctcactgcaacctctgcctcccgggtacaagtgattctcctgcctcagcctaccgaatagctgggattataggtacccaccaccaccccaggctaatttttgtatttttagtagggatggggtttcaccatgttggccaggctggtctcgaactcctgacctcaagtaatctgcctgcctcagcctcccaaagtactgggattacaggtatgagccactgcacctagccaatggtccagtttgcattctgtgtttatgacaacattttaagggatatttactttatctctacaaacacacccttcttggatataagtagttctttttaataaacacttcttctacctccagctccctattctttcctaccatttggaaaactggccattcagcaaaccagcctctcaccttacaggaaccatatccaccccaagtgcagagctgtgcccacctgactcagaaccaactatcccaagatgttcatggtagaatcgggaattctgactcaatgcctcagcaatctcactgaagacgagtcactcactctgccttttatacacttgaatcctcacaagccaccaaaacagtgagtctacctttaggtcgatgtcgtgggctctcgggttcatttcttctgctgctacgctctgaccctccatctcgctctgatctgctgctgtgcctacttctatcccgctcatctatgaagagtcacacgaagcttaaaaacatgcatcccatcctaaggtatacacatcttcaccctagagaaaggacaggctgcccactcactcacaggtgcaacctgcactgctcgaatgtgatccgtggactcctgaaactcacctatccccattctcccaagggggaaaaatagttactgcctagaaaatttcaaacccacagtaacagttattttccagcaagaattcaaaaaatactagtgcgagtttacagtgaatcattttttttaatagttacaattctatcagctataaaacttaatactgagcaaggacagcattggatttttttgtctagctttgttccatagcactgtcctttctctatcaccaatactattagaaatgctggtctcttatacatatttacccattatctcctttatcatcaattttcataataaaacgaagaccacacactcaaggagagcagctatgttacaggcaacagctcttttcttaaactagtattcccaatcccagcagggtcaaaaccactcaggcggacatcatgcaaataggactccctaacaaatgggtgttgcaaaaactcctgcaacaagaaaaaggctgacacatttattcgaatgctaatggacaataggaactgtgctggacagtttacctctgtccctcttgcggtcatagtctcgatcccgcgatttctccttcttccaatccttttcttctttggacgaggcatagacaccatgttccctccgctcccgctctctctgccgactgcgttcccaaaactcttcgctcacaccacccggatgggatggagtctctacccgagcagaccgataatgtctgaaacagggagagcaactggtaaaggcccctccataggagaaaaactctgccctaaaacctttggctgtccaaacaagtgatctgtccttttccactttctctccctgggacgcaggctcacatatggcaacaacccaaggcatttctaacctctaccatctagtctttattcacctttgtttttccccacaaattcctacctaccttcagtattacagaatcataataaaatcataaagctctaaatctccaacaggaaaactgagagataaacatgagctgttattttccagcctccgttcgcttccctctgggctaacccatactaaggcctttacctgtctttccggatattttggccagcctggtcaccgccctcttcctcagcatccttctggtcatccttgctctcttcccagtccttgtaggaggagactttggacttcttcttgtcctccccatcgtccttctcctctcgctctctccgtttcagggaagccagcaagtccagtccgagtaatgaagggcggggagcaggagccttgaagacatgctgctcgctggccgcacttttggacttgcaaataagaccaccaacctgacagtccagatcagtgccttccaatcgatggatcgaggcatcctcactggtgtcccccatcacaggatctgggatttctctggaaggaaggcaaaccatttggtactagagaaggctcagctctactatatcccacaataaatgcagttatggttatatgtaggtgattaaccttccccatctccccttaagaccaggactacttttgctccctctctccaagacctttccatcaagtcactgcctatctccaaagattctcctattccaacccccaataaacaccaaaatagatacacacacacacacacacacacacacaccccatacattcctccccagcccccacaaagatccaagaggcaataaaaagtctcactaagggacactttctagagcctgatgtcagcagctgtaacagggatgtagggaaaacaccactaaatttgaatcagaaacctcaattagaaaccaggctcttgacactttctacctgtatgatggtaagcaaataacttaatctttgtttagccataatttcatatctattaaatggaaaaaatttttaccttatctaatccatgaagctattgtgagaatcaaacaaaaagtgtatgtgaaaccataaagagtagctctttatgtaaccataacagttaacataaatgtaactgctacattgtattatttgctatcctcctatatactgttggtccctcacccatttttttacatgagttctacctcttcctctctttaaacaacaggtacagcagcacagagatggggcagaaggctaccgtccatgttctccatactttagtggcttttcttggcctagctgcgttttacagaaaacaatttactcacagcagccaaaatcagtttaataacaatccatgttcaccaaaaatatttatgagaaacaccaggttaggaaaaggtgttactgagaagtatttaagtggctacaagacttctggcactcaagttggaacaagctcctctttacctctcactacacatctgccactcatcaacatatatcagttctggatgcttggataattcctctcattccaacaagttagcaaagcaaaggagatgccaccagaatccagaattgtttaccaaactctaattaaatgcacagctctacagagtattgccaaacagactggacacataatattaatgcagaaacaagagttacattttgaaaatgccatcaggcagaacagaaaaaaagaaagctgcatattggtgacatctgtgcgcatgtgaggaaatccacacaagaaggtaaagatatacaggctctactcaatagttgtctaaactaggaaaggtaccctggactgccattctacgcagttgagagaacactggatgtgttgttgactgctgtagctcaatgtctagcaaaataagcgtttgataaattaaaaaatgaattaatttaaacttattaaaggaggacaggaacccaaacatttctggagacagcaagggaagattccagcaacacaggacaaggagacagccagagagaacttcattagctgctgagacgaacaaataaggagctaaagagcaagattcttgagaaggattaatggcaaagaaactacaaggcgtacgagaaagccagggaagaaagaacctggattcattcattcaacaattattcactgagggtgtccctgagccaattgctgttctcggcgatagcaacagagaacaagacaaaaatccccgcccacctggagctgacattctagtagaagagatcgcccaccagattgcctggtataaatgacactgtgagagagcagaggaagacacaaggagtcctactcgggctcggtgacagtctggggtgggttaaagcggaggcctgggagagggaccaaggccactccaggcagcatccctggatctcagcgaggccgctccaggcagcaggatttgaccagagcaaggaggaaggccaaggcggccaggacggatgcagcatccctgaggtgagtaaggcaaggtgggtgacagggacgacagaggaactccccaaactggggcccggacctgagcaggggaccaatatccgccgcctagagccgccatgattacagaagggcaggccaggaaggaagaagggactctcacctcaccaagcgcgactcttgggacccttctgtcccggattctggggcgccggcgctgccacccctcgctcagacaggctcaaggagccaaaatccacaccttgaaagcggccattattgtcccttaatactttgcgcgccccctctatccgcccaaagctaccatagagagcagcctggaacacgcccgattcctggatccaagtgtggaacggtacgccaacaggctctcaaggcctcctctggggctctgatcagacacttccgagtctccttgtgaccaatcactcttagcctaagagactacatcccgcctctagtctgggggcaggaaaaggaggggaaaaaggtcgaccatctttaatacgggcggaggtgacgcctagcttccsgtcagagccgagcaaggtgggcggtgactagaagctcttccgtttattgggctgttgagcgggggccgaccgacggccaggagtttcttttctgcgcttgtgcgttttctgttcggtttccttcccgctagcggggccacgagggttgctaggcaacagcccctgggtgacttggtcttagggtcctgtccggcttggggctgatgaaaggagctgtccgcgcccgggctcttccgagaagtggttgctgacagccacaaagtgaaagggagtgaggcggcgtggacgagtaaggtaagtgctggggtcccttagcgcttgtgggccaggagcagcgcaacacaggtgactttaaatatgtatatcggatattttggaaaatggagatgcgcgcccggctgtaaataaaaatcacccatgcgttcacacgcagagatgaccactgatttccagttgtttttctggaatacattgtagtaagattctgtacaaaagtgagttcaagctttttttctttttttggtgtttctgcagttgtggcgcgcgcctgaggttccagctactcgggaggctgaggcgggaggattgcttgagcctggggagttgagaccagcctgggcaacatagsgaaaccccgcctcagaaaaagagagggagagaggaaagcagtggagttattggtcaaagagtatgtcagttttctttccagaaaggttttgtgtctgcattccagcaggaactccctgtgcctgcccctaccactatcttgtttaatttttgccaattcagtgactttgtaaacatatsttttaatttgcttttctttgcttactggtaaagcttaactttttagtttatttactgtccatttgtacgtcttcttttgggaattctctgtgggtatcatttactatggacattttcttagatgtggtctcagttttcctctcctgcttccarcgtttgtccagttgcacccctagcctcaccactaacaactttgttctccccttactttctcctttcgatcagtaacacggaggaaytgctgtttgtttgaattctagtgggacagatccgtcttctctttgaccttccctttcattggtaatttgttctgctgctcacatctgatgacgtccctttgggccatcaatgtccctgtttaaagtatgacctatagctggaacaatcttatttcctatgtgaattttagttaaataattcctttttttttttttggagacggagcttcgctcttgttgccttgcccaggctggagtrcagtggagcgatcctagctcactgcaacctccgcctccagggttcaagcaattctcctgcctcagcctcctgagtagcttggattacaggtggcayctgccaccacgcccrgctaattttttgtatttttagtagagacggggtttcaccatgttggccaggctggtctcgaattcctggccataggtgatccaccctccttggcctcccaaagtgctgggattacaggggtgagcctggcctaattcgtatcttaaaatgtgacttgtgacaaaaaaaataggaaaagaaatcctcccttttcatatttggaactgaattcaaaataccgaccatctcaatggagtctcttatagatgaccacaaaactaagcttctttgtcaaagagtttctcaaaaatgaaatttctaccaatcatgaaaatagattattgtagtagaaggacccctggactagaaatttggtggcctgtattctagtccttgtcattgtagtagaaagtgcaactgtaagcaagctagtttgtaaaatgacggggttgkattaggtcccttgtacctcagtattttattatttgtttatggtattgtagttttcacacacactcttaattgatctgtttgccgtgtaatgaggtgcacctagtaaggtgcacacsaagaatctttaagccaggacttgtaataatataaagtatacaataaaggactgtttaaaaagtgtaacacatgcaagaaataatatgctgccatgacagagaatatggatgttctctatatagagatatggggcaatcttcataggttaggtttgaaataatgaaaagtgctgaagagtagataaagtgtgtgtgctgaacatctgccattggtccctccacagccattcttcawcctcctctagactgctctgggacagggaggtttgcctgcctcaacaggcccctgccctctggttccagttggagtcagccggtggttgcatgagcaaaggtcagagggagggaggagagtggctgcaacacctaacagcaggctgccctcctatacactgtcctctccactcacctctttctgccacacaattcttataactgcttcctaccgtggcttcttcctcccatggcctagggatgggtacagcatcccgctgttactagccccaaagtagtacactttaccgtattgtttttctacacctgccttaattaaactgccttcaaattaccaaagttgagagtgtcatcgctttcctgctggaacactgatacaataggctatcttttgggggtggggagagagagaaaaaaaatatcggaacgcatatttgtattttttggtgaatgcataacaaaactctgaaagatacatgagaaactaatgaaagcagttatctggcccgggggagggaacaatgaaaactggttccaaggagcagggacaaagagagggaaactccacagtgttacctttctatgatgtttctttcataccatgtgaatacattagctactctgtgaattaattttttttaatgagggctcacgcacttaatctaaactgtctttaaacattgcacctttatttcaggagtgacagtgaggattcacatttgggttatttcaagatgagcttcctactgcccaagctgactagcaaaaaggaagtagaccaggcgataaaaagtactgctgagaaggtgttggttctcaggtttgggagagatgaagatcctgtctgtctgcagctagatgatattgtaagtgaatgtctaaaataaktggtttttattaataatctgtatattctcacttcagcatctgagtagtacatgagagggagtagtcagggttgggtatatagctgttcatttgttagttcactaagagctgattgtgtgcctgccctgaaccaagcccccaaatctgtgtgtgctgaatctgtcttggatgtccttacccactagaagctgtcaatgctgtttcaccaacaaggtgatggaagagcagaaaactattaacaagcatctgtgaacactatcttttcagtgctcgcagtagtgggataatagtagccccatttcccagtaggaaaaaaaaaaccagagaggtcaagtaacttcccacaggtgcagatccactatattgcagagttgagatttgaactcagttttctgtagctgcaaataatcttttctagtgtgctgcctccagtatgtgcctgatgcagagagagacctaacccagaactaagacctcttaccgccatttctactgctaccataccgtgtaagagctgagcgtacaaatcctcrtttccgtggttacaatgarggtgtgatgtgttagcttggggaaaaaaggaccagaggattctaccctcagtcatargcaggaggaaataccacagaggtcagtgatgtagacactgaagccacactgccaaagttcaaaccccagccctactgctcaggagctgtgtgacctggggcaaattactttaccttcctgtgcctcagtttccctatctataaaatggggactctgatagcatataccttataagaatgatgtaaggattaaatgagttaacaaatgttaagcacttaggacagttaccacatagtaatgttatataagtgtctgctactaattatcgtggttttcatttctgggaggrttgggaggaaggagacgttagggaatttcagtatccacatwacatatttctaagttgtgttgttttaaatgagcatgggctacttttataaaagcattcaaagaaagaaattaaaggaagaaayagattcacacagttttccccaaggatttgtatgctcagctcttaacacgggatggcagcagtagaaatggcgggtagaggtcttagttctgggttaggtctctctccacaatgaatagacaggaatactcccatgctgtcaccctcctaaactcacacagttttccccaaggtccccttctaacctcacacagttttccccaaggtcccttcctaacctcatacagttttccccaagattccctcctaaccccgttgcagtgaatgagactctggaggatggggttatgctttgtctaatgtgggagccacatgggctgcattgttggcccaggagttttttcaaacaaaacactctgttgtagtaacaagtttcacagaagaaacattaagctgcctctcatattgtaacctttgtctctctcgtcatttgcagctttctaagacctcttctgacttaagtaaaatggctgctatatacctggtagatgtggaccaaactgcagtttatacacagtattttgacatcagttatattccatctactgtctttttcttcaatgggcagcatatgaaagtggattatgggtaagtgcagttgatctgaagttaattgcaaccttgtaagtttccttggtaagcattttcagtagcttgcctatttccatgtgatgttggctctgtgagtcttatatcagtactgtttccccaattgacgcactctctaattttttatgcaaaaccttgctacaaaatgagagtgcttctggtatgattgtcaaattttatttatttttttaatagtgcatacacatggtttgtcaaattttaatttccgacttaagtatgaagaaatagtacaggtggcaaagcactaccatccataagtctataaaatataaaatagccatattagctaaataaagaactcttaaaattttcccaggaatttcatttgaaacaaaacatgtagtttttcttaagcttttggactggtaagtggcatttatraaagaaacattccttctagcaaactaagatgtgcttctctcttgcaaagtttcctgcttttcgccattgaattttaaatcattcttcaacaaagcctgtcaagaataagtaacatgatgtcctctttagtgccttccactccatccaattaccatctcaatacttaatattgatgattgggtgcatccatgattctgatcatttcttactgtggttgatgtgtccacttatctagatctgtgtaccctttttgtctttatttgaaagtatgtgaaatattatctgttttaaagtgttttaggctgggcatagtggctcaygcctgtaatcccagcactttgggaggccaaggcaggcggatcatttgaggtcaggagttcaaaaccagcatggccaacatagtgaaaccccatctctactaaaaatacaaaaattagccaggcatggccaggcgcagtggctcacgcgtgtaatcccagcactttgggaagccgaggcaggcagatyaygaggtcagcagatcgagaccatcctggctaacacagtgaaaccctgtctctactaaaaatacaaaaaattagctgggcgtggtggcgggcgcatgtagtcccggctactctggaggctgaggcagaaaaatggcatgaacccaggaggcggagcttgcagtgagccgagagcgcgccactgcactccatcctgggcaacagagctgccgtctcaaaaaaaagattagccaggcatgatggtgggtgcctgtaatcccaactactcaggaggctgaggcaggagattcgcttgagcccaggaggtggaggttgcagtgagcagagaacgcaccactacactccagtctggtgacagagcaaggctccatcgcaaaacaacaacaacaacaacaaaaaaaaarcacaaaagtattttaaagctgtttattctactggaacacatttgatgtaagtattaatttggtacaaccttttatgggggccagttcaacattatgtatcaaatagtttaaagtttttaaactttttaacccagtaattacacttccaggactttaatatgatgttgcagatgcacatttaacaaatgaaagaaatatatgtcagctagaaaaaagcatattactgaataatttgtatgacataattcccaatgttgggaaaaaagaagtttgtatctgcacayayacacacacacacacacacacacacacacacacacacacacacaagattggaaggatagacactgaaaagtgacctctggcctcatccgtgattttatttatttctttaaaatttttacagtaacatacctggtgtttgagatacttttctaaaaaatcaattttttaatacctaccactcaaaaggccatgaatattgaatgggctttgcacaatgcccaggcaaaagcaacaacagcaaacgaagaaacaatgtgcactccaacacttggtgaaakctgcttgatgatttgagaagtgataaaaatagattttgtgattacaatagcttttgaagctaaagctttgcacatgacagagctttcatgctagtggcccacagcactgggttgagtcatttactaaatggaaaaaaatgattgaaaaattaatgttgggctttatttctgaagtctcattgacaagaagaaaataacaaagctgtttttcattttgtttatcctgaaagtcttcaacaagtgattactcaaagttcttagagcagttgtttctcttctatgctgtctagatctccagatcacactaartttgtgggaagcttcaaaaccaaacaagacttcatagatttgattgaagtaatctatcgaggagcaatgagggggaagcttattgtccaaagtcctattgatcccaagaatattcccaaatatgaccttctctatcaagacatttagtacattaattgctgtcaaagatgaagaagaaggcacatcttgrcacagtacctgaatccagctgtgctgtgtttctggagtcctttggaaacatgtgtcccagaggagaagaggtttgacttgcgtgtagaaaacccggcccctgaggaaaagaccccactggttctctgatgacctgggatgcctaactgtctactccctgcaagcctcagagcagccaagtcattggtgttcattttccccacagtgatttttgtaacttctctttctaatgtttttctttatccctttaatacagaaccctcccaaacattggctagtacaacttgatttcatcatgttcatttgatacacaagtgaactggaaagtcacttcccatagaagcaaaagtacttattttctaccctagctgggtgcatgtgtgtgcacacacacacacacacacacccccacacccctttgccggttcctcgactcatacatccctcgtgctttcccatctccagtctgtattactgtaggttctcttcaaataattaattgagcagacaagtttgttttattttggagcctttttggctctggcttttaaacattgtcctggttggctcatttaatttttttttttttttttgagaccgagtcactcttgtcacccaggctggagtgcagtggcgcgatctcggctcactgcaagctccacctcctgggttcatgccattttcctgcttcagcctcctgagtagctgggactacaggcgcccgccaccatgcccagctaattttttgtatttttatagaggcgcagtttcaccgtgttagccaagatggtctcgatctcctgacctcgtgatctgccctcctcagcctcccaggtgctgggattataggcgtgagccaccgcgcgcaccccatttaattattttttatgttataaaatttaatatggaaagtgagaatttgaaccttcaccatccaccactctattcaggtaaaacaatgaatgagccaccttagcaggagcagatttttcccagaagctgctgcctcttcctgaggcagaaaattggattactaaggctcaaaactaaaagagatgtcagcattgttggatagaaatgtcacctatatgggatttgcctgttttaataactttgtaaggaattcttgctcttctaggggtgcctggcgcaaccgtgggcaagttactgctcctctttaaacctcgtggtggttattgaaacagatttattagaaggagagggtaggtgcagagctggagagccatgggtgaggcagcttgtgacctgcctagcagccgctgaccacctctccaacagaarcctagtcctgttcagagcagcactgtcactgcaagtccagccccctttgccaggggctccattccacccctttcctgcagggaggggtgccatgagtcttgcttttggctcatacaggagagagggaaggctgccaggcactgcttgtatccctgctgataagaggagggagtcactccaggaataagacaaaaggagaggaggaggccatcacctctggcctcttccatcgtacacttcctgtctctggtttaatcatgatgcatggagctacaacagccatcttaggtccccgaggtgcccagcatcacgtaaaacatcgatatgctaagaagaacaaaaagagcccaatctctgatgttattgagctcctgcatgaactctggacctgcctgccwcagacttctgtgaaagaataaaatttctttttgcctaagtcactgttagttgggttttctgttcttcagcccagatcacacagtatttgcggtatggtaagcactcagcgcaccagccaaaactcagaacctgcgtgtgcaaaattatcatgtcttcttcctcctgttagaaataagttctcttatttctgagtgccgcagaggaagaggagcactcagaagaaaagtttctcagcaaggcaaagtttacttctgcagaagggtgctgcccgcgcctatagcagtcgcaaaagcacacctaacaaaggagaacaggtttctaaccctaacgcagttcctgcttctttgtctttcccccattggctggggttggaccgcacagtctaggctgactccaattggctatgcgcttgaatctttctcaaataaggcagagggtaaaggttacaggttaaggtttggagcaaggcggtttacagcctatgacaagaaagttggatctttgaagaggaacctttcttttattctgacaatttccccctttttgttgttataattcttcctcttcaaattattttagtaagatttggctttgttgctcttcttgattgtctaggagtaaaagttggtctgaatatggagggggagagacagagaaggttttagtgcaagccatttctatgagtctttgaactaacccacaaacacaaggtgtgatgcaacagcctacaaggatgagtgcacttgtaacaatggcaagggaagtgaggatagaggccataagtcctttccatttaccaaaccatcttttggttaaacctgtgaaggggtcatctattccagaattttcagccagctcatttgctagggtggtgaggccttgtagagccttggtagtggttccatcgggagctgtgttatttgggatcaaagtacaacattgggctctgatgattacacaaactctgccgttttctgctaatgtcatgtcaagagctatcctgttttcccaggccatttggctggtgggaccaaattgctcagctatccccaaatggtatctctggtataattaacaaatccttgttgattgtaatatatatagtttatccagtctacgtttttgtttatagtagaccaccaaaataagactgactcaaacctggcagctatttgatttcgagctttaaattcattggcggctactcgtggtactccaattgcctctatatagacatgggggtcaaaagacccttgaggagcttctctttcttcccaagagggtgactttttgtcggactgatgaaatgccagggtgaaagagatggccagttggattagagtgcaagtgctgctccaattatttggcagcatacccagtagaggtcctccacaataccaccaaacatctgcttgtggatagacaagggcagtctgattggtgagctctcgaaaaggctcggattcactgcatcccgttagattcctgaaagatgtaagttttccccgtcatgagagacaagaggtaaaattggcatcagaggccaggagccagatggcccttgggggctgacccacagggaagtctttgacttttgggaaaagcagtgagagactggtgcatgacttattaccccaggctgtggggtgctggaagagagctactgtacagtccatgcccggttggttagaccatccaagcaggaagggaactatttggatttctggcctgcccattgcacaggcataacagtcgcttttatttaaagtgcaaactgaatatttgatccatttcagccaggcattcatttcttggtgtccggtctcgatggccagggtttgttttaggtctttgacttccactatgtgcactttagttttgtcattaggtagtggcaagatagttgtttcatttggaggagatcttcgggaaggaaggggtgctggaggggcgacaaaacgaatctcaaaggaccctatggggtctttcccgctaacatctgccccataccataaaagcgacttagggtgggaatatggttagtggaggttgaagtagtaatagaaatatgcaccaggttacatcggaggtgttggcagttagaggagttattttgtttagtaaaatggatataaggttttagggaggtgcagcctgctgaagaagtccagccttgggactgagtggtccagagaatatcgtaccaggaatggcaaggtagccaattatagggaatcttgcaaggatcagattgagggtggggtgagtaccaagggcaaagatacttttctgaagaggctagttgcctttgactttgtaggtctctgcaaggtatgactaggcaagcatcaaacacaacagcttgaggggaggctgacctggttacattaacaatgaaatgcgggctgggcacggtgactcatgcctgtaatcccaggactttgggaggccgaggcgggcagttcacaaggtcaggagatcaaccatcctggctaacactgtgaaaccccgtctctactaaaaatacaaaaaattagccgggcatggtggcaggcacctgtagtcccagctactcgggaggctgaggcaggagaatggtgtgaacccaggaggcagagcttgcagtgagtggagatcttgccactgcactccagcctgggcaacagagcgagactccatctcaaaaaaaaaaaaaaatgaaatgcccctgggcaattagggggaagaagagacaaattagacctttttgaatgttaattttgagggagttggtcctggagtgatggtccatgattccataaggggtggggtcctttttacccaagtgtgatgagtccacccctgttcagccgttcgggctgctgtttcagttgttaggagtattagatagggtccttcccacgatggttcgagttttcctccctccagcttttgatgagcacataatccccaggctgatgtgggtgtactggaaactctagaggcggcatttgtgctaagaggccttgggtcctgagggaaaaaagggtggaagatagaccacgtatatagtttttaagaaattgatgttttgtttcaaatgtagggatgtcagtggtggaatttaagcatggcaatctgtagagcgtttcataaggggacaggccgatatcttttcaaggggcgatacgaattcttagtaaggcgacagggaggtacttagttcatggcagtcgggtttccaagattagtttagttaggtgatttatttattttgattcattctttctgcttttcctgatgagggtgggtgccagggagtatgatattcccattttatctctagtgtctgggttaatcctttaatgacctgtgcagtaaaatgggttccattgtctgagtcaatgttctctattaatctgaatctgggtatggtatcttctattagtactttaactacattattggcagttgcacttggcaggtgaatggcttccacccagtgagtgagatggtccactataactgacaaacatttgaggcagcctatttggggcatttcggtataagtcaatatggacactttggaatggccttagcccaggatttcttccgccgaagggcagttttcttaaagtttgtttattggtttttctgcataccatacaactgtctgtgacttgcctggtgagggtataaatccctgtacacccataggttctaaggactgcatcacacatggcttggggaccccaatgggtcccttggtgaagttgtgttaagatttctgtcattaggggtttggacaacatttctttgttatctggcagtatccgtttctcttctgagtttttgttagcccctattttctttaatttttctttgtctgcttgggagaagatgggggttgcagatggggaagggagacaaggggttcagtggaaaatgggtgcttcttgggaagtaactcttgaaagagagacctttatggtgtcctgggacatgaacaatggctatgtcctctggtagctgaaggttttctaatacttgcatgattaactctttgtggacaaggttttggcccttgctagtaataaggccttgttcagtccaaatcttcccaaaggtatgggccactccaaaagcatatttggaattggtgtaaatagtcccttcttgattctgcagctattttaaggcttgatttagtgcgaacaactcacatgtttggttagaccagttattgggaagtctccctgattctacttctgtgagagtttctccatcaaccactgagtagccattatgttttttctcttcaattacccgagaggagctgtctacaaagagatggtgccctgtttttaaaggggtctcacttagatcaggccttactttagtttgatgattaagtctaaacatttgtgcttggggtctccagcgtttggatttcctgtcaggaaggtggcggggtaggccgggcacagtggctcacgcctgtaatcccaacactttgggaggccaaggcaggcagatcacctgaggacaggagttcaagaccagcctgaccaacatggagaaaccccatctctactaaaaatacaaaaaaattagccaggcatggtggcatgcctgtaatcccagctacttggtaggctgaggcaggagaattgcttgaacccaggaggcaaaggttgcggtgagccgagattgtgccattgcactctagcatgggcaataagagtgaaactccatctcaaaaaaaaaaaaaaaaaggaaggtggcggggttgagcacattgtcagtggttagggttaaatcacctttttctaataggatagcttcatattttaggattcttgaatctgtaagccatctccctgctttttggctaagaatggttttaacctgatggggtgtgcttaggatgagacttcccccaaaggttatttttctactttcctctgtcaataaaacagttgctgctgtagattggatacattcgggccacccacaggttaccacgtcaagaatgtttgacagaaaggctgtgggctggcaatggccccatgcttttgagtgagtactcctatagctgccccattgcttatattaacaaaaaagtgaaatggctgttctaaggatggcagagctaagacaggggcagttataagtagatgttttagttcctcaacttgctggacttcttgtggggtccaaagaagggggtcaggcccttcttgggtaagttttagatatagaggttttgtttttaaggcataagagtcaatccacaggcaataatttccagctagcctgaagaattttctaagttcttgttttgtctcaggcagtggcagggatatgatcccttccatttgttcgggccctatcttccgcttacctttgcttattaagtgccccatgtgttttacctcaggttctacaagctggagtttactttttgagacccgtaaccattgttcccttaggaaatttagaaagctaattaaaattgcggttacttggtctttggtgcctctggaaatgagcaggtcatccacatattggagtagacataaggatgatgaaagagggaaattctctaggacttgttccaaactttgactaataggtttggagagtctgtaaacccttggggtagaactgtccatcactactattgcttccaactggaatgagggtcttcccattcaaaagcaaatatgtcccagctatccacagctaaggggcaagcccagaagtcatcattgaggtctattactgtgaaccactggcagtcatgagggatcttgctgataatggtgtaagggttaggaatgacagggtgggtggtctggactatttggttaatggctcgaaggtctcgcagtagccgctatgacccatccgacttttttacaggcaatattggagtgttgtaagaggacatatggggttcaagaagtccttcctgaaggagaccttcgattataagttataaacctattctgcctttcaagggaatagggtactgttttctctttacaacttccccaggat

SEQ ID NO: 96549 - DNA, 12437 bp, Homo sapiens
agacatgtactccacgtgtttagaatccagaagggctacacattccccaagaccagacactcttccacgaggagctgtgaagaaaataaggtggtttgacaaaaggaacaagagtttttgagacaaaaggaaattatctcagaccacccttaggctctaaggaaccacagcatgaaaagaagaaaaggaaatgttcaggaattaggaaggtaggtaggtacagagtagagtagggtgaggctaagaccagaggtttgatttttatactaagaagttgagactttattctcaaaaggatgggtagatactaataggtttccaacagaaggtgaaggttccagatgtatactgaccaaaacagccttcatgtttcccttagcatgatggaactttagacaggtttcttttttttttttttttttttttttttgagacggagtctcactctgttgcccaggctggagtgcagtggcacaatcttggctcactgcaagctctgccttcccggttactcctttctcctgcctcagcctcctgcgtagctgggactacaggcacccaccaccatgtccagctaattttttgtatttttagtagagacagggtttcaccgtgttagccaggatggtcttgatctcctgacctcgtgatctgtccacctcggcctcccaaagtgctgggattacaggcttgagccaccatgcccggccgacaggtttcttcttgattatatggctctgaacacttgtttcttagagcatttactttagcaaactttccattgtaaatcctttctctgcccctttgagatgtatgtaaatctgctcccagactcatgccaaattttacaacccaggaatgtctttctccaggagctagaagtcattttttgaaatgtaaacatcatgaaagacagagcccctctctctcaggctctgtgggtgggtaagagcctaaataattattggtaataagagacaattagcaaacacagatgcctagttacagaaaaatcaagagaaagggaaaagaaaaagaaactgttctgagtttgctatggacagatactttgctgatgagatcatcctgacatagaacaattatcagtacctattttgttactcatagcattcacattactcaggaagtcaaaaggatggtggaaataaggaactcaaggaggagaggcaggggagtagagaaaagaaacaaattcctaagggaggatgtaaacacaagtggaatctttccttttattctgttagtttcaaatgtgccaaggttatcaaaaaactacaattcttacttgatggatgacaataatcagatacaatgggttggcaattgaccaacctccccacaacatcctccagtacttttccactcgctcatctcagtgcctaaaaatctcccacctttttcttggacaaaatgttagaaaaatcattgggagtaatacggaagacaaattgatgaaaaattaggtgagtgactggaggatgagtgaggaagcgaatacagtcaatgagctgagcaatggtgaggtctggaatagaggagtggcagaaagacaagaagggaagggcatatgagagagatacgaagtccaaggaagcaactcctctgtggccagttggatgggaagagggaaaaggagcaagagtgacagtgaagtcgttttgcatagctgtgggggttacaaccttctgatacacttacctaacaccatggacttgtggcctgctgagctggagagagcaaaaaagagcaaagaaggcggcagcagagagactgtgaaaataatgtaaaattagtgaaaactgtgatgatggaggacaaagaccacttgtcaatgcctcaaaggcagtttgataacacctaaaatacaagaaaatggtttctgagttagaatgtgttatagacagaattggggaaagaaaattctgaaggctggagaagaaagaacagaagaaagagaatgaaagggaacactacactctccaggtgcccatcgaagcccagcccacaacccctcaggagttagtaacagatccttttctttttctctttccaaatctttggcattcatgacatgataaatggaaaagcagaaatgagaaagaaaatcccagggagaaaaaaaaaggagatgttaaagcctggtcttctgaacaaagacaaaagttgtcaggtggagcatgagatccaatcatggatgctgttcgtaatggcctttttcctacttctgatgactgcggttcacgcattgaccgtggttatccaggagcaagtatgggcagaaggcccacatacttctcttctaatacatagtaggaaccaaaggtccagaccaaatagtgctatgacatgtcatccttgtccaactgaatatgtaagtttaatgacaatgatgtaaatgcctacttttgatgaagataattccatttcaaagaaggttcctaatgttgcatgcaataaagtactagtacaacaagatgatgtatataatcttttggcaattattcctggtgttaaatgtgatataagcttttaactgtgaggtcctagcatgcccttgacaatggaaatgaatattcgtaaaattcttagacacagaaagaaccactactgatatttactaccagtgctcaagtacttgggagggagataacaaaggcttgactgtgacactggaatcttggctacatggccaggctagccagatacatctgaaaatcaagatgaaatattacatgtctgaaaggaaagattcacaaccatacctaaaacttcaatacttgaaatgatgattagatacactggtccaaatctctttcacaatttctacatcatgctgtctgttacactgcagggtgatggtcaaggtcaccaacaactagatgctggggacacattcagtcatgcagcctggaatttctgagttgattagatacatgtgaagaattcatgacagaaaaattttctaaaatcagctgaaggggccccaagcctcttttgggaaataaaatgaataaacaaattatacatggacagcttctatgaggagatgtgaaatagggcagtctcaaacaaagacatccctagcagctgacagcctggggacatctctaattctgcttacagatgactccaggagactggcagtggaccagtgattcaggaaacccactcggtactgagaaagactgttttccaccagtgtgaactagggaaagcctgaagtttttatccacgtaactagtgcataaaattgtggttctgagtcaatctgcaaagatgttattttcagattagcttacacttccgcccttgattctgtttagttcaatcaatgaattgctcttattagcaaaggctacattttaacagtgaaggaagaaatgaatatataaaaaatacacatcccattgagaatcaaactctgaagttttctctgctgactatagcgtcagactagaagtgacagccagaaattgaggtggctttatattcaggtttccacttttaattactcaaattccaaatggagaatatttggcttggcaataattcatcagaaagaacttttaaggaaaggtcagcattcaccttttaggtttccattttactttgctaattcagacacttctgaataatcaacttgtactccaattccctgaatttggcatagcagggaaatcaggttaaaagatataacaagagaaacacttcagagctagcactcactgaagctgaatttccagcacttagaacagtctttgatacatagtaggtgttcaatagatcgttgttaaatgaagagttgaatgaatgaactcaaggattttggtatgtgggtggctctttcttggccttagttcaaaaatcaggttattaatacatagcaagactctgctttcggaactgaagcaatgcattcatgttaggattgaggcactcattttcccagaggctaaaagtttgctgatagcgcacagctgagtccttctccagaaaggctgctacctcactcaaggtttatccccttccagggcagagcctgatctgtgtccaataacccttgcctcaatttagaaaactcaaaatggctgtcccaggtccaaaggtccctgtgggagtcctcagttgtgactacagcaaagttcaacatctccctcttcctggtcccacttttcttgccctgcacagctgtggttccgtcttgggaaatcctcaataaaacccttgtacacaaaactcagtctcacagtctgtttccccagaaactcaaatgatgacaagacctatgaccgcaaattcttttaaatttgtctttataaagaagtaggctgtatactagaaagtgccctggattaagagagaaaatatataatttcttattaaaatcccaccacagcaatgtaaccctgtgcaaggcaatcttaagtgtccttgtaatgatgcatgtggccagtgtatacaacagccctctgtaaaccatgaagccctatgcaatgattggatgttattatttattattaaacaggatagttgtgactctgcaatggccaacactgcactactcaaaccttagcaagatgaatgaaagtaataattttatacaaagatcttagaagaaagtcttcaaagggaagtctaactaccatctgagcttacattccagagttgtcaacctggtaagacagcaaccaaatggactaggctggtctataaatagtaagagttggccataattttgagtatgtgttacataaaataaaccaatgaaaagagaaaatattattttgggcagagacttaaggatctacctgcaattgattgctctcattgccaaaggctaagttttaacagtgaaggaaggatcaaatatcatcatcattttaggcccagttctttgtctgaaatctaacattattaacttctaatatagcacagcaccagagcatattttattttcttataaagaaagaaagcctttaggtcataaacagaattagatggcaaaaaagtttatattaataataagatcatattttggcccaatattccccgggtatcagagtcctttgaaattagaaagacatagagtaggctcatctataaaccaagacagccagaaaccggcaagtcaggctctatgtgcttacaaaaaaacaatgaattcaatcatccatttccaaagtaaaggtcagcaattctgccgaaccctgtcactgtctctctcctcaagctatttcaaaccttcctctttttttccagaacactgatactatccatttccaactttcaactagtaagcttgcttcttcttttcctgagaaaataaaagcaatcagaatagaacttctgtttctccctagcaccaagtacaccaagctatctgtatctgtactccctcctctgccttctctggctgtactcgggagaacctgccccacattcctgcccacaaccttctattgctcaccaggttccatcttaccacctactcgaaggcactgctcctgcatttggccctcttctgaatcaagttctctctctagtgaattggtcccaccagcatacacacttgctgtattatcttacaaattaaaaaaaagaatcctcctttgattctactatattcttttatagtcatcatcccatttctttccttagttttatagttaaataccttaaaagagcaatctgtggtgaattatagtcatatgtcatttaatgaaagggatgtgttttaagaaacatgtcgttaggtgatttcttcattgtgtgaacatcatagagtgtacttaacacaaacctaggtggaatcacctactacacacctaggctatacggtatagcctgtagctcctaggctacaaacctgtacagcatgttactgtactgaatactgcaggcaattgtaacacaatggcatttgggtatctaaaatacctaaacatagaaaaggtgcagtaaaactatggtattaaaatcttgctctcggccttagcgccatttttttggaaacctctgcgccatgagagccaagtggaggaagaagcgaatgcgcaggctgaagcgcaaaagaagaaagatgaggcagaggtccaagtaaaccgctagcttgttgcaccgtggaggccacaggagcagaaacatggaatgccagacgctggggatgctggtacaagttgtgggactgcatgctactgtctagagcttgtctcaatggatctagaacttcatcgccctctgatcgccgatcacctctgagacccaccttgctcatraacaaaatgcccatgttggtcctctgccctggacctgtgacattctggactatttctgtgtttatttgtggccgagtgtaacaaccatataataaatcacctcttcygcggttttagctgaagaattaaaaaaaataaaataaaataaaatcttatgggaccactgttgtatatgcagtccatcattgatcaagatgtcattatgcagctcacatctgacattcacttgaccctatttgcacacgaatcctctctatgcactttcacatttttcactccacaatctcgtgaggctaccactaactaccctctactccaatccaactaccaattcttagtgtgcatcttactcaacttctctgaaacgctgacagctagacagcttttatgagttatttttctctctgattccaatgaacaagctctcctgctgtttttgtagctaaccataggctcctccttggtattgctccttcttggtctcctttgctgaatcctctgcatcttccctacctctatttaccaagttgccaaggtcaaaacatcagaggcaactgaattttacactcttatgcaatacagcgaatccatcatctcatcctaccagcattacctccaaaatgtagccagaatccaactgattctctccaactctactactttaactctctcattcctattgcctgtcacctggagtatcacattagcctggtacctgctgccctatttccatcattgcaacctgaaaatgttctacctagtagccaaatttatctagaataaattcaggcatgatacactcctcaagtagttccaacaccttctcattacactttgaataaaatccaaagccttctccatggcctataagccccctccatgtgctgaccctttaaaagaacttcctgactatctccattcaactaagcaggttccagtcacatggacatccctgacattcattaaatatactaaggatgcttggccttggaacttgccatttcctctgcccagggatactcttctagaaatccacatatacatgcactctttttgttctggtctctctttaaatgtcacttcttcagaaagtctcttgctgaccaccttatcaaaaacaggatcctctgtcactgttctgctttactttcctttatagcacttgctgccatattgtattatttattcaattgtctgtctctccactggaacataagttccagggcaagcacttttctgtatcttgaaatagtactagaaatacttgaaatagtactagaaataaggtaagcagtcaattaatatttgttgaatttatgaatggctgatttgaggttggaggaagatccaaaaacagaaacttgtccaacaaacctgagtgtgataaactaagtcaaagtcagtttaaatgtaagaagacatttgaaatggaattgtgaaagactgacatgtaaatttttacttatgttattaaagacatttatatgaaaaataggaagtactacttggaggaagcagaaaacacagtgattaaataagtattcaaaatgtcagccccttagactgtctgagttttctgtgcctcaattgctttatatgtgaaatgggaataacagtactatctatcacactgagatgtcgggtgagttaaattacacaatatatgtaaaaaaggcatttcctagctcacagcaatagtacgatgtgtgttaaccattattattattatatttttaataaaatgataaatataagagacagacaagagatgggaaaagacagtaaaagaaactaagcacgaaactctgggtaaatgtcaaatcgtgaaaataggaataaacataaacacacttgcaaaaaggaaggacaatgcccttcagaggacaaattgacatcatttaactcctcagacagatttcaacttggaaagcctacctccaccaaatggaggcctaatctctactgaacagccctgttgtcaacttgttaaatgagggggaaagattcaattttagatgaagctattgatagggaaaaaaaatcagtgtttttagcaaactcttgaagcacaatgtacttacatggtttctaatgcttatactcattatgaatgatgttggagctttaaaaactctactaaggaaatatgctgatgaaaaattttttaatcctgtgtaatttctataaaactaaacatttattatattataatctgttcttaagaaatgtctagtttaactactgcatttaacagataaggaaacagaagcctgaagaagacaaatgcatcgcccaaggtcacacacttaattagtggttagactggattttctcattcttgcttatatattttatctttctttcattatttaaatgacgtttgctagaaaaataggtacagaatgtttccatagccccatcacagttattatcacattttttaaaaaaagaaaaaaagctccagaaaatcaggaacgaattctgttgtttttttttcttccaacccctgctcacggtaaggactcaataaaggtacactgaataaattatgttataatgttggattttctagtttcatctttcaatgactaacatctagtgtggtatctgacatataactgatgcaaacatgtaattattgaaagtatgaatgcatgaatggttgaatggctctaccattttggcatagttaacaaattcagttgagctcaaatatgcaaactggaaacaatttaaaaaatcttgatccacctcctctgatcattttgaaagtgggttagacttagtgacttattcctaaagaatagagtagggaaggggaaaaaattgtaagtctatggtgaaggaacttggcaaataccacctttaccaaatgatcaggttaacatcaccagggatgtcatgtgtatatcacataagtcttgacatgatggggcaaaaagcctacttcacctctacagtattctttctaaaaacccataaatccagtgtaattatgagtaaaacaacagacaaagccagattggaagatattctacaggaagcagtattcccccaaaaccatcaaggtcataagaaaaagaaaagaaaagaaaagtaaagaaaagaaaagaaaaagaaagaaagaaagaaagaaaagaaaaagaaagaaagaaagaaagaaaagaaaaagaaagaaagaaagaaagaaagaaagaaagaaagaaagaaagaaagaaagaaagaaagagaaagaaagaaagaaggaaagaaagagggagagagagagggcgggagggagggagaaagagagagaaagagagagaaagaaagaaagataaaaaaagaaagaacgctgagaaacggttacagatcagaagagactagggagctatgacaactcaatgcaatatggtatcctagatttgatcctgggatagaaattccaaaggtttagttaatagtaatgtagcaatatcagtttccttgacaaacgcaccatggtaatgtaaagtgtttaacaatgagaaaaactgggggaggaatgcacaggaatgccctgtattacctttgtaacttttttgtaaatctaaaattattccaaaataaaaatttgttgcaaaaaattcagtggtggataacagatgacacacttaagagaatgtattaggacttaaggaaggaaatttgcaggtaaacgttcagatcatcctatatgggcattcagtatttacatgcttcatagatttaagtatcttgtcattacagcagatgtttacacaagtagacacaataaaagtaaattgaatgatttagttacactttcttcccataatctttctgtgatatttaccagtattttcaattctatttttgaaagtaagaaagtgagttggagggtggtggtgtgtgcagtttgaagtgagctgcctcaagccaggaagagttctacatagaggaagtcagcctctatgacctactttgagtctggttttatggacttgaagactgatgagcagtatgacagcagggcctctctaacaacaaccaccacaagcatcatagctaccatttttggagagcacactaatgtgccagacttcacaccaagggttccatatacagcattacatttaaccctcagcactgaatggggttataattatattttcattttacagatgagagatttgatcatcagagaaattaaatgactttgtcaaggtttcaactgagattcaaacaccaaaatttctgacttttctactaaatcaccaaacaaggaaattccattagggcaaatgcttaactaaatacctagtttggttaacactaacgatactaggattttaccctatttattgatatattatgcattacatgttataaacatccagataatactgaattatactgagatcatgtatgtaaaagcattgtcaaacactgtatttgatatacaacaaatgttaattccctatccttatagactacatctgttttcaattggcttcaagctggtttctactgcttgtgttttaaaccctagatctgtgtaaattatcatggcaatttaaaagtgcagaataaactggtgctcaaactgaagtttaaccagtttgcatgggaacagagttaaatttgggggaatatcaagttatctcagatttttaaaaaatatatcatgtgtcagtgaatctcttctggggttagaaatacaacagatttttaaaaacagatcatcctttgcctagattatatgattataagctttattaaggacccacttgtatacttctgtttatgagagtgattttctgatatcattattacagatttgctttaatttttttaatatggccactttctctttatgttctacctcttaagttgaatagactgtcccctcttgcaaaccacaactattatctgagggttgataaatcctatggagtgaggaagacttttagtgtcttacataagtctgaaatttaccagcaagagctgagggaaagattgacaaggactaaatttttccgggatattattttagaaggattgccccccagtgagatggggctaagtggaagaggaatgggaaatatctgaaagagtatagtcctctttctctgtgctaaaataagcaaagcaatttaaagggctgccatccattattgtcagggagccctgcattatggacggaagatgggctttgttaggtgacaaacatgcgagcttgttatctaacgggaacaatgagcaagattctgctaaacagtgatggaaaagaaccacatgctgcctgaagatatcacttggcacaccatcaagaaatggaactaacttcaaacgcagtaccatgctactgctctaggtcagtcattgatgacaataaatgaatgacctaagaggattcactctctttgttctgggatgcaggtcagagtacattcctagagtcccttttatctagatgtgttgtgcaaatttcacttaattaatgcttctgaaataacatttattttggcatgcacctcatatatggacttaagcttgcttttgtctttatactcagtttgagccctgtcagccttcccatgaatctgtattctgtttcaagttggaaccaggcaaaagagtaaaggttagtaggagtgaatccagaacctcaaaggataaactttcctgaaaaaccacagttagaagcaccatcaccgcatattaaaagtagaatgattgagttggtcacttttaattccaattcttttattgttttcttcaaatccaaatcattggaatgaatttttacatctttagaataactcctttatccccttttagagagtatatgtgttctttggggtcccaaagacactgttcaatttatttggcttacatttatgccatatttgacttaagaagtttcttcacatagaaattttatcacatatgctgagtaaagcccttgccagaaaatgtcatcttgttggaaaacctcaaaccacaattacctccaggaatggtagacagataatgccacagaaaagataaaacagataattgaaagctataaataagcttcaaatctcatttcagctaaaaatttcaaatgtgtccccactccaaattgaatttcttcagagttgatcgtaagctgcaaaa
